United States Patent Application Publication US 2014/0325702 A1 - sequence listing, part 30

SEQ ID NO: 48789 - DNA, 823 bp, Heterodera glycines
ggtgagataaaatttgaagcaattaaaaaatggctgatcgtgcggggttccaaagtggatttggtggtgctgctccaccgtcggcgcgtgggcgtggtgggcctcgcggtcgtggccgtggcgctgccagagggcgaggacgtggaaaggacgccgagaaggaatgggtcccggttactaagcttggccgtcttgtcaaggatcgcaaagtccttacgattgaggagatttatctccactcgcttccgattaaggagtttgaaattatcgaccttttgctttctggactgaaggacgaggtgctgaaaattatgccagtgcaaaaacagacgcgagcaggacagcgaactcgcttcaaggcttttgttgcaattggtgaccacaacggccacgtcggactcggagttaaatgctcaaaggaagttgccactgcaattcgcggagcgattatcgccgctaaattagccatcattccagtgcgtcgtggctactggggcaacaaaatcggaaaaccgcatacggttccatgcaaggtcactggcaaatgtgcatctgttctcgttcgactcattcccgctcctcgtggtaccggcattgttggtgcgcctgtgcccaaaaaattgctccaaatggctggcattgacgattgctacacttccgccgttggccagacggcaactctgggcaactttgccaaggcgacttactacgccatccaacggacatattcctacttgacgcccgatctttggaaagagaacgaattgccgagaaatcctctggatcacattggcggtggcggggcgcaataagcgcagcgagg

SEQ ID NO: 48790 - DNA, 567 bp, Heterodera glycines
tagacactacccgtaccctaaaattttttaataacttttaaaaattccattttttcaaaaaagagatcctaccatcggcagtattacaatttttgtctttaatttttctggttcaaatggctgttggcaaacagaaaaaatccgcggagaatatcaatgcgaggctggccatggtgacaaaatcgggcaaatactgcctgggctacaaacaagcgcttaaaacacttcgttcgggcaaagcaaaattggtgatcatctccagcaacacgccgacactcagacgcagtgaagttgaatactacgccatgctgtcaaagacgggcgtgcacgagtaccatggcaacaacatcgagctgggcaccgcttgcggcaaactgttccgagtgtccatgctgtccatcactgacccgggcgactcggacatcattcgcacaatgccaaccgaggcctgacaaatctctgtgagctgttgtgatcacacactgtgctcatcgccgttgttttcttatgttgttgttgttgtttttaacttgaaaatttaaaaaaaaaatttcactcggtttaaaa

SEQ ID NO: 48791 - DNA, 658 bp, Heterodera glycines
gaagaatttgcttttttaattttgtctttggattcttagttcttacaatttgagaaatgtctgcgagaccaaaggtttttttcgatgttatggttggcggaaaatcgacaggtcgaattgtgatggaattgtttagtgacatcgttccgaagactgccgaaaattttagggctctgtgtactggcgagaaagggatgggcaaaagtggcaaaccgttgcactacaaagggtcgaagttccaccgcgtcattccgagtttcatgcttcagggtggcgattttactcgaggcaatgggaccggcggcgagtcgatctatggcgagaaattccccgacgagaatttcaaagagaagcataccgtcccgggactattgtcgatggccaatgccggccccaacactaacggctcgcagtttttcatcaccacagtgaaaacggagtggcttgacggcaaacacgtggtgtttgggcgagtcgttgagggcatggacgtggtgaagcaagtcgaagcccagggcaatcagagcggaaagacagcgaacgaaattaccatcgccgattgtggccagctttcgtgaaagcgacaaatttgtgcatcgttacagctcagttttagataattaattattgttttgtaagtttttgcactttgttgctc

SEQ ID NO: 48792 - DNA, 619 bp, Heterodera glycines
agcaattaatgatttgttcttgagtacaaaaaacttaatttattggcttttgacgcccttctcaaaaggcatcacttctcaaaatgatgaagcatacaacgagcagcagcagcagtaacagtggggatgccaagccacagttcatgccatcgaaaccagcgttccatgtcattgggtggaccagcacatgagtcactgttgtccaagcaacattcctcctcccctccacagacggtggagctgagccgggccgacaacggcgactgtgttgtgttggttgtggaaaacacgcggttcattgtgaacccggctttgctggtcgtcaaaccggacacaatgctgggacgaatgttctcgttgagggcacgcacgggcggcgggacaaacactctgtccgtgccctcgtcgtcgtcgtcggccaatgaccccggcgccgaccgtggctcccccagtgatttggtgcgtcccaacgagcgcaatgagtacgacgtggcggagggactttccgccgcttgtttccgtgttgtcatggacttttaccaccgtggctttatgcacgtgccccagtccatttctgtggccgaacttcgcgaggcatgtgactatctgttggtgccgt

SEQ ID NO: 48793 - DNA, 981 bp, Heterodera glycines
gtccaattgagatttgtttatctttactcaacaatttgcggtttaataattaaagacgctaaaaaatggcacaacagcaagcgataacgaagaagcgtaaagctgtgcaagacggaattttcaaggccgaattaaacaactttctcatgaaggagttggccgaggacggttattccggtgtcgaagtgcgtcgtgcaccttcccgtactgaagtgatcatcatggcgacgcgcacccaaagtgtgctcggcgagcgcggcaagcgcatccgcgaactgaccgcactcgtgcagaagcggtttggctattccgctggacaaattgagctctatgccgagaaagtgtccagccgtgggctttgcgcggtggcccaatgcgagtcattgcgttacaaattggtcggtgggctcgccgtgcgtcgtgcgtgctacggtgtgctgcgcttcatcatggaaagtaatgcccgtgggtgcgaaattgtggtcagcggcaagttgcgcggtcagcgtgccaaggcgatgaagtttgtggacggagtgatgatccattcgggtaacccggtcaccgagtacatccaagaggcggttcgccacgtgcaaatgcgacagggcgttttgggcatcaaagtgaagatcatgttgccgcacgaccccaagggacagatgggaccgcgcaatccgttgcccgaccacatccaggtcaaagagccaccgattgacgtcgcgccgaccacgccgtactcggagcaccgcgaaccgatgaccactggcatgccgccccagacacaaatgccgcccgcccatcagcagcagcagctgccgatggttggccaagtgccgcccccggcacagttttaattgtgaggaagaaccgctgctgatggtcctgatggatgagtgggagatgttcaattaaaatttgttatttgtgtgtcatcggcacagaccacccatttttgttccgttaaaaattctttgttgt

SEQ ID NO: 48794 - DNA, 477 bp, Heterodera glycines
ctatgatattgcgcgtggtgtgcaaaaaattctgcaggactacaaatcactgcaggacatcattgcaattcttggaatggacgagttatctgaagacgacaaactgacagtctctcgcgctcgtaaaatccagcgttatctctcgcagccgttccaagtcgctgaggttttcaccggacacaaaggaaaatttgtgactctcgagcagaccattgacggatttgaatccattcttaaaggtgagatggaccacatccccgaagtggcgttttacatgcagggagcgatcgacgatgtgcacaagaaagcggacgagttggccaaacagagttaaatagagaaataataatcggcacatagacctgattgtttaaatttcgttataggctgtttttttgtttaaatgcgtgtctttttggtaaattgttttcaaaaaaaaaaaaaaaaaaaaaaaacccaaaaaaaaaaaaaaaaaaa

SEQ ID NO: 48795 - DNA, 626 bp, Heterodera glycines
gaatgaagcggttggagtgtgccgtccaacactacgcctggggcaagagcggcaaggacagttttgtcgcccatttgttgccggctgagcgagttgatttggacaagcgatatgccgagctctggatgggcacccatccgaatgggccgtcccgtgtgatcgacggcggcgcagaggcgtcaacgaatttgaaggactttttggcccaaaatccgcaactgttgggccaccacgagaagggcgagctgagctttctgttcattattttgtcggtggacaaagcgttgtccatccaatcgcacccgacaaaagaacaggccaaggtgttgcatgccaaagacccggccaactacccggatgacaaccacaaaccggaaatggcgattgctctcaccgactttgagctgttgtgcggctttcaaaccccgcatggcatcatttccaacgtgaaggcccaccgggaactgctccaactcgtcggcgagccgttactagacgaattggcacaggcggaacaccacgagccggactggggcgagcgtgcactgcgccgcatgttctgccaagtgtggacgagcccggcggagcaaattgcgcacgttgttgcacaaattgtggaccgaatt

SEQ ID NO: 48796 - DNA, 594 bp, Heterodera glycines
caagtttgagaaatcagctctaataatcttttcacgtcgtcatgggtcgcatgcacaacccgggaaaaggcatttcgcgctcggcgttgccttaccgtcgctctgtgcccacctggcagaagctgaccaaccaagaggtggaggagcaaattgtgaagttggcccgcaaagggttgcgtccgtctcaaattggcgtgattttgcgtgattctcatggcgttgcgcaagtgcgtcgtataaccggcaacaaaattgtgcgcattcttcgatcaaaggggatggcaccagaaattccggaggatctttaccatctgatcaagaaggcggttagcatccgcaagcatttggagcgtttccgcaaggacattgactcaaagtaccgtctaattttggtggagagtcgaatccaccgtctcgcccgttacttcaaaaccaaacggatgctcccgcccacttggaagtacgaatcggcgaccgcctccgcactcgtctcttaatttggcgatgaaggctgctgctaacgcacatttttatttgttgatgattgaattaaactgttgatctttaaaaaaaaattttgcgccgcaacaaaac

SEQ ID NO: 48797 - DNA, 571 bp, Heterodera glycines
gtcaaatttcgtcaacatgggtatcgacatcaagaaccaccacgtcaagaagacgcagcgccgcgaggccgcttcccgcaacccttacttgttgctcctcgtcaagctctacaagttccttgcccgccgtaccgatgccggcttcaacaaggtcgtgctgcagcgtcttgtcaagtccaagatctacaagccgcccgtgtccttgtccaagctctccgtatccatgaagggccgcgaggacaagattgccgttgttgttggtcccatcaccgacgacaaccggttccacgaggtgcccaagttgaccgtggctgccctccgcttcaccgagtctgcccgtgcccgcattgtcaaggccggcggtgagtgcctcacgctcgaccagctcgccctccgtgccccgactggcgccaacaccgtgctcctccgcggctcgcgccagcgcgttgccctcaagcacttcggcaaggcccccggtacccccggctccactgccagcccctacatccgctccaaaggccgcaagttccagcgcgctcgtggtcgtcgtgcttcccgcgggtaccgcaac

SEQ ID NO: 48798 - DNA, 666 bp, Heterodera glycines
aaaacacagaaatggctgatgacaaaagctgtgacggtgcttcttctgcgttgcctccgtgtttaattgtgcttggaatggccggttctggaaaaagctcatttgtccaaaggttggcgagtcatctccactccaagaaggtgttcccctacttggtcaatctcgacccggcggcagcaaccgttccattcccagcaaacattgacatcagagacactgtaaattacaaaaaggtcatgcaggaatacggcctcggtccaaacggtgctattctgaccagtctgaatttgttttgcactcgcttcaaccaagtgttggacttgttggacagacaaaaggggtccatgccatacgccattttcgacaccccgggccaaattgaggtgttcacgtggtccgccagcggcactgtcatcaccgattcattggccgcctcttttccgaccgttgtcgcttatgtgatggatagtgcccgttcgaccaacccgacgactttcatgtccaacatgctctacgcctgctccattctttaccagaccaaattgccatttttcgtcgttttgaacaagtccgacgtggtggaccctgcttttgccgtcgaatggatgaaagattttgagcagtttcaaactgcgcttgaccaaaattcgtccagtttcatgaacg

SEQ ID NO: 48799 - DNA, 699 bp, Heterodera glycines
gtttgagggcctaattctgactacctagttttgcgaaatggttgtgctctcaaaacttggctcgccgcttcgtccgttttccaatgactatctcctttgccgcttccaggccttccgtaattatgcaatcaaaaaagaaaggccgccaccagcgaagattcaagtgccgccacccgcaaacgaaactggccattggaaatatgagcgtgactactcctatgacctgcgttattcaaacccgatcaacaaatactccagttttaccaggttcattacgctcaccgcaacaggccacaaagaattgtgggcacttttcgcccttctgatgctttcgtcatctctggcgataggaattgtgttctatagccttggcaagatcgaagtttgggttgaccgaagcacctcaactccgccgtgggattgggcgcgagtacgtgacaaatattggaaatttccgacggttctctatgacccgaccggcattactcatgttcgactcagcccgatggagaaacttcaggacgaaatgctggaagctgctaaagaacgtggaacccgcgatgctaagggctattgggttggaaagcaataggaaaatggatgtaatttgatgtgttaactgttctttagcttgcgttctcatataatgtatacgtggagcaaataaaagcagattttaaaaaaaaaaaaaaaaaaaaa

SEQ ID NO: 48800 - DNA, 531 bp, Heterodera glycines
gccgaaagcgaaggggcgaaaggcgacggaacggaggccgagggaagcgatcggtcgccgctgctcacttcggtggatgtctctcgattccgttttctgaacgagcggttgtgcagccaaacatcggcttcttccgcaaagctctttgaggaggaccccgactcgttcaggctgtaccatcgcgggtaccggcaccaagtgtccaaatggccggtgaatcctctcgagaaaatcgtgctggacctcggctcccttccgcccggaagtgtcgtcgccgacttgggctgtggcgacgcggaaattgctaagcgattgggcgaacggctccgagttcattcctttgacctggtggcttcaaatgagcgggttttggcagcggacatggccgatttgccgttggaagcggagtctgtggacgtttgcgtttactgtctgtccgtgatgggcaacaatttggcccaattcttccgagaagctcatcgagtgctcaaaactcacgggaagatccaaattggccagataacgaagcgt

SEQ ID NO: 48801 - DNA, 511 bp, Heterodera glycines
cgaaataccaacttatctcacaaatggctaaacaaaagggtgaaaagaaaggaaaaagtgcgctcaacaaagtggtcactcgggaatataccatccatttgcacaaacgcatccacggaataggcttcaaaaatcgagctccgcgagcgatcaaagaagtgaaaaagttcgctgagcagcagatgggcacacccgacgtacgcgttgacacgcgtctgaataaatttctctggtctcgaggcgttcgtaatgttccattccgcgttcgcgtccgactttcacgcagacgcaatgacgacgaagactctccgcacaaattatacactttggtgacgcatgtgcctgttacttcgttcaaaaggttgacaacggtcaatgtggagagtgaggactgatagatggagaaaggatccggactgagtaaatggctgttttttgttgcgttatattgttgcggattttttgaaataaaagaatcgttgacaaaaaaaaaaaaaaaaaaaaaaaaaaa

SEQ ID NO: 48802 - DNA, 777 bp, Heterodera glycines
atttcgtcctcctcccccttttttcttccctttgtctctttgccgatcgtttgtcgtcctttgaagacgaatgagtaagcgttgatgagctttgattccccacaataattaccaattttgctgctcctactgctgaatattttcaaaaaactgaacggagaaatgcattctaaggacataaaggaaaagggtggacaacaaattgggggacaaggcgaagttggcgagggagggacggcggagaatgggcagcagcggcagaacagagggcaaagcgctgatgccggggcactgccgcaaaggacaatgggagcattgtacgagatgactcccgagctggagaacaaccaagatgagatacgaaaattggactcccaattggaccacctcaatgattacatggaccgggtggaagagaggctgaagacgcacaatgacaaattgatggaaacacttcgacaacagagagaggaccgagagaaacggcgacggagttttcacgagcgtctcgaacaaagccggcaagaagacgatgacttccagcaacagctgagttcggtgctcagccgagtagattctgtgaggagcaaaaaaacggaaccgaaagtgaaattggagggcgatcagctttcatccaattgagtgatacgccttaaaaatgaatgcattccaatgccaaaatgtcacttttcttagcacacatcggtcacttctatctgcgtattgtacctttttaatcgttttcgtggttctgattaaaaattcaagttttcgaaa

SEQ ID NO: 48803 - DNA, 420 bp, Heterodera glycines
  unsure (1)..(420): unsure at all n locations
cctcgtgccgaattcggcacgaggatttttctcatacaaacgaaatgcctttggctgaagatttgttgtatcctgatccgcaaaaggaacgtcaaaagcacaagctcaaaagactcgtgcaacatccaaattctttctttatggacgtcaaatgccctggctgctataagattactacagtgttcagccatgctcaaactgttgtggtctgtgttggttgcagtacagttttgtgtcagccgaccggcgggaaggcgcgacttgtcgaagggtgttcgttccgaaagaaaggacactaagacaatgagacaattataacggaaggcgatgctatcatttatttgttctgatttacaatatttgttgttgttggaaaaaaaaaaaaatcaatttgctnnnnnnnnnaannnaaaaaaaaaa

SEQ ID NO: 48804 - DNA, 667 bp, Heterodera glycines
caattaaggaattctatttgttttttattcaatttcgacctgaatgtcagctgcggtttcttcttcgcgtccgatggaagattggaaatctgagttagctatgccagacaaggaccttcgatacaaaacatctgatgtgactgcgactaagggcgttgaatttgaggaatttgggctcactcgcgaccttcttaaaggcatttttgagaagggttgggagcatccaagtccggttcaggaagcgtcgattggaattgcacttacaggccaagacattctcgctcgcgccaaaaatggaactggcaaaactggcgcatattgcattccctgcattgagaaaattgacccatcaaaagaatacatccaagcaatgataatcgttccaactcgggagcttgccttacaaacatctcagatttgcgtagaactcagcaaacacttgaagattaagattatggtgacgactggcggaacagatcttcgtgacgatattttgcgtctcaatggtattgtacatcttgttgtggcaactcctggccgaattttggatcttatggagaagggagttgcgaatgttgcgtattgcaagacgatcgttctcgatgaagcggacaaactcctttcccaggacttccaaggtgtgcttgaccgtcttgttcagtttcta

SEQ ID NO: 48805 - DNA, 649 bp, Heterodera glycines
gagcttttagcccaattaaaatgcgatatgaattttctgagttctgagattaaaaccgactccccctgcaatgttaatccaggaaaattttcgacttcaattttatgagccgatcagaagagaacattcgctgattgtcaccaacactgacgtggactcactttgtgcaacaaatattctcactcacattttctcttgtgacgatgcctcatacactctcagtccggtggactccttcccgacgttggagaaggcaatcaatgaccatgtcagacaggccaagaacattgtgctggtcaattgcatcggctcgcggtctgtcagcgaattgagcattgcccgactgacggacgaagtgacattttgggtgttggagtcgcggagaccgctcaatttggaggacatttacaacgcgaactctgtgcgcgtgttggccccagcagcggaagttgcggaatggacactgcccgaagcgagtgccatttttgaaacaatggtggagcaggaggacgaagacgacgacgacgaagcgagcgacggggacgaggaaaaccgaccgccgtcggacgaccgcgaagaagcggaggacggagaagcggcgatggcgggcgattccgatcgcgaatccgatgaagaggactcaaatggt

SEQ ID NO: 48806 - DNA, 1596 bp, Heterodera glycines
tgaagataaaagtaattaatggacccttttcaccggaacgaggctaaagttgaggtcgccgttgagccaccaacggcgatagaccaacgcgtggacgacataatgcaaacgggcagatttggagacggccgattggtgaagatggaagtggactatagcgctcaagtggacagtcagttgatagtggcagacaatttggccaaggaggggaagactgccgaggcaattgagtccttggaaaagctggaaaaggacagacgcataaattgcgacatgcgttccaaccagcgcctgttgtgccacatggtcaaattggcatttgacgcgaataattggcaattgctctgcgaaactgcgaagacattgtgcaagaagcgtctgctgatcaagtcgagcatcaagaaaatggtccaagaatgctgcgaaatggtgccaaaagcgccagacgcgtcgtccaaatcgacgctcatcgacacactccgcgcagtgactgcgggaaagatttacctagaggtcgaaagagcgcggctgaccaaacaagtggccgaaaagttggaagccgagggaaaattggacgaagcgcgcgaaatgatgatggaactgcaagtggagacgtacggcacgatggaagtggaggaaaaggtcaattatttgctgcatcaaatgcgcctttccattgccaataatcattttacgcgtgcttcaattatttcacgtaaaatcagcacaaaatttttcgaacgcgaaggcactcaagtgcaattgatgaaattggaattttacaaatatatggtgcaaatcggactgagcgaaaacaactatttggatgtgtgcaaacactttctggcaattcttaacactccgcagatccaagaaaacaacgtcaagaaaattgagattctcaagtgtgtcgtgttttacttgctgctttcggctcatgacaacgaaaaatgggaacttttgcatcgagtgaatgcgatgagagaattggaacaaatacccaaacacaaagaactgctggaactgttcatccaccaggaattgatcttttggagcaaaaccattgagtccgaattcgccccaattttattcgctgctcaaccgccggtcgaagtcatttcggattcgtttctcccgtccacccacgtgtttccgatgaccaaagaggatggtcaaaagcgcagagaacgccttcatgactgtgtgggggaacataatgtgcgatatggtggccaaatattactcgcggatcactttccaacgaatggccaaacttctcgaattcggaattgagcaaatggaagcctttgtgtgcaaaatgattgtcgacggagtaatccccgaagtgaaaattcaccgcccttcgcaaattatttatttgagcccgaaaaagaacggcgcagaagtgctggacgaatgggtttttaacgttcgcaaattgaccgacacaatgaacaaagtcagtcagctgatcgcaaaggaggaaatggttcacggattgcaaatttctcagcggatttgaccgatgatatcgatacaaagaatcaattgattgttttattattgttttcccaaaaaaataaacgaattaaaaaa

SEQ ID NO: 48807 - DNA, 692 bp, Heterodera glycines
attcaacagcagcgccaacttaccccacagagcgacagcgacacatggcggatgagcttgtggcgcttgcaccaggaacgcgtgtctcaggccgatggaccatcctaaagaagcttggcgccggagcatttggagccgtctatttgtgcaaagatggcaagggaacagtggcagcactgaaaacggagccaatcgacacacgtcaaccgcttcttgttatggaggccaccgttttggacaccctgggcaaaaaacttaagaatgctgatggtcaacacttctgccgtctgttggaccttggacgtagtgaacaacggaatgctacgtctggagatacggtgttcaactacgttgtcatgactgtggttggcactccgttggacaaacttattcgaaacgcgggcgatcgcttcagtccgggaaccgcaatcggcatgtcaatccaattgctgagtgccatcaaggctcttcacaatgtcggttttcttcatcgcgacatcaaaccagcaaacacagcgattggacgggcggagaccaacgaacatcgacttctctaccttatcgacttcgggatggcccgtcaatttcttcggcccgatggtacgcagcgacgtccgcgagcctccgcgaatttccgagggacgccaatttacgcaccgatctctgcacatatcaagcgtgactacagccgc

SEQ ID NO: 48808 - DNA, 1065 bp, Heterodera glycines
gtccaattaagcgttaatacacttagaagtgaaatggcttctcgacccttggtctctatttataatgagaaaaatgagccaaccggcaagcaaatcaagcttccggccgttttccgggctccaattcggcctgacattgtgagcttcatccatgaccaaattcgcaaaaacaagcgacaagcgtatgctgtgtcaaccgctgccggtcatcaaacttccgccgaatcgtggggcactggtcgcgcagtggcgcgtattccgcgcgtccgtggcggtggcacccaccgctctggccaaggagcgttcggcaacatgtgtcgtggtggccgtatgttcgcaccgaccaaagtgtaccgtcgttggcaccgccgggttaatgtggcgcaacgtcgttacgccattgtgtccgcaattgccgcttcggcggttcccgcactggtccaagcgcgtggccatgtgattgaccagctcaacgaaattccgctcgtcatttcggacaaaattgagtcgttcacgaagaccaaggaagcggttggctttctccagcgagcgcatttgtgggacgatgttgagaaggtttacaaatcgaaacgcttccgcgccgggaaaaggaaagcgacgcaaccgtcgctacaaacagaaattgggcccgctggtcatctacaacaacgacggtggcattgtgcgcgcatttcgcaacgtccccggcgtcacattgctctccgtcagccacctcaacttgttgaagattgcgcccggtggtcacttgggtcgtcttgttgtgtggacagagtccgccttccgccagttggacccactttttggcacatggactcggcagagcaatgtcaagaagggctttacgttgcctcgtgccaagatgaccaattcggactttgcgcgaatcattcgctcggaggaaatcaccaaagtgttgcgaccgacgatggcgcgaaaagtgcgccgggtggccaagattcatggcaacccgctgaagaaaccctcgctgatggccaagctgaacccgtacgccgctgttctgcgccgtgccgcggtgttggcatc

SEQ ID NO: 48809 - DNA, 600 bp, Heterodera glycines
gcacaaacactggaagtcgtcaaccatcaccaccgaccacttccaccaccaccaccagcagcacaaccagcggaagggccacgtcggtccatcagacggcggccacggcggcaaatccatcgacaaacgccacgggcagaagcagtaccagcaatagcagcagcggctgcggcggcagcaaattccatttgcccgaattgaaagttggccgagcgcaacagcagcaaagcgcggccggcgcatcggccggcggcgatgattgaggatgccatagcgtcggcgatcaatggcggcggaagtgcaacggtggcggacattgcgctgttgcgcaacgggcgactgagcggcgcgtcgtccgtcgtcgccgcgggcgccaacgacgactttgtgcggcgactggtggacgtcgtccgacgcgagccggcactgtacgacccgagccacgagcactacgggaacagacacgccagcacacactttcgaaccgcaatttggcaacggttgtgcaaagagttggactacccagatgatccgcaggcactgcaaaagcaatggaaaagcattagggacaaatacatcaaagagaagaagcggagaaaa

SEQ ID NO: 48810 - DNA, 832 bp, Heterodera glycines
gtccttaagagcaataaatgcttcgcaatttgtccaaatttggcaccattttgaacggtgttgccgacccgttgtccgccctcgtggtgccttccgccgccgcgggtgacgcatcctccctgctgttgccgtgcagtgccggcgctgtgcagcggcagagtcggcgttggggtttcccccgtgggcacaaacatccgccacgtctgtttttcgactttgcacatctcaagcagatcactggcggcgaatacaccaccaaaccgttacaaatcaatcggttgggcggacggtgtccaattacgaggaaaaagctgtgcatacacatcggtggcggtgtaaagtttgactatttcatgctcaatttgcacccgcgcggtccaaccgttgcggacgaaacgtacgatgagcgcgtgatcgaagtgcgccgtgaccccaaccgaacgccgtacattgcgctagttgcgggtgtcaagggaaagcgttggatatacgccacgcagaacatgcaggccggccaaatcatacaaacgacgtgtcacattccggaacggccggtcattggctgtgagggcaactcatacccattgggcgctttggtcgaagggacaatggtgaattcgattgagcttcatcggaacaaccctaactcgcacgtggtcatcaccgaagcaggcggttgtgccgaaattattcgacacatggacgaattcactgttgtccggatgccgaacaaatatgaatacgcggtgcgcaaggaatgcatggcggttgttggaaaactgtcacacgtggactgggataaaaagcattggggctctgcccaaatgcatcg

SEQ ID NO: 48811 - DNA, 603 bp, Heterodera glycines
ggaacttccgccaagcgccaaagacggcgatccaacgcggaacggttcccccctgacaatcaatggaaatcccttcgttcctctaaacgaacgcgcgtatggacgtaaaaaggaagctgttgaggcggatggaatccgctggcaattggccaaaaaggacgaggaattgctcaatttgcagaaagcgctcaaagagcgcgacagtgaaattggcacaatgaaacttcgggtggaaatggcaaagactcagttggcagaaacgacggggaaaggcggcatttccgtggagatggaattgcttcggcagcgatgcaccggcttagagaacgacttgaagagacagaaggatgaatacgaacaacagttggaccaactgcgacaacaattggccgaagaacacaacagaacccgcgagttctccaagaaggcgctttttgcgaatatgcaaaatcaacagcagcaggcggctgcgtcagcactgacaatgaatgcatctcccggcagcgtttccgcctcgcccctctctcgcgtggggtcctcctccggggccagcacaatgggcgccaccgatacgacgcatggcgccgctagcgatgtttcggt

SEQ ID NO: 48812 - DNA, 608 bp, Heterodera glycines
ttaagatcaaaaaattttcccaatctttatatattatttttttcaaaatgcggcagtcgcccaaccaaacgccggtcactcgcacaacgacgacgacaatcactgaacaacagagggaaggcggaggagaccaacagaccaattctgaacaatttgtgcttaggctggaagcaccgcccgacacgcggccgagggtccaatggagcaccggaacagtggacaatgaaaacatgggcaaaaagaagtcgaaatgttgttgtatttacaagaaaaagcgcagttgggacgacccaaacgcatcgagcgaagacgacgacggagaatgtgaaagttcgcattgccgtggccacgtggagaaacagcgaaagccgccgccgtcggacgatggaaatggcggcggtgggcccggcccttcgtccatttcaacctgatcaattttgccaatcatttgcctatccatttactattatttatcgatttcctttatttaaacattgatacaatgtattagaaattgaatgtataatttccatccattcttttgtgatttgtgcgttaaaattgggacaatccgtcgaatggattaaaagaaattcaaatttgaaaaa

SEQ ID NO: 48813 - DNA, 640 bp, Heterodera glycines
gaaataaataaatttaaaagcctcaatgctgataaaacgcgcattttcattctcttctcgtgcattgcaacagcacagtgtcgtcaggcctcccgtccaagtgacaggcattgagggaaaatacgcgtctgctctgtactcgtccgggataaaggagaaaaagctggaaaacatcgagaaagagttgcgtcaagtgaaggagttgtacgacaccaacaaagagtttaagtctttcattgacaacccaattctgaataagcaaaagaaaaaggaggccgttgaggatgtgctgaagaagcagggcgtctcacaacaagttcagaacttcttcggccttttggcggagaatgggcgaatcaacaaattgaccggtgtcgtgagctccttcgaaacaataatgcgagcgcatcgcggagaacttcacgtggaagtcgcaagtgccgagcccctcgacaaaaaacacgaacaatcgctgaacgacgccctgcaaaagtttgccacgcgtggacagaagctgaacttgaccttcactgtgaagccggacttggttggtggactggtggtgaacatcggcgataaatatatcgatttgtcaatggcaacacgccttaagaaaatggacgcggtggtaaagggatcg

SEQ ID NO: 48814 - DNA, 933 bp, Heterodera glycines
atttggtagaggagttggcctttttcaatgaggtcgaagatggttccgttctgagaaaagaagaaattccgcaagaataccgcgaagaggcaaagatactccgccaagaacttctcgaaaacctcgcaaattgtgacgatgttattgccgagtgttaccttaacgaagtgacgccgtccgtcaaagagataaaagaggcaattcggagggcaaccatcaaacggtcctttgtccccgtgctcgtgggcagtgctctgaagaacaagggggtccaacaaatgatcgatgctattgtacattatttgccaaacccttctgaagttgacaattttgtgaatttatatgacaaaaatgacaatgcagaacgcgtgctgatggaccctttgaggaccgcaaactccgaaaaacaaaagccatttataggacttgcgtttaaattggaagcaggaaattttggacaattgacgtattttcggatttatcaaggacgactggtcaaaggcgacactatttatgcgacaagggacggacgcaaagtaagaattcagcgtttggtccgaatgcatgcgaatacaatggaagacgttgacgttgcctatgcgggagacatttgcgcgacctttggcgtcgattgtttcagtggggagaccttttgttcggatgagcaattacgagtccattgcgaatcaatgcacattcccgaccctgtcatttcaatgtccataaaaccgatcggaaaaagggacatggaaaactatctcagggcattgaagcgatttgcaaaagaggacccgacgtttaaactttgttacagcaaagagcacaaagaaacggtggtgagcggaatgcgcgaattgcatttggaaatttatgcgcagcgaatgggaaatgaatacaattgtccggttgagttgggaaggcccaccgtttcgt

SEQ ID NO: 48815 - DNA, 652 bp, Heterodera glycines
attttataaaacttggcaaaactcttattaattgccgttaaagattgatttgaagaatggctgccatgaatcctgaatatgactatctcttcaaattgctgttgatcggcgattctggtgttggcaagtcgtgtctgttgcttaggtttgcggatgacacctacacagagtcgtacatttcgaccatcggcgttgatttcaaaattcgcaccattgagcttgaggggaagacgattaaacttcagatttgggacaccgccggacaggaacgcttccgcacgattacgtccagttattatcgcggagcacacggaatcattgttgtttacgacattacagaccaggactccttcaacaacgtcaagcaatggctccaggaaatcgaccgatacgcatcggagagtgtgaataaacttcttgtcgggaataaatgcgatttgaccaccaaacgtgcgatagagacgaatgttgccaaggagtatgccgaccaattgaacattccattccttgagacttctgccaaaaactccactaatgttgaacaggcgttcatcacaatggccactgaaatcaaaaatcgcatgggccctcttcaacaggccggtggcaatgcgtccgccgtgcgcattggtccgtctcagccggtgcagga

SEQ ID NO: 48816 - DNA, 886 bp, Heterodera glycines
gtgacaaggtgatatgttgtcaaagtgtctccgctcgtcaatttttggctgctttaattgtgcgctccaaaatgtgtcttctgctgccgttttaatgaattcggttcgccatgcggggaccgcagagcattggagacgcgcctatctgaaggatttgtacaacagacggcaaatggtcgggcccgaaccgctgagaggcagggcatccgaggacaattggaattatccctccgaaatttccgcgctttctcatcgtcttcacatccccgacatggacaacgcactgattgtgcaagcgctgaccgacaaaagttattttacgcgcaatgatttggacgacgaagcgatgggagacgacggaccattgacgacggaagttgcgagagacaaatccaacgaccaattagtggagaaaggaatgcccctctttcgtcatatcgtactcacttatttgcgcgcccattggcctttggctcccgaggaattcatcattgccgtggccacccgaatcgcccccacttcggcgctggccgagttggccacccaattaggcctccaccacgtggtcagaaccgcggagtttcctcccactcagcaaacgctccagtcgacactgttggcccttgtcggtgccatggacgtggcaaaagcgcgcgacttcgtccgccgttttgtgctgccgcgactgtacgaagtgccgttggaggatgtgctgccgttccggcatcccttcgccgtgttgggcgattatttgcgcacatggcaaggggcaactgacatccaaccgcgtacaattgggtcgggtgctgttatgaaagcaacgcctttttaccaaggcgccgattacgtggacaaacagcaaattgttggaccatcgggcggtgaa

SEQ ID NO: 48817 - DNA, 536 bp, Heterodera glycines
gcatattttaatcaattaaacatattcttgcgagtaataatggtgggacgagtgcgaaccaaaacggtgaagaaagcatcccgtgtaatcatgtgagaaatattacacaaaattgacaaacgacttccacaccaacaagcgcatttgtgaggaggtggccatcgtcccgagcaaaaagatgcgcaatcgaattgccgggtttatcacccatttgatgaagcggattgagcgaggccctgttcgcggcatttccatcaaattgcaggaggaggagcgggaacgtcgggacaattacatgccggaaatttcctaccttgacgcacagaatcaccagacgatcagcacagaccaagagacgaaggacatgatcgagtatttgggacttggtctcaacttggaggtgaaggggcctgtgccgactggcgcaggacgtcgttgaatcacgaaaaaccattaagcgatttggtggtgttattgttatctttttaagcgctgataaaacaattttgttgaaaaaaaaaaaagaaaaaaaaaaa

SEQ ID NO: 48818 - DNA, 552 bp, Heterodera glycines
  unsure (1)..(552): unsure at all n locations
ttttttttttttttttttttttttntttatttcaacaatttattcatttcactttcaatgacaatgaaccgacttttgcccggccgttctctgctccccaaaatcatgcgaaatttttcacacagcaatcgcctcgccgcctccgaggcggacccggaacattacggctatttcccggacccaaccgaacagacgtggggcctggagagggaaatgcttgctgcccgcctgaagggcgaagatcgctactcacccaaaatttattaccgcgctgaacattcgaccaaggatgtcccaaatgtggtgcgtgtccatttggaggacaaagtcgtcggatgcctttgcgaacacgacggagaccatgtgaattattggcacatcagaaaaggcgacacaaagcgatgcgagtgcggacattggttcaaaggcgtgcaagcagacaccgacagtttcgactgaatgcggtggacaccgatttctcgctttgaagaggataggaaattgttttggttgattaaatctttattttttgttttgttttttcgttttcaa

SEQ ID NO: 48819 - DNA, 919 bp, Heterodera glycines
ccaagtttgagttattgataataaataacctacaacgcctaaatggaattttcttcaactgattatctcaatgagcatcaacgttttgactatcagattttgccgaaagtagaatacactggtacaactttggtgggcatggaatgctttggcggaattgtcgttgctactgattctcgttcttccagtggaacttatatatcgaatcgcacaaccgacaaaattaccatgcttaacgaccgtattgtgatcctgcgagcgggcactcaagcagacacacaggccttggccgatatcgtcatgtattatgcggaagcgcatgcgatcatggacgaagaggatgagattaccgtgcgcaacgttgccaattacgcccgcaaaatgcactacaattatcgcggacaactcaacagcacttttcttgtggctggttacgactccctcaacatgggtcaactgtatgtcatcccaggcggaggatacaccacgcgacacccttattatacgtctggcagtgggtcgtcatacatccgagaatatctccaaaaccaatggaaggaagatttggacggagaagttgttcgtcagattttgaaaaaagctgtttttgaagcgcagagaagggacggtgcttcgggtggtttgattcacacggcaataattaatgcgaaaggaatctcgcgaaagacttatcgccccgacaaagaagattttccaattgtttcgcccgaaaaattctacccaaatttgcctgagcatattctacagcccggcttggttaccattgaacgcatggaaacttgaatcactctgatgctgatgattgaaaaataaatgattttggacacttatgtatcaattgttctatcgattgttaattattctgcaatgtgcttatgttggataaaatcatcagaat

SEQ ID NO: 48820 - DNA, 896 bp, Heterodera glycines
gagatttgaaaattttgaattcgcttttctcattccaaggcaaataattgtaaaatgagtagcccacgaaagaaaatccttctcaaagtcatcattctcggtgactcgggcgtcggaaagacatcgctgatgaaccaatatgtgaacaaacggttcagcaatcagtacaaagccacgattggtgctgattttcttacaaaagacgtgatgatcgatgaccgacttgtcaccatgcagatttgggacactgccggccaagagcgtttccaatcgctcggcgtcgccttttaccgtggtgctgactgttgtgtgctggtttacgatgtcactcacgcgccgtccttcaaatcgttggagagttggcgcgacgaattccttgtgcaggcgagtcctcgtgatcccgaacactttccgttcgttttgctcggcaacaaaattgacaatgacgcggcgcgtgcagtgaatgcgaagagagcgcagagttggtgccagtccaagaatgggatgccgtactttgaggtctctgcccgggacggagtgaacgtcgaagaagctttccaagcgattgcccgtgctgcgcttgcacgagactcgcaggaaacgcacgacttcccggaatttccggaccaaattcgacttgatcagagccgcaatggcagacagcagaattcctcctgttgctgaccgtccgggggcatttcgcgatgagtgaaatggaagaaatggtcgatcactctgtcgagatcaaatgatttgtaatttcaaaaagaaagaattcggatttcaaattcacatcttctaacacagacaagctcattccctcactttgactacccttttaaccaattcaaatagaaacgatgtttagcacttttattatgaggccatttgccccc

SEQ ID NO: 48821 - DNA, 616 bp, Heterodera glycines
attaagccaattaattcatccgtaaattattcaaatcattccgccgatggcatcaattgtggacagcgcaaaagtgaacaattttggaattggcactgttgttgagccgattctcgtcaataaaaatggatccaccggcggtggcggacggaggaaaaataaaactctgttcggcatttcacaagcagtgcatgccgaacatcctcaacagcaattgtccgaattcgctggtggcatttcgcctgtcgacgccgtgccaatgccaaccgcggccaatgactgcaacaataattccatcgaagacattcaatcggaccgccgaaggggcccaattgatccgacaaacttcgaccatttggtccgtctgagtgagctcatccgttccatggccgaccttggcactttgcagcccgagttcggcataatctgtggctccggattgggcgcaattgccgaccaaatggagggggcgcggattttgcctttctccgaggtgcccggctttccacagccgagtgttattgggcacaaagggaatttggtgttcggtcggattggtggtcacttttgcatgtgtcttcaggggcgtttccacccctacgaacacaaaatggac

SEQ ID NO: 48822 - DNA, 690 bp, Heterodera glycines
attaagagatcgcttgactattcgcaagaatgactaaagccgaacaagctgcggaaaaaaaggagaagaagttgggaaaccccatgagagatttaaagattcaaaaactctgtctcaacatttgcgtcggtgagtctggtgaccgtctcactcgtgctgcaaaggtcttagaacaattgactggtcaaactccggttctttcaaaggctcgttacactgtgcgctcgttcggaattcgtcgtaatgaaaaaatcgctgtccattgcacagttcgtggaccaaaagctgaggaaatcattgatcgtgggctcaaagtcaaggaatatgagctttaccgcgagaatttttcggacactggcaattttgggttcggcattcaggagcacatcgatttgggcataaagtacgacccgtcgattggtatctacggaatggacttttatgtggtgctcggtcgtgctggtttgcgggtggcaaaacgtcgacgaatccaaggacgaattggcgcatcgcatcgtgtgcaaaaggaggaagcggtcaaatggttccaacaaaagtatgacggtgttattttgccacccaaaccgaaggaatcccgtaagggtggtcaccgcggacgtaagcgctaattttggatcgttttgttgaatgctattttcccttgttgataaattactatttgttgaaaaa

SEQ ID NO: 48823 - DNA, 1997 bp, Heterodera glycines
  unsure (1)..(1997): unsure at all n locations
cctcgtgccgctgtcattaaacctaaattgtaatggcttcgaaaagtaaacgaacgactcgatcacagcgcgaagcggccattcacattgatgcaagtgcggatgagaccatcgaaagcagcagtaatggctcaacaattaacagttcatcagggcatctgtcgtcgcgtcaggacgagaagaaccacctgtgcaatcttaacgaccgtcttgctggctacattgagcgcgtgcgcagtctcgagacggagaatgcgcgtctacagatccaagtgcgcgaggttgaggttgtggagcgcaaggagaaggaaaatttgtcggcccgctacgagatcaaaatcgacgaactgcgcaagcagttggagttcttcacgcgtgaaaaggccaaattgcaaattgagagtgacaaggcgcagagcggctttgaggagttgaaggcgcgggtcggcaaattggagaaggatttgcgcaaggcggagaaggagcgcaccgcggcgcaggcggacgttcaggaactcacggcacgcttcaacaacacggacaccgcacttggcaacgcggagcgcgagatcgagcaacttcgaaacgagttcaacaactcggaaaatatggtggacatgttgcgtcgtcagttggaggacgaggtgctgctgcgcactgagctggagaatcgtctgcacaccgccaaagacgacttggattttgcgcgtcgcagtcacagcaaccaaattgaggagatacggcgcaagcgccaagtggaaatgacatcgttcagcgacgaagtggagcaccgttaccaggccaagctgcaggaacagctgcaggccatgcgggacgactttgacaatcgcattgcgcagaaccgtgccgaggtcgatgagctgtaccgcaacaagctgggcgaggcggctgaaaacgcgaacagaaaccgtgacttggcggccaaggcgcgcgaggaagcggcaatgtggcgcgtccgtgttcaggacttggagaactccagcaaagaccatcagggcatcgtcgagtcgctgaaccgtcgtgttaaggacttggaggcggcgttgcgccgcgcgcacgaggacgccgacattcgcattcaacagcgcgacgaacagattgagcaactgcagaaggaaattgcgttgatgatcagtgactaccaggacttgttggatgtcaaagtgcagttggacaccgaattgcaggcgtaccagaagatgttggagcaggaggagaccagattgcacattacgccgtcgaccagtccgaacacgtcggttgtcgggcagaacatcagcacgcctaacatggtcatttccacgccacgtccggtcagcccgcgtttggcgacgccggttactcagagcgaaagtctgaccaccgtccgccgtggggtgaagcgccgccgtctcaaccaggatgacattgtctccttcgacaaaacgtccagctcgtggaagagcaatggccattccaacggcaatttggtgatcggcgaggtggacaaggagggacagtacgtgagcgtgatcaacaagggcaaggaggacgtggcggtgggcaattggactctgaagtcgagtgccggcggcagggaggtgcagtacaaattccactcacgacagacggtgaaggcgggcaaaacgctgatggtttggtccaccaactcgggccaggagcatcagccgcccaacaatttggtgttcaagaaccagcaatggccacacgacgacgccatccgcacggagctgttgaacgcggaccgtgaggtggaggcgtggaacgaggcgtttctgcagcacagcttcagcagccgcgtggaggagggcaccgacattgataagaattgtcgcattatgtagatgagtgacaaagtgatggaaggatgatgattggagtaattgagttcgttaaatcaattgtttttttgttctgtttgcttttgaacgataaagtccatccctcgtaannnnnnannnnnnnnnnnnnaaaaa

SEQ ID NO: 48824 - DNA, 641 bp, Heterodera glycines
aaaaaagatgcgagatctgttcatcgaagacaacagcccgatcactccggcccggcttgccgaactgatcagacatttctacgcgttgggatggatgcgcgataacggcggaggaatggcggtcctttgcaacggcgccgtgttcggttcgcccacttcggtgcagaaggagaaagtgtccgaaaatgatctgtttgtaattgatgctacgaccggcacagtactgaaacggccgcaaaacgcggcgagtgttccgagtgccacctgcggactgttaatgaacacaggtctgaactgcgtaattcacacccactccaaatacgcaaatcttgtctctcagttggtcacgggcaacgaattcgccatccaaaaccaggagatgattcagggggtcgagaatcgtagcagcggactccgtctcgacaacgtcgaccgcctcgttgtgcctatcgttgattctgagttaaacgaacaaatgctcagtcctgttttgctccgaactttggacaaatacacagaagcatcggccattttggtgcgtggccacggcttttttgtgttcggctctcactgctggcagtctaccaaaatgatgttggagtgttacgagtacctctttgagttagcctgcgaaatgatca

SEQ ID NO: 48825 - DNA, 594 bp, Heterodera glycines
attaagctcgctttggtcggccaagaaccgattctttttgcccgatcggtggcggaaaacatcgcttacggattggagaggtgcacaattgtggacgtggtcgaagcggccaaaatggccaacgcacacacatttattcaacagactcgggaccaatacgagacaaatgtgggcgagaagggcagtcaaatgagcggcggccaaaaacagagaattgcgattgctcgtgccttggtgcgtcggcctgcaattttgctgttagatgaagcgacttctgctctcgacacggaatctgaacatcttgttcaagaagccatctataagaatctgaaggggcgttctgtcattttgatagctcatcgtttgtcgacggtggaaaaggccgataaaattgtggtgatcagccgaggacgacttgaacagatcggcacacatgagcaactgttggctcaggaaggaatgtatcgctctttggtccaacgccaaatgatttcggtgggggacaatggcagcgaattggaaatggcgggggaagtgccgactgagggccaggaagagactctgagtggagatggcaccgacggtgccgcacga

SEQ ID NO: 48826 - DNA, 682 bp, Heterodera glycines
tctgcttatcagttcatttcttcacattctcccatctcaattacgtggaatgcgtcattcagcttattttgtggaaagaaaattccgactcatttcctttcattttttacgtcgtgttctgtcaacttcggcaatgccaactaaacccagcagacattcgccatcaaaaatcgtccatggagcgggaaaaagcatttgggttgaatttactgctttggctgtcgaatgcaatgcggtcaatttgggacagggttttactgattctccaatgccggattttctcacgcgacatttggccgatatcggaaaaagtcccgaaaggaccgatttccaccagtacactcgtggctatggccacccgcgtttggtctcagtgttggcaaaactttattcacgtctcctcagcgtttccgtggatgcccagtcagaagtgttgatcaccgtcggtgcctatttgtccctctattacgcttttatgggttggctcaacgcgggcgacgaggcaatcatttttgaacctgcttatgacagttacgtctctcagattaaaatggccggcggaattcccgtcccggtcgttttggagttggacccggaggctcgtgggagttcgggttaccgactcgacatggaagtggtgcgaagcaaagtcactgaccggacaaaaatgattgtgataaac

SEQ ID NO: 48827 - DNA, 557 bp, Heterodera glycines
ataagattttgtagttcttgttgtttattttcttggtaatatggctgttggaaagcagaaaaaatccgcggagaatatcaatgccaggttgggcatggtaaccaagtcgggcaaatactgcctgggctacaaacaatcgctgaaaacgcttcgttcgggcaaggcaaagctggtgatcatctccagcaacacgccatctctcagacgcagtgaaattgagtactacgcgatgttgtcaaagacgggcgtgcacgagtaccatggcaacaacatcgagctgggcaccgcgtgtggcaaactgttccgcgtttccatgctgtccatcactgacccgggcgactcggacatcattcgcagtatgccgacggaggcatgagcaatcaaatgaaatgaacggatggacgtgatcagtgatcattcattcattgatcggatcatttgtcatcctttttttcaaatattttgttgttgtttcacccggaagtgtttcatgttttcggtgaaacgaaagacattctcgttgttaaaaggcggttggtttttcaaaaaaaaaaaaa

SEQ ID NO: 48828 - DNA, 430 bp, Heterodera glycines
gtccaattaagcttaaattatatttgctacttacaaaaatggctccaccgacaaacaaagtgcaaaaggtgatggtccagccgatcaacctcatctttcgctgtctccaaagtcgttcgcgcattcaaatttggctttatgaaaacgcttcttcgcgcattgagggttatattatcgggtttgacgagtatatgaacgtggtcattgacgaggcggaggaggtccaactcaaatcgttgaaccgtcacaagttgggccgcattttactcaagggcgataacattacgctgatccaaacaatccaatgacgaggacgggcgaagatctctctgttgttgtgtgctggagcatgaaattaattcgttttcatttgcattttattaaaacgatggtcaaaaaaaaaaaaaaaaaaaacaacgaaaaaaaaaaa

SEQ ID NO: 48829 - DNA, 645 bp, Heterodera glycines
gtccaattaagcaattacaatgcttcaacgtctatttgttggcaagaatttcacctgtctgccgttgttcacttctcatcgcaattatccgggctcaaatttcactttccccatagattggtatgaaaataagtatgtgttactgcaccaacgcgcccgtgaaaaagtttcgcccgattttcacaagcagaccaccggccttaacggcctttacgtgaatgaaaatccgcacaaagaccttcgcttgctttaccaccgcattttgcgcgtgattggaatgatcccggacagcagtcagtaccggatggccgtcgaagaaattgtcaagcatcgcctttcgcttgttgaagcggaacccgacattcaacaattggagcagaaaatcggcatgggtcagattgaagaagtagttcaacaggccgagtatgaattggagtgtattcgtctgtttgttgcacataaatgttgggaaccgctggtggaaaaagcggatgaggcgcaatggcggtggccaattggaccaggcccataagggaatcaaatgaccgtgaaaatttgacgccttagaacgctgtattttttctcgttacaattattttaacgaattcacgtggagaatataaacagtataattaaaaaaaaaaa

SEQ ID NO: 48830 - DNA, 734 bp, Heterodera glycines
gaggaaattactataagtaataattgtcctaaaaaatggtccaatacaaattatattattttgatgggcgcggtttgggtgaatccatccgtctgttgcttcactatgttggccaaccgtttgaggacatccgaattaaagacatggaagaatgggagaaaacgtacaagccgaaatttttttacggaaaggtcccagttttggaggttgacgggaagccattgggacaaagtgctacgattttgcgctaccttgccgaaaaatttggcttggccggcaaagatgaatgcgaaaaggcgaaggctaacgaaatcatcgactttcaaaaggatgctaacactgatttggccccctatttatacgtcaaaatgggattccgccaaggcgatttggacaaattgcgtgccgaagtgttcgagccgggagtcaagcacattttgccactgtttgagaaacttttgaaggagtccgggtcagggtacatgctcaagtccggcctctcaatggtggactttcaagtggccaactttctgtacacgtttaccaagttggagccggagactatcaatgcgttcccggagctgatcaaatacgttgaccgtgtccatgcgctgccccaactgcagcagtatttgaagcagcgcccgcaggaccgctgatcagtgatcagaaaagtcgagattgaatgagaaaagaaaatcaatcattgagattaattcgataagttatgataa

SEQ ID NO: 48831 - DNA, 972 bp, Heterodera glycines
acccgccgtacgtccactacattaacacgcacacaacctcggaaccccagcggggatttgcctttatgccgaaacggggaatgaattcgttggaaaacgaaatcaatcgcatttacaaagtgaccacaaaaggagtcgttgacatccttcaattctttgtgcctcggaaatccgatctgtggcaagccgacctttacccggacacgcgcagcttaatacccgctttgacagcagaagaattcgttggcggcaaaaacgcaccgccgaatttaattccggtgaaccccgaggcagcaaaggcggggccaaaagtgcaagtggcaaaaaaggcaaacattttggcacaaatgccaccccaacaagaacatccgcccgaaccgccgatgcaaaggccggcgccccctcagcagcagcgagccgcgccggtacgccacgacgaggaaatgggcatcgtacgaagccaacgaagagagccatcgccgccggaacagcaaacgccggccccgagacagcaagtccaattgcggtcgagggaggccagggacgaaacgggcggctctcaaacggcaggtcaacgccgcgccgccgcggaattggacagaattcgaagggaacagaacagaagcggggccggagaagcggacggacaaagcaccgccgcaacgacaccgaacgcatcgcgaaggccgagcaattcatccgctgccgcggtcagtggaagcgttgaagacgaattggccaaaatcaaagtggtcttacgacagcacgagaggaggatccgattgcttgaggaccaattggcggatgccaacatggccaatgcttatggaatatgaaaattaatacggacagaaatattgtgattgaagaaatgacgaaaggaaaatatttgaaaatttatagcaaacaaatgcaatttgttcatcacaaaaaatggaatatccgccagctttttgtaaatgagcttcaaat

SEQ ID NO: 48832 - DNA, 586 bp, Heterodera glycines
attcagacggtgccccctttctttaccgtaaagcgacttcgagaaacgatgtctcgtttcgatgggcttggccgtgtttatcttcagtcggagaagaggggcgcacagcgaaaaaagcgctatacggagggatgggttgagtttaaaaacaaaaaggtggccaaggaagtggtgagacttatgaacggccgagtggtgggcggaagacggcggagtgcggcgtacgacagcgtttggacgatgaaatatttgcacggtttcaaatgggaacatttgatggaacagctcaactacgaacagcgcattgagcagcagagactacgcacggaaattgtacaggaaaaacgcaaggccgatttttttgcgcaacaggtagagaagggcgaaagtttaaaaaaattggaggaaaaaatactgaaaaagtgcggactttgggagcagtaccaacgccagcacaaacagctaaaaaattgtggggaggggaggagcagaaattggaggaggacgaatcattgctgcttcaaatatttggaggaaacgaccgaaggaaaaacacttacaatcagaggaaagggaaaccaaacga

SEQ ID NO: 48833 - DNA, 652 bp, Heterodera glycines
attcatacaatgtctaccttttattcgttaaatgtttcttcgaattggctgaaatatttatctcttgggacggctttggtcgttggctatgcagtttacattgaccgtaaacgtcgccttgacccggaatacaaacaaaaaattcgtcaaaacaggaaacagaaacaagccaactttttctacgcaaaaatgagcggaggagttgattttcccgacccaagtgatccacaggcgaatgagatcttcttcttcagtcagatcactcccggagaggagaaaatgaagactggccacattgaggaggggattacgcatctgtcgaatgcaattgtgacttgctcgaagcctgacgaattgctcagaattttccaacagaccatcccaccggagtgtttcagtttgcttgtgcaggcaattcctggcgccaaaatgcgtcggaatgcctcttcatcgtatcgccatgggcgagagccgattgatttagactgtgcaaagattgacgatattggtgacaatgcggtcgacaagaaaatgtttgttttgcaagatgacgagcttgaatgaaatggaatacgacaggaaagcaggccactccaaattatattttgatttgtttcgaataaatttgaaattttcaaaaaaaaaaaaaaaa

SEQ ID NO: 48834 - DNA, 799 bp, Heterodera glycines
ccaagtttgagtttttttaatggccaacaattttctctccgttcgtcgctttttgcattgctgccctccactacgaaatgttgtcaatggcagatggacgacaacgcattacacacagaggccgagagaaaaggacggaaggtggaaatgcgtggacatggctcgtgtggaggacgagttcgacgtggtcattgtgggcggtggccccgctggactgtccgccgccattcgcctcaaacaattggcggcggagaaggcaaaagaattgcgcgtttgcttggttgaaaaagcacccgaaatcggtgcccatacgctctccggtgccatcattgagaccggcggattggaccgtctttttcccaattggcgagaactcgactcgcccatcaaacagccggtgaagaaagacgcattcgcaattctcaccaaaaatggacgaattccggtcccattggtccccggcgtcccgctgaacaaccatggcaattacattgtccgccttggtcatttggtgcggtggttgggcgaacgtgcggaggagcacggggtcgagctgtactcgggcattgctgcgcaggaagtgctttttgacgaggctgggaaaacggtgtgcggagttgcgacgggcgatgttggaattcacaaggacggaagcccaaaggagagctttgaacgcggcatggaactcaaagcaaaatgcacaatttttgctgagggctgtcctggccatctgacaaagtcagtcattggaaaattcgggctcagggagggcagagacccgatgacttttggaaatggg

SEQ ID NO: 48835 - DNA, 725 bp, Heterodera glycines
gtccaattaagatgtttatggccgcggatgatagcaatagcgagaaggaatcaaactctttgagcattcgaactgacaaattgctttcggtccctttcaacggagaagagacttccgagaacacatcccaacagcaacaacagcaaacgcccgttgcccttccgacttcatcttctaaaattttatctaaacagcacccactcaagacgaaatggaatttctggtttttgaacaacaaaaagaaggacatggactggttggaaaggttgtcgaaagtttgcacagtttcgaccgtcgaggaattttgggctttttttgacaacattcatcctccatctggcatgtacggctgcgattacaactttttcagagatggaattgaacctttgtgggaggtggcacagaacaaagatggtggtcgactggtcatccaagttgacaagcagcgaaatgagctccttgatggttggtggatggagtttttgttggcatgcattggtgaacaatttggagacgattctgatcaagtttgtggcgccgtttgcaacatccgtaacaaagggtcgaagatcagcatatggacgacaaatgcgtcggaagaagacaaaaacagacggatcgggcacgtcttaaaagatcgtcttcaagcttccggtggattaaagcctattaagataaatttcgaagaccatgaagtggtgcagcagaagacttcgagtgccatc

SEQ ID NO: 48836 - DNA, 908 bp, Heterodera glycines
caagtttgagatggcccgtcgctatgatactcgtacgacaatcttctctccagaaggccgtctctaccaagttgaatatgcaatggaagcaattggtcaggctgggacttgtcttggaattcgagctcccgatggcattttcattgctgcacaaaaactaacggccaacaaattgcttgatgatcgaatcatgagcgagaaaatctacaaggtgtcggcgaacatcttctgcacggtggcggggatcaccagcgacgcgaatgtgctggtcgacaaattgcgcgaaatggcggtgatgaacactttggatttcggagagaacattccggtggaacagctcgtgatcagactgtgcaacaccaaacagcactacacacaagttggaggtaaacgaccctatggagtgtcacttctctatgccggttgggacacgcaccacggctttcagctctaccaatctgaccccagtggaaattacggtggttggaaggcgacttgcatcggaaagggccaccaaaatgcactttcaattctcaaacaagagtacaaggacgaggacatgacgctggaaaaggccaaggatttggcgatgaaggtgctctccaaaacaatcgaagccaaaatgttgcccgagcagttggagatggctcagctcacccttgacgaaaagggcagacccgagttgcgcatactcgaggaggcggaaaggaagcaactgaccgataaatgggaagccagcgaagaggccaaacagccgtgacgggaaaaattgtgttgtgctttggggcacctttggtcggactttggctcggttaatctatatgttttgtttatttgcgccttgatttgataaaaaatgaattctaaaaaaaaaaaaaaaaaaaaacaaaaaaaaaaaaaaaaaaaaa

SEQ ID NO: 48837 - DNA, 846 bp, Heterodera glycines
gaaagaacaaaacagcggcgacgaggaggcggaagaagcggacgaacaccggacaaagaaaaggggcatcctcagcttggaagacggcatcatcgtcgatgccgaaccgcttgccaagcgggagaagaagcagttggtcatccccgtcctccaagtgtccagcagagcacaaatttctcgcattcagaagctggtggacgagggaacagccacagaaacagacttagcacgactgtcgctgttaatcgacagtttggacgacgagcaaaggaaaactaccacattgccattggacgcgcgccaccaaaccgtgccgaccgttgcggtggcggacgacgacgacccggactacgcgagtgtgccggtgggcgagttcggactggcttttttgcgaggctgtggctggaaggacgagaagtcgtgcatcggcaagtcaaatccgcaggtggtgccactgcgcgtcatcgaaccaaggccaaagggactcggacttggcgctgtccttccgacaacggcaccgccgacggccaacgcgctaaaggcggcagaaaacggtgacgaagaagcgacaacacttggcaaacactcctacgtcagatgcttatccggtctgaacaaaggctcttatggccaagtgatgtcaatggacgaggagaatgccagcattttcgtcgagttggcatggccccccgccaacgttggcaaaacggtgcgtgtcagccaatgggcgggggaagtggtgagacggaaagagtatcgcgagtgcgtaaagggcggcagcggaggaggaggaacagcggagaacggacggaggctcgaaagggtccgagtctgatggaattggca

SEQ ID NO: 48838 - DNA, 558 bp, Heterodera glycines
gtttgagtgaatacgtaactgaagatgcaaattttcgtcaaaactttgaccggaaaaacaattactttggaagtcgaggcgagtgacactatcgaaaatgtcaaagccaaaatccaggacaaagaaggaatccctccggaccagcaacgtttgatttttgccgggaaacaattggaggatggacgcactttggctgattacaacattcagaaagagtccactcttcacttggttcttcgccttcgtggtggaaaggtccacggatcattggcgcgtgcagggaaagttcgtgctcaaacacctaaagtggagaaacaggagaaaaagaagaagaagcgtggccgtgccttccgtcgcattcagtacaaacgtcgttacgtcaacgtcgctgcagcgggaccgggccgccgtcgtgggccaaactcgaatgctgcataaatttctggatatgcaaaatgatacggatgctaaacaatgttgcgtcttttgatatgttgttgttttttttatgaattgaaaaaagtaaattgttgaaaaaaaaaaaaaaaaaaaaaaaaa

SEQ ID NO: 48839 - DNA, 626 bp, Heterodera glycines
cctcgtgccgaattcggcacgaggcaacatcattgcctccgttgctacttgagcgcctgaagaagcgtgggattgttgcgtcaaagaatgaggacgaggaagtttttgctgagagttatgatcaagatgacgattcgaaattggaaatttcccgtgagaaatatcgcggcggtgcccccggatgtcctaacaagcacaatccgttccacgtctgcacagacttttgctttgaccattggcaggagggctatccggagagtcgactatccgataaatacttggagcagcggaacaaaatgttgcggaattacccactgccgaaggattgggtcgaaatttacgacccagggatgcaccgccattactattggaaccaaatgaccgacgaagtcagttggctctccccaaaacacccaaaggccgtcatttcggaagcggcagcaaaatcggcaaaagaagcatggaacatgagcaaaatcgagcgcagtgaaggcgaaagaggcgggcgaagaggggggcgagagggcgacgaaagagagggcactgagcggaggggcaaagagcggtacaaaggcaaacggacaaaggattatgaaattgctttgccggacagtgatgaggaggag

SEQ ID NO: 48840 - DNA, 517 bp, Heterodera glycines
gggttcactttcgctgactgttacagctgcactgatggttaatcacaaggtcaatccaaaggacattggctttctcgcggatggcaccgaaacattggtcgacaaaagcaaaagtgtgaagtcagtgttaatggatttgtttgccgattcgggcaacatggacttggagggcgccgactagaaaaacgcgtgtttcggtgggactcaggcgttgttccatgccgacgattggatgtacgctttttacgcaacacaaaaacgccttgccatcgatgtctgtgctgatgtggcactttattcggctgggcccgcccgatgtacgggcggtgccggtgcaatggcctttctgattggaccaaatgcaccgattgcacttgaacgtggccttagggcatgccattctcaaaatgtttacgacttttacaagccaattggaggcgttagcacgcaattcccacgagtggacgggccaaacagtgtggacacctatttgaacgccgttgacatgtgtctacgg

SEQ ID NO: 48841 - DNA, 609 bp, Heterodera glycines
ttgtcaaatgaacgccattcgccaaaaaaagtgaagagcaaagagaagcagaggaaaagaaacgcgctgaaaagctgcaacaatttgttgattcaagaaatttgggctttcacaagagaaaatccggtgaatacgacgacgaaatgttgacggtttgcggagaacttctgaagaataacccggacatttacacactttggaatgtgcgacgggaggccattgaaaagcgagcgacgaaatgtgaggacgaaagtgacgaggaattggccaaacgaatctccgagctgatcaatggcgagttgaagttgacgcaaagttgtttgttgcgaaacccaaagtcatattcaacgtggcaccaccgctattggtcctgtcttcgccaccccacgccaccgttgcgacaagaattggcactttgcgaaaaggcgttgggccaagactgtcgcaattttcactgctgggaccacagacggtccattgcacggacggcccaactaagtgccgaggaggaactcagattttcggacactttggtgggccgtaacccgagcaattactcagcttggcattatcggggcactttgttgccactgatgaagccgaacaccg

SEQ ID NO: 48842 - DNA, 478 bp, Heterodera glycines
  unsure (1)..(478): unsure at all n locations
tgtaagacaaattttacaaccaaaaaaaaaatggttcgtcttattcaaaaccaattttggcggggaacgttgacgcagccgtggggtgtcaagatgttcaagtacatttggcgcaagcacagtcgttttttggtgaaaacggttatggtccaagaaaacgacatcgacagcgcatttcatctgctgaacagactcatggaacgtgaagggcttttgaagatcatccgcaacacccagcgctatcagaaaccgtttatgcagcgttcccaactgtccatcgaggcgtcgaaggcaattctggaggaggaccgggaccgcaaactcaaatttttggtgcgcaaacaccgcgcggacgcgtacccggggcaactgacgatgtgacggggcgggcggaagatttgtcattgtttttttcactcaaatttttttttattggtaaatattcatgtcttccnnnnnaannnaaaaaaaaaaaaaa

SEQ ID NO: 48843 - DNA, 1194 bp, Heterodera glycines
gttcatctacaaccacgaaattacggcgatggctcggaatgcgtccaaatcaccacagctgttggtcctctactgtgatcagcttttgcgcaaaagtgcacgcaacatggaggacgagaagatggatgagaacctggagcaagtgatgaccgtcttcaaatacatcgacgacaaggacatgttccaagcgtttttccacaagtttttgtgcaagcgcctcgactacgacacgtcagccagcgaggagcaggagcgatgcatgatcgcaaagctgaagcacatgtgcgggttcgagtacacctccaagttggagcgattgctgactgatgtcccgctcagcagggaccactccgagcaattcaagcagcagccgaggacatccaacgttgacttctccgtcattgacgtcatgtcaaacgtgtggccactgcagcagccggtcaaattagaaatcccgcgtcctctcctcgacggcattgactcctacactcagtactacaccaaccgtttcaatggccgtaaactgacctggacgttgcaaatgtaccacggtgaattggtctcgacgagcaacactttcccgtcgaaatactcatttttgtgcaacacgcaacaaattgccgtcctcatgcagtacaacgaacgcaacacgtacacacttggcgaactgcacgtcgctcttggcaccgactttcccggcgatcagctgtgcgctgttgttcaatccttggtcaagacgaatctcctgaagctcaccagcgccgatgggaaagctttgaccgagacgaaactcaatgacaacgagcagaaattcacctttaacccaggattccacagccgcaagctgaaagtcgacttggtccgtgccatgtcctctgccagggagacaaagaaggagagtgaggacgtgcagaagacggtggacgaggacaggaagttggtcatccaggctgccattgtccgtattatgaaaatgcgcaaatcgttgaagcatcagctgctggttgccgaggtgctcaaccaattgacaactcgtttccagccaaaggtgccgatcatcaagaagtgcatcgactcgctgattgagaaagaatatttgaagaggtcggaagaggatcgcgatatgtatgaatatttggcatgacagcattaaatgtattggatgtttgtccgcgttataattgtattgttttg

SEQ ID NO: 48844 - DNA, 705 bp, Heterodera glycines
atggagataatttacgcaattctaagcttttttgggttgctttttcttctttgtttgctattcaaatttcttcgcgcaatttggcgttgtgtttacccctattttattgcacgtccaaaagatttgcgccgtttggtcggtgccaaatgggccgtggtcaccggcgccagcgatggaattggcaaagaatatgcaaaacagttggccaacaaaggatttaacttaatgctaatttcgcgctccgctgacaaattaaaagcagtgaaagaagaaattcagccaaaacaatttttgcagcccgaagtcaaatggatttcattcgatttgaccaacgcaaacattgaggactatgaaaaatggcttttccccgagctttcaaaaatggacattggcatgctggttaataatgtcggaagttttccgccattaatgcgttttcacgagctccccggtggacatcgaagtattgcgaaagatttgattttgaacacaatgccacacaccattcttaccgcttttgttttaaaacaaatgactgaacgcaataaaggcattattgtcaatattgcttcggtggctgctgttttcccactttttcatacagctctgtattcttcagttaaaaaatatctcacttggttctcggcaatcttgcgcaaagattatgctgatactggcattatcattcagagtattcttccgggg

SEQ ID NO: 48845 - DNA, 535 bp, Heterodera glycines
gtccaattaagcgcgcgttaaaatgagtgcaccaacggcattggcgaccaacagcagacgacaaacgcccagcgaatttttgaagaaaattgtcggcaaaccggtggtggtgaagctcaattcgggtgccgattatcggggcattctctcctgcctggacggcttcatgaacattgcgctggaacagacggaggagtaccatggcggacagctgaaggccaagtacggggacgcgttcatccggggcaacaacgtgctgtacatcagcacgcagaagcaatgacggatgcccccggaggggaagtgatcgatcatcaaccaatcaaatcaatcaatcaatgcgtcatttcattatttatcggattcccatttttgacacttaaaaaaattttaatcgctttttaaattgttgagcactgtctgactgactcattctctttctgttaaaaccagcaacagatcttattaccgtaccgtctgctggtaattgatgtacagtacaaacgaccgtattcactaaaataaatctgccaac

SEQ ID NO: 48846 - DNA, 524 bp, Heterodera glycines
ctcaagacaatacgaacacaattcaaagtaaatccaagtcaggatatcctacgaaaatggttattgtctatcgaccttacgtcagtcgttggcgccgagcatggacagttatcaaggcaaagcctcgtttctggctcaaatattatccagaattttctgcgggctggtatatgctggttccatcggtcattatttgtctcggaacaaggttctattttggcgggtatccaaacaacttcggcatgggctggaacgaaaaacccttctatcgtcagtttttcgaggtgcgtcgtcccgatgatccattggttctcaaatggcgtcttcctgaggaatatcccgctcgtttccaaaccaaccgtcagtccgactactaccctactaccgctcacaacaaacactacgcctgggacgtgaaataactgcgtgtcgagcgaacagcgaacgacaagaaaaaaacatgcacatttattttatgttacgtttaggaatgacactgtaaaatgttctgccaaaaaaaaaaa

SEQ ID NO: 48847 - DNA, 596 bp, Heterodera glycines
agatgctttcctcggtcactttccgtttttcctatgccatctcttcttccgtcgcttttccgtcgtcggcattttgcccatttttccacaattttcggcatatttcgctgcttcccaaagatggaatgacattgcatgactttttgccaccgggcagcacaaaagcgattagtttcgcggacgatggacaaaaaactgagacggcacagcgacggacggcggacggacgccttcggttgccggaatggctgaagagggacgtggtggccaagcagagcgatgtgaatttgatcagaatgaagaagcagctgaggggactgaagttggccaccgtttgtgaggaggcacggtgccctaacattggcgaatgtttgggcggtgggcccggcaggccgtcaaccgcggccattatgctaatgggcgacacgtgcaccagaggatgccggttctgctcggtgaaaacggcccgccgacctccgccaccggacccggaagaaccgctgaacacggcgaaggccgtcgcgagttggggcgtcgattacattgtgctgacctccgttgaccgcgacgattttggtcggacggcggcgcggcac

SEQ ID NO: 48848 - DNA, 563 bp, Heterodera glycines
  unsure (1)..(563): unsure at all n locations
aacgtggacatgctaatgagtataatcgtccccgaaaggcgtagcattgccagcgccattcagattctcttttcccatttgttcggcgatgcctccggcccctatttggtcggtgccatctccgacttcgtccgcggctcttccgatttgccagccgatcgtttccattcactgatcgtcgctttttatctgcccaatgctttgctttttctcagcggcgcggcatttctcggcgccgcttattcacttcccgcggatttgaaacgaatggaagcggaaaaagctgcggcagagagcccaaaacccacaacttcggccaccattggcccttcgtccgctaacattggtccgcaagggcggcaaaacgaagcttttgaatgagagggaaaagcagctgataatgatcatcatcatctctgcgtttcataatcattctgttatcgaattctcacattttacttttttttaaattctatttattttatttttttctattttttatttatggcattggcatttttctatataaattttattgtacctttaaaaaaanaaaaaaaaaa

SEQ ID NO: 48849 - DNA, 687 bp, Heterodera glycines
gttcattttgagggtgccgatgttgacgcgtctggttctcgttacggtgcatcaattccatttgaaaaagcaatgcgaccggaagtaattattgcatatgaaatgaacggagatgtcctcacgagggaccatggctttccaatccgtttggttgtgcctggtcatgtcggagcccgacaagtcaaatggctgaacgccattcgccttagtgacgaggagagtcccagcacttggcagcaaagggactacaaagcatttccaagttccgtccaaattggcgatccactgccctttgacacaactccagcaattcaggaatacccagtccaaagtgtcatctgtgaaccaaactcaaacactaaaattgcaccgggtgccaaaactatcacagttcgtggatatgcatggagcggtggtggaagaggaattattcgtgtcgaagtttctccagacaatgggaccacatggaaatgtgctgaattggagcagtgtccggaacagaacatagaacaaatgtggggttggactttgtggagcgtggaactgcccatttccgaggcaacaattcggaatggtcggatggaattggtgtgcaaggcgacggaccgttcttataacacacagcccgagacggggatcgcactttggaatgtccgtgggctgctgcacaatgcatggcacagagtt

SEQ ID NO: 48850 - DNA, 637 bp, Heterodera glycines
gtccaattaagattacactcacaatcttatctacctagttattttttcatttgatcaactacacgattaaaagcgtcaatcatgggcaagggattccaaaattttatgtccaagaaggacttccatccaagtgcatggtggaacttaaaaaggaaatgggaagctgagcaaaagaatgacttggagaaaagaagacaggatgaattgcgtgtccaatatgagaaggagcaagaaattctcaacaataaggcacttcttggtgacgaaaaagcgaggttgggcctttctttcatgtacgatgcgcccgctggcattaacaaaaagaaggaggaagggccggaaccgaaattcgaatggcaaaggaaatacaatgcaccgcgtgaagaatgggcgaaaggaaatgaactcatccaggaccaacctttcggaattcaggtgcgaaacgttcgctgtgtcaaatgtcgcgcgtggggtcatttgaacacggaccgcgaatgcccactgtatggtatgagtggaaatgctgaagaccatggctatgcaaataatccctccgatatcattcgtgatttaaatgtcgaaaagaaaacaaagactgtctctgatgtcacgaccaatgagcagattgatataaaac

SEQ ID NO: 48851 - DNA, 641 bp, Heterodera glycines
gtccaattaagcatcgtttgctcttcgattgttggccatattttgtttgatgagattcgatttctcgagtgttttcacccattttaacccatagtttcactgtcatgaaaattggacatcggaccccgccgaggcagaaaagagccactgaccctcccccacagttcgattcttccgatttgggctctccgcaaaaggtttggtcactgttatgcgagaaggacgagaaattgcgccgagatccgcacgtattttcgcgccagaagaaaataaacgccaaaatgcgtgccatgctgctcgactggctgatggacgtctgtgccgacaaacagctccaccgcgaaaccttccatctttgcatcgattacatcgaccgtttcatcgcattgagtgaccaccaaatgcagccccagcgattgcaactgttcggctccaccgccctggtaattgcgagcaaagtcgaggaaatttatcctccgaaaattgcggagattgccgaatacacggacggctgttgttctgaggctgacattcgaggcatcgaagagattatgctggagaagttggattggacgtgttatccggtgaccgctgtccattggctcgcacttttcatgcagctgatgaacacggacgaagtg

SEQ ID NO: 48852 - DNA, 1296 bp, Heterodera glycines
aaggaaacgaaattttgtatttaaatgtttttactaattggcaaatatccatttttaacttcgacatccatacgtgcattttcgactattaaggaagccttcattttggaagcatgtcgaactccaattggctctttccgttctcaattggcttcggtgtcagcgccggcattggcctccgaatgcattaaagaattgttgaagagaactaaagtgccggcaaaggaagttcaagaggtatttctaggccaagtttgccaggctaatgttggccaggcaccggcaagacaagccgcacttggcgccggtttggacgtggcagtggcggtcactaccgtcaacaaagtgtgcagttctggcctcaagtccagcatgctggccgcccaacaaattcaactgaatcatcagcaattggtcatcggcggagggatggaatcgatgagtcatgtgcctttctatttggagcgcggcgaattgccttatggcggtgccaaactaattgatggcattgtgaaagatggactgaccgatgcttacgattcggtgcatatgggcaattgtgcggagaaaacggcgaaggaatgccaaataggacgggaggagcaggacaattacgccattcaaagttacaaaagggctgctcaagcatggcagaatgggcaaattggacccgaaattgtaccagtggagataaaaacgcgcaaagggactttcaaaatggagcgggacgaggagtacagcaaagtggactttgacaaactgaaggcattgcgcacagtcttccagaaagagaatggcacagtgactgcgggaaatgcctccacgttaaacgatggcgcagccgccgtcttaatggccagcgaggaaaaagcggacgcacttggggtgaagccaatggccaaagtaatcgcctacggagacgcagccacacacccaatggactttccaatcgccccggcgcttgtcatccccaagattttatcagccgcttctttgagcattggcgacatttcacttttcgaactgaatgaggctttatccgtggttccgcttgctgtgattaaaaagcttggcattgacccggccaaagtgaatgctcacggcggtgccgttagcattggccatccgattggaatgtccggtgcacgaattcttgcccatttggtccatgccctcaaaccgggtcagtttggattggctgcgatttgcaacggaggcgggggagccagtggaatggtcattaaaaaactgtgatatgattttgtgaaatattttttatatttacaaatatattta

SEQ ID NO: 48853 - DNA, 1246 bp, Heterodera glycines
gtcaaacttggctcagcagtgatcactcgtgacgacgagtgcggactcgcacttggccgtctcgcgtcgattgtggaacaggtgtccgaattgcaacagactggccgtcaaatgctgatggtttcatcgggtgccgttgcgtttggccgtcaaaagttgcgccaggagttggtcatgtccatgtccatgcggcagactttgcgcgggcccgccggcatgcagacggacaaaagggcgtgtgcctccagcggaatgccgggactgatgagtctgtacgaacagctgttccaacagtacggtatcaccgtagcccaggttctgctcaccaaaccggacattgacgacccgcagcgacgcaaaaatctgcaggcgaccattgaaagtctgctgcgtctgaacattattccaattgtgaatgccaatgacgcagttgcacccgacccgaagcttaacatgcacatttcggacaacgattcgttggccggtcgattggccagcgaaatcagcgccgatctgatgatcattctgtccaatgtcaacggcgtgtacaccggtccccccgagcaggagggcacgcgcctgctgcactcgtattgcccggcagaagcaagctccgtctcattcggctccaattcgaagtttggcaccggcggaatggaagcgaaagtgcaagcatgtgtgactgcattgcaccacggagtgtccacagtaattaccaacggaatgcaaaacaacgtaattaccgatgtggtttatggtcgaaaagttggcacaatgttctgtaacacttcgcgctacgaagggcctccgatcgccgaaacggcggcgaaagtgaaagagagcggccgattgttgcaaagtctgagcaacgaagaaagggcacaaatggtgcgccacatggccgatttactgatggcacgcgagtcggacattctcgaagcaaatcgcctggatttgcacaatgccaaaggcgcaaagttggaagcggcaatgaatcgaccgactgaagctgaccaaaggcaagcttttggacctgcactcgggactgaatatgatcgccgactcggcaaacacattgatcggccgggtgttgaaacggacaaaagtggcggagaatctgatcctggaacagacgacagtgcccatcggcactttgcttgtcatcttcgagtcgcgtcccgactgtttgccccaagtgggcggactttccattgcctcgggcaattcgctgctgctgaaggggggc

SEQ ID NO: 48854 - DNA, 729 bp, Heterodera glycines
gagaatttgaagttcaaaagagagagacgagaaaagttcagtcagtcggcggcgattccttcgaatttgcccccttcgacaagcaatggacaaatgggttcgcttcttctgcacgatgaaatggcgtccgcttccagcggttcttcgacctttgcgttggacatggataaattggagcaacagcgggtgcaggaacagaccactctactgctcgacgataccgaacagttccaccaatcccggttcaacgccatggaaagcattgaaagcagcatctctgagctgggcacgattttccgccagttggccactctcgtctcggaacaaggcgaaatgatcacgagaattgactcaaatgtggaggagagcagcctcaacgtggaggcagcacaccacgagttgctcaagtatttcaacaacatttcccgcaaccgttggctgattatcaaagtgttcggcgttctgatggcattctttgtgttctttgtgattttcctcacctgatcggctgataaactcagttctgcggggattccttcacattgtcatcataatcactcacagaattttattctcttaaacagcagtcaaatcattgaccaaatattcctaacttattacccattctttattgtgttaattgttggtcatcattaggtctttctgaaaatcgctttgtgacggttccattcgcccgttccttcttctgtttaaactctcccactcctc

SEQ ID NO: 48855 - DNA, 740 bp, Heterodera glycines
tcatttgatggtggcaatggcaactgttagttcatctagcaataatacatgtaaaccaagtgaaagttattccgcctcaaaaatacctcaatgtgtcggaaacaatcaaaaaaatgttccacgaattgggaatcaaagagtacgaaccgcaattagtcttacaattgtgtgatatttcttactcattgaccaaggagattctcgtcgatgctcgttctgtttccgagtttagtggcaagaaacaggtggacagaagcgacgttgaccttgcgatcaaaacatttgatgaaaagcacactaatgatcgcccaccaaaagcttttgtgtcggaattagccgcagaaaaaaatgcactgcctttacatccgatacgtcaaaattatggactccgtttaccgaatgaccgtttctgtcaactgcagcccaattacatatacatcggagatgatccgaacaacgaagaccaagcagtccatatggaagagcggcccagacaaaatggatcgtcgaaattcaatgcaataaacaattttgatcctgaatctgtgtccaatctcttgatgacggacaaaaatgctactcaaagaaagaggccatatacaaacggagaaatgcagaaacatacgcaagaagaagattacgacgatgaatatgattgatttttgtcgataattctgtttaaaattagctcattttttaaacagtaaattattcctgtaaaaaaaaaaaaaaaaaaaaaa

SEQ ID NO: 48856 - DNA, 635 bp, Heterodera glycines
atggcttctccgttgcaacgtctgatcacgtgtaattccccccaaattggctttgttgcgggtcgaattcgttttgtgccacattttgaaaaattagcggtgagttggtcagcgaattcgccaaaaagtgagggcgcggaacgttttgtgaaggaattctggccgattatcagagagaacaacccgaacatcgaatacctactcacccgttcgcacaccgaatgcgaccctttcgtcgtgggcacattccgttgggatcgtactcgaaaacagagactttgttggaaacacccgcaccaaattttggcaataattgaacaatggtccatcggtggcgattatcggcccggacgaaagcgcaaagtggcgacgataatcccacggggaatgcaaatcatagacaacgaaacgaagggacacgaagtgttcaaagtgttcagtcggtggaagggcgaacccacggggaacgccatggacccgaagaaacacccgaattacttgtaccatctgattaacgaagctcggaaatgaggaaaaaagtagagcaacatcatttgtttattcgaatttcaaatggattttggaattttaaaatttttcgatgaaataaatataaaaaataaaaaaaaaaaaaa

SEQ ID NO: 48857 - DNA, 1148 bp, Heterodera glycines
  unsure (1)..(1148): unsure at all n locations
caagtttgagcgcaaattgtctggaaatagccaattagccatttaataattgaaggatgggcgaacaaatgaaattggagggttcactccgtggccacaacggatgggtcacgcaaattgccaccaacccattgtataagaatatgttggtgtcggcctcaagagacaaaaccatcatcgtttggatgcttgatgagagtgggtcggtgctaaacggcaaaccgatcaaatcattgcacggacatggacactttgtttccgatgttgtcatgtcctcggatggacagtacgcactgtccggctcctgggacaaaacattacgactgtgggacttgaacacaggacaaacgactcgtcagttcgtctcccacacccaggatgtgctgtccgttgctttctccgccgacaaccgtcagattgtgtctggctcgcgcgacaagaagatcaaactgtggaatacacttgcccagtgcaaacacacaatcgtggaggagtgccattccgattgggtgtccaccgtgcgcttttcgccttctcatgcgaacccagtgattgtgtccgccggctgggacaaaattgtcaaggtgtggaacttggccacttgccgactgaagaccaaccacttcggacacaccggctacatcaactcggtcaccgtatcacccgacggctcactttgcgcttccggaggaaaggacggctcggcaatgttgtgggacttaaacgacggcaaacacttgtacacattgggcggcaatgacgtgatcaacgctttggcgttttcgcctaatcgctattggctgtgcgccgcggttggcccggtggtgaaaatttgggacttggagaacaagacggtggtggacgagctgaagttggacattgccagcaccagcgccgcaaatccgatgcgtgtatccaaaaaatcgtgtccccaatgcatttcattggcatggtccacggacggacagacgctgtttgccggttacaccgacaacatcatccgagtgtggcgcatagcttaagcgaaatgttatggacagagaaatcggcactgatcgtccttttgatcagtttttgttgttgttgttgtacttcttttctgccgatttataaaagtttggttttnnnanaaaaaaaaaaaaaaaaaa

SEQ ID NO: 48858 - DNA, 720 bp, Heterodera glycines
cgcagattcgcatttgattggattctcggtacgcagcataaattggacgtggacgtgcatgtttcggacgaattggacattaacgcgttcttttcaactggagaattacagccgaacgaaaagagtttgcctgttgacgacacttcagccgtcataaaggagcgcttatggcaagagccgaaccatgaaattgtggccaagttgctttcgatgggtttcactgaaaacgcagctaaaaaagcggcgcttttcacaaagaacgaatcagcggaatcggccattaattggattcttcagcattctgacgacactgatgtaaacgatccgcatccgatgttaacgaaacaaagcactccgccactgacatccaaccaaggccagaacgcgtctcagaaagttcgtcacggcaaaggtcattaccgactgcgcgccttcatttcgcacattgggtcgacgccaaattctggccattatgtcgcacacgtaaaggcagacaatggccagtggcacatttttaatgacgaaaaagtggccaaatctcaacatcctccgaagactcttggctatctttacctgttccaacgggccacctgaacagtcaaataaatgctcttttgatatgcttttttgttgttattgaattttatttggcatcgttttattgactcaatttttgttttaattggacttgttttctcaaaatgttaaaaaaggtgtgac

SEQ ID NO: 48859 - DNA, 711 bp, Heterodera glycines
attaagaagaaaactgaaaaatgtcgagacctaaagtcttttttgatataaccattggtggaaaagcagctgggcgtatcgtgatggagctttattcggacattgttccaaaaacggcagaaaattttcgttcgctttgtaccggcgaaaaggggatgggaaagagtggcaaacctctccattacaaagggtctaaattccaccgtgtgattccaaatttcatgttgcagggtggcgacttcactcgcggtaatggtaccggaggggaatcgatctatggcgagaagttcgtggatgagaatttcaaagagaaacacacccagcccgggattctctcgatggccaacgccgggcccaacacaaacgggtcacaattctttgttacgactgtgaagaccgaatggttggacggtaaacacgtcgtattcggtcgcgtcactgatggaatggatgtggtgaaagctgttgaagctcaggggtctcagtccgggcgcgcttcgaaagacattatgatcgctgactgtggacaattgtcgtgagaatagggccaagaaaaaccggattttccaatgttatgaatggtattgaaacaagttaaggcaatctctaattttaattattgagggcgatgataaatttgtgatttattaatggccaatttttctatttttgttggtgcggtacaacaaaataaatacatgttcatgaaaa

SEQ ID NO: 48860 - DNA, 675 bp, Heterodera glycines
caagtttgagtacgattattatcttgcacgaatccaattgtttcctatcttagacacttaaatggcactgaaacgtatacaaaaggagctgcaggacctcggccgtgacccacccgcccagtgcagtgctggccctgtcggcgatgaccttttccattggcaagccaccattatggggccaccagaatcgccttaccagggcggcgtcttctttctgaccatccacttcccgacagactatccgtttaagccaccgaaggtggcgttcaccactcgtatttatcatccgaacatcaacagcaacgggagcatttgccttgatattctgagatctcaatggtctcctgcactgactatctccaaagtcttgctttcgatttgctctcttctctgtgatccgaatcccgatgatccattggttccggagatagcacgcatctacaagacggatcgtgaaagatacaatacgttggcgcgggaatggactcagaaatatgcgatgtgatcgacggacattggcacccgggaagaataccctcacgaccatcccttacatccaccactgaattttcttttggagtcttctctattgtgaaagcgaactttttggaaaatcggcctctcctttattatgtcgcccaagacaaatgtttttcggtaacaagtaaataaatg

SEQ ID NO: 48861 - DNA, 668 bp, Heterodera glycines
gtttgctaaataaaactccaatttcattgcagctgccaatgacttccgcttcatccgaccaacaggaccgtgtggacggagtgctgctttcgttagccacttccttgggcggcggagtgcccgaactgttcgaccacattttttcgttcctttcacgaaaaaccgacttttacaccggcgcttccgttgacgaggcgcgcaaaattgttctcgacgcttttgaaaagcacgcctcgggggccaaaaaggaggcggaacaaaaacgaatgcgcaaagagacggaggagcgaaagttagccgagcgaagggccgcccaaaaggccaaggaggaggcggagttcacgcgggtgcgcgaactcaccgacgcggaagcggccgaattgcagcggaaattggacgcggaaaaattggccgaacaaaaaacgacaaacgccgacgaatcaatgccaattaacagcagcgcaaaaacaagcgaaagtggggcagatggtccaacttcaacggaagaggagaaaagcagcaacaaaacgaaaccgaacgcgggcaatggctgtgacctcgagcgttaccaatggacgcagacactcggcgaattggaagtgcgcgttcccttcccttcgcttggctttccgctcaaagcaaaagatgtgattgtggaggtcaagcgt

SEQ ID NO: 48862 - DNA, 788 bp, Heterodera glycines
ccaagtttgagattatacgacttattttctgcctccaacatgtcaagcagtcttgacgtcttcaaactgacggacgatgacgcaatgaaatttttggtgtgcgaatcgcacatcggcaccaaaaagatggactaccaaatggagcattatgtgtggaagcgtcgatcagacggcattcacatcatcaacattcgcaaaacgtgggagaaactgttgttcgccgcccgtgccatcgcggccattgaaaatccgtccgatgttgtggttgtctctgctcagccgtacgcccaacgcgctgtgctcaagttcgccgctcacatcggtgccactccaatcgttggccgttttacgcccggctctttgaccaaccaaattcaaaagaatttcaaggaaccgcgtctgctcgtggtgtccgacccgcagttggaccaccaggcggtccgtgaggcgtcctacgtgaacacgccggtgattgcggtggccaacacggactcgccgctgaaatttgtggacattgccatcccggcaaacaacaagcaaaagcactccgtcggactgatttggtggctgttggcccgtgaagttttgctgttgcgcggcaaaatcagtcgccagacgggctttatggtggacgacaagctgatcatgcccgacctgtacttcttccgtgacccgcaagagcaggagaaggagggcaccgagggtgaggccgaggcggacatcaccgtcaaggagggcggctggggtgccaccggaggcatggacactatgggcggcgacttccccgg

SEQ ID NO: 48863 - DNA, 1142 bp, Heterodera glycines
gcgtgaaatcttccatattcaagctggccaatgcggaaaccaaattgggtcaaagttctgggaggttatttctgaccaacatggaattcaaccagacggaacttacaaaggcgaatccgaccttcaactcgagcgaatcaatgtctattacaatgaagcacatggtggcaaatacgtgccccgtgctgttcttgtcgatcttgagcctggcactatggattcaatccgagctggagcgtacggacaactctttcggccggacaatttcgtttttggacagagtggcgcgggaaacaattgggcaaaaggccattacacggacggtgctgagttggtggacaatgtgctggatgttgtgcggaaagaagcggaaggctgtgactgtctgcagggctttcaactcactcattcactcggaggaggcacccgctcaagaatgggcactctactgatttcgaagatccgcgaggaatatccggaccgaattatgtcctctttctcagtggttccatctcctaaggtctctgacaccgttgttgagccatacaatgccactctttccgtccaccaacttgtagaaaacaccgatgagaccttttgcattgacaatgaggccctctacgacatttgcttccgcacattgaaacttcagaatccgacttatggcgatctcaaccatctcgtgtctgtgacaatgtctggcgttacaacttgcctccgtttcccggggcaactcaatgccgacctccgaaagttggccgtcaacatggttccgttcccgcggctccactttttcatgccaggatttgcgccgctttctgccaagggggcagctgcgtaccaagccttgtctgtgtcagaacttaccaagcaaatgttcgatgctaaaaatatgatggcagcgtgtgacccgcgtcatggccgttatttaacagtcgcggcgatgttccgcgggcgaatgtcaatgcgcgaagtggacgatcaaatgatgtcggtgcagaacaaaaattcgtcttacttcgtcgaatggataccaaataatgtgaagactgccgtatgtgacattccgccgcgcggtctcaaaatgtctgcaacttttgtcggaaattccaccgccatccaagaattattcaaacgaattt

SEQ ID NO: 48864 - DNA, 639 bp, Heterodera glycines
gaaacattcaaactttggcgcgtacgtaagactgttatgcagatgtgccacgaccgagggtatttggttacgcaagacgagttggaccaaacgctggaccaattcaaggaccaattcggcgatagacccagcgaacggaggcccggcaggggcgagctgaccattttggtggcacataatgacgaccctactgaccaaatgtacgtgttcttcccagatgacccgaaaataggcatcaaaactatcaaacagatctgtcaacaaatgcaagaacagaacatcactcgagcgatcattgtggttcaaagtgggatgacaccgagcgcaaaacaggcgattgtggacatggcgcccaaatacattctcgagcactttttggaggcggaactgatgataaacatcactgaacatgagcttgttccggaacacgtggtgatgagcagcgaagaaaaagcggaactgttggcgcgatacaagctcagagataatcaactgccgcgcattcaagtcagtgacccagttgctcgttacttcgggttgaaacgcgggcaagtggtcaaaatcattcgtgcatcagaaacggcgggccgttacattacttaccgactttgcaattgatgtttaattcagaggatttgt

SEQ ID NO: 48865 - DNA, 484 bp, Heterodera glycines
tctctcgtcgaccgccgccaaaacgccggtccaggagttcggctctgagtatctgaagcggcagatgaacctgggcaggccgttgtcgccgcacttgcaaatttacaagccccagttgacctgggtgatgtccggcgtgcatcggatcctcgcctgcatcatgtccggagcgctgttggtcggcgttttcggttttggcatttgctcaatcgatttcacttcattcgcggaacggcttaactcgtggaatttgtggcgaccggcttttgacatggccaaaggcaccgaattggcgtccgtttaccgctccggctatttggtgatcggcttgtccacgctcatttccctgctcattgtggccaattcgaagcatttgacgaaggaacagttccaacagaagtacaagaaggaagcgaacaaatagagagaggagacaaaaacataatgaaattgggacacaccgcctcaatgtttatgtattgct

SEQ ID NO: 48866 - DNA, 630 bp, Heterodera glycines
  unsure (1)..(630): unsure at all n locations
cattaattcttaaaatgaacaaaactgacgatcaattagctgaatgtcgcgaaatcttttgctacttcgattccaaaggcgacgagaaaatcaatgtgaaacaggttggcgatgttttgcgggcactcggccaaagtccgacggagtccgaagtgcgaaaatgttgtgagcactggaccgaaccagatacgcgcatttcatttgaggaatttgtgccaattttccaaacggttagcaaatcgcgcgctcagtacacaaaggaccaatttgtggagggattgtctcatttcgaccgcgagggcaatggcacaattgccgttgcggaactcaaacatttgctgaccaatttgggtgaacgtctctccgaggaagaggtggangcaactgctcngccggccacgacgtggccaatggttttgtcagcatcgattcgttcattgaaacagtgcttcgttttcctttgacccctccggacaatgaaaaatgccggcggttccgtcgcccctcagccaaaagagcgaaaaactgcccattttcaatagacaacgtttcaatttgagtggacaaggaaatcattccgatcgctgagttattccatatttatttatttaattttgttccctcccctaa

SEQ ID NO: 48867 - DNA, 1257 bp, Heterodera glycines
cacatttttacgggcgaatttggccgaattggggcctacgagaaacagaggccgccatttgagccgaagaatccgttcctggccacacttacgctcaatcgcgagttgcactcagtggccagcgatcgttcgtgtcggcacattgagttggcggtggacaaggcgttgatccgctacgagaccggcgatcacattgccattttcccgaccaatgacaccgaaaaggtggacaaattgggcaatctgttggtggttgagttggacacggtgttcaagctggtcaacacagacgaggagagtaccaagaaacatcccttcccctgcccgtgcacttttcgaacggccctcacccattacgtggacatttgctctccggtcaaatcgcatgttttgaaagcgctcgtcgaagtttcggcggacgaagagacaaaggcaaaacttacgctgctgagcacggcgtcggaggagggattgcgcgagtacgcccaattcatcgtgaaggagcggcgcagcattgtggacgtgttgcagcacttccccgcatgcaaaccgcatttagacctgctgcttgaactgctcccgcgtctccaggcccgctattacagcatttcgtcgtcgccccgcgtggacgcgtcactcgtcgcggtcactgccgttgtgctgcgctacaacacaagcgacgggcgactggtcaaaggcgtgtgcaccaacttcttggcggaccgtgccccgggcgtgtccaccgcgccggtgttcgtccgcaagtccacgctgcgcttgccccaccgggtgcagcagccggtgatcatggtcgggcccggcaccggcttcgcccccttccgcggcttcctccacgaccgattgtggcacaaacagcagggcaaggaggtgggcgagatgcacttgttcttcggctgtcgtcacccagaccatgaccacatttacaaggaggagatggaggaatttgttcgggtcggtctgctcacccaattgcacgtcgcttactcgcggttgggaagcgaaaaagtttatgtgcagcacaaactgtgggaggcgcgacaacaaatttgggagctgatccaagcgggcgcttctgtgtacatttgcggagacgcgagaaacatggcccgggacgtgcagaatatgttttacaaaatttttgccgaagttggaggactcagcgaccaggaatcgcagaagatgatgaaagacatggagagacagcgacggtaccaagccgacgtgtggtcatgagag

SEQ ID NO: 48868 - DNA, 929 bp, Heterodera glycines
aaacatattcatatcaaacaattataataaacgaaaaagcaaaaacaacagcaaacccctgaaatatgttgaatgacgacgattttccggctttgccaaattcagtgctccaaagcaaccaatcccagcaaatatcggcgcaacagaggttaccatcacagcacacacaccaaaacaattcattgctcgtgaacgatgacgctaccaacgcaaggctaagtcggatgaagcagcaaatggcactggaaaactcggacaaagtcggcattcagacgcatccagacggccgtgtcaccaacattccttccgggatgctcaatgatcagtgtgtaacgaatgagacaaacattcgtcttcagataaacagttttcctctcagattcgccatggacggccttctgacctttttgcggaccattgaaagtgcgccgtccatcgtcggacttgcgctgggccacgacttgaccaatttgggtctcaatttgaattcttcgaagcgaaatctcttccaaacgtttggtggtccctgggccgactttccgtgcagaattcaagatttggacgcgaaagtgccggacgaatatttgaccaatgcgaccattcgagacaaattgccgaacatcaaaatgaacaaattgcacgaggacgtccttttctatttgttctacaactgtccgggcgaagtttaccaagtggcggcggcgaccgaactgtattcgcgggattggcgcttccataaagtggaacgcgtttggctcatgcgggcgcccttttcggcgcctccgcgagaaattggcggcacttacgagcggcgttcgtatttggtgttcgaccccatacagtggagacggattccgcgcgaaatggtgttggagcacaaagatttggaggggaagccgagcgtgcccgggacaggacagtcctccgct

SEQ ID NO: 48869 - DNA, 822 bp, Heterodera glycines
ccaagtttgagtgatcttttgcttctgatcaccgactgatcgatcaatcgatcacttcgttattttctcggcaataaaatgccgagtacagccattcaaaaacttttgttggccgtttccatttttctgatcgtcgccggcatcgttttgacagtcgccggtgttttttcgcccgcttggcaagttgttgacattcgcgaattccgagctgaacatcagcacggcctttggtgggattgcattcgtgccgaaaagcatgtggtggcggtgggcgacttttacgaggaagcgccgctccattgcatgtacaaattcgacgagtccgcggcattagtcatcgaaagagcgctgaaccatgtcgacgaggacggggcagctggagaagctgagcaccaccgattctggggatggcataaggtcgtcctttcgctgatccttctctcccaattggctgcgtttgtcgccgtttgcaccggcgtttgtgcgccttattttgccccgtccaccttctgtttcgccatttctctgttcatcgccatgcttttgtcggtgctcgccgatggcattttcttcttctccgctaatcgcgtcgacattcgcttcgtcaccggaatggtcggcacttatgagcaagtgatcggctacgccttttacctccatttgggcggtactctctgctgggcgttcgcttttgtctgtgccattgcaaccacttacaaatttctcacttccaatggacagcaaagaaaactgttcgatgacggcccacggctccactcggccaacctcgcctcggtctaccgacgacccgtggtcgaatgg

SEQ ID NO: 48870 - DNA, 776 bp, Heterodera glycines
gcgaaataaaaaaaagaaattatccaatatttaaaaacagcgaacaaaaaggtcaggaggcaaagaagaaaaagatgtttgaagggccaatcaaaatttggtcatggaatgtcgccggtctgagggcgtgtgttaaaaaaggagggcacaaacatattcgagagtcgggtgctgacattgtatcactgcaagaaacgaaatgttccgaatttccagctgaaatcaacgcattggacgaatatccatacaaaaaactgctgatgactaatgagaaaaaagggtatgcgggcgtggcactcctttccaaggagaaaccaattaaggttgaggaaggcatgggcgacgtggactttgacgaccacgcgcgttacatccaagcggaattcgctgcctttttcttaatcgctgtctatgtgccaaatgctggtcaaaaattggtgaacctacagaagagaggacgctttgatgaacttctgctcaacaaactctccgccctgaatgagagaaaggcggtgataattgctggggatatgaacgtggcgcatcaggagattgatcttcgaaatcccgaaacgaacagaaacaaaaccgccggattcacagaccaagaacgtaacgcattcactcgccttttggacgttggttttgtcgacgtttggaggacccgtaacccggagaccactggcgcatacacttactggtcgtacattggcaaacgatttgccgataacattggctggcggttggactatttcgttgtcagtcagcgactgttt

SEQ ID NO: 48871 - DNA, 711 bp, Heterodera glycines
cctcgtgccgaattcggcgtttgaggtaaattttttgtcgcacacaaacttgagtaaaaatggcatttcgcgcactttctttcgcccgtcgtccgtttacaacttcgtccatttgccgtaaagaaattgacctggtcgccggtgtttatctgaacaaagttcgggaagtggttggcaaacaaagtgagattctcaattcgcctcagttgaagaaggagttgaacgaccaactgaaccgtttggcccaaaaattccatttgccggatgccgacgcggttgccaagttgggccttcagtttaagggagcaagtgttgtcagttcggtggaccaattggttgatgggggacagtcggtggatgcccagcttaatgcgcttaatgacagtcgtgccaaatatgaagcggagcagaaggggaagagacaggctgaacaggagcggatcggcgcaatttctggtgatgcggactatgcaaaagagtttttcccaattccgccgcctcatatcgaagcccagcaattggccgccgccgccaaagctgcgcaatgatattagaagtgatcagcggaatgagtgaccaaaatgacaaaaaacaaatagcgattttctttgcctctttttttgtgtgaaaatttttgtagaatccgtctccgtataaaaatgtgttgttactaaaaaaaaaaaaaaaaaaaaaaaaaaaaaaaaaaaaaaa

SEQ ID NO: 48872 - DNA, 668 bp, Heterodera glycines
gtccaataagctggatttctcagatgactgaagtattcaaacgacctgcactcccactcgttcctgcgagtggcaaacggcagcgtctttcttccgaggacgtctctttggtttcgctcggggattctacgcgcacgggggagcaacgagcgtccggtctacaatgtccgattatgcttttgactggccatgagggcgaaatctacgccgcccaattcagtcccgatggcacatgtctcgcttctgtcggctacgaccagcgaattttcttttggaatgtttatggcgagtgtgagaacttctccactctctccggtcacaaaggcgccattatggacgtacatttcagcaccgatggaagtttccttttcacctgttcaaccgacaaaacagtgcgcgtgtgggacatggaaagtgggaaatgcgtacgccgtttccgtacacacaccgatttcgtcaacggctgtcaccccgcccggcgtggtccatcgcttgtcgtctccggctgtgacggcggcaaaattattgtgcacgatgttcgtcgtcggggccctgtggccacttttgaaagtgtgaacaattaccaagtgacctctgtgacattcaacgacacagccgaacaaattatcagtgggggcattgacaatgtgcttaagatttgggatatc

SEQ ID NO: 48873 - DNA, 497 bp, Heterodera glycines
ggcatttctccgaatacttcgctttttcaaatccatcaattaattcacgccaaactgtgcaatgtccggacgccaaggaggaaaattgaaaccgctgaaacaggcgaaaaaggacgacaaagtgctcactgaggaggacgtcgaattcaaaaagaagcaaatggaagagcaaaagaaactgaaagaggcggcacagaaagcggcggaaaagggcggcaaacttggcggtggcatcaaaaaatcgggcaaaaaatgagtcggtggagaaaaacgccggagggaatgaatttttggacgcaaaaatggctcagaacaaaaagagaatttatatgaacggagtgattgcgactgttctgttttgattcccatccaattttgttgttccatttttgctgtgtatttttatgacggatattttcgccagttattcggcactttttcgtcccaaaaaacacaatcatcatcaaacgcctctgccaagtcaccatcaaagacat

SEQ ID NO: 48874 - DNA, 655 bp, Heterodera glycines
tatggattttcaaaaccgagctggtggcaaaactggaggtggtggcgttgcatcggcgaccgatgcaaacgtcgatcgccgagaacgacttcgtcagcttgcattggagacgatcgatttacaaaaagacccttattttatgcgcaatcacttgggcggctatgaatgcaaactttgccttacattacataacaatgaaggatcatatttggcacacacccaaggcaagaaacaccaagccaacctcgccagacgtgctgctaaggaagcttctgatgtgccggatatgccggtgccgcagcaagcaaaaattgagccgaaaaaatttgttaaaattggtcgtcccggctacaaggtgacgaaagaacgtgaccatgcgtccggtcaacaagcactgctctttcaaatagactatcctgaaattgctgatggcgttgtgccgcgtcaccgatttatgtcttcatacgaacaaaagatccaaccaccggacaagcgttggcaatatcttttgtttgctgcagaaccatacgaaacgatcgcgttcaaaatcccggcacgagagattgatcgatccgaggataaattatggacattgtggaacagggagagccgtcagtatggtatgcaatatgcgttgagacacatgcatgatgat

SEQ ID NO: 48875 - DNA, 631 bp, Heterodera glycines
attaagatgaaattattgagattgcgctcttatcttcatttttcatgtaatttgcatgttcgcaatttgacgaatttatccaaatttggtacctacaatgagaaagccattcagcttatccagcagcactatgatgaagcgacgtcatcttcacatcaatttgtcgattctccatcccaagaagtcttccgaatggttttgccacctccgaatgtgacaggcaacttgcacattggccatgccatcactgtcgccctcgaagacgcaatatgtcgctaccagcgattactcgggaaaaaagttcgttggaccccaggctttgaccacgccggcatggccactgaacaagtggtgcaaaggcaactcgcgcaacgctttggaaaacaaacggacgaaatgtcgcaatcggagtttgtcgcacactgtgaagaatggaaagaggcaagaattcgggacatttctggtcaactccgctccatggcctgttctctggattggcccgatttgttctacacaatggaccaaaatttttcccgcgctgtccgtgtcgccttttgccgtgtgcagtcgcttggactgatcgttcgcgagacgcgtcccgtgttcactgctctctccgcggacgaggaga

SEQ ID NO: 48876 - DNA, 1293 bp, Heterodera glycines
gtccaattaagatgggcccaaaaaaagcgccgccggcaagacgaaaggccgagccaagtgaaggcgaagaggaagtgaagagaaagaaggcgaagagaattgtcattgaggatgaaccggaagaagaagcgaatgggacaggaagtcaattgcaacaaaatgggcatgaagaagcaatggcaccggtagtgaagggaggggacgaagaagacgaagtcgtttctgaagtcggcatctatctgttgccgttggctccgtccgatgctggtggcattgcaaagatggcaaactctgctggtgctgcttcgtcggtgtccatcaatcgacttcaattcccccagcagcatccgaatgtgctccgacgtcgcttcaatggcgcgctgtccggacgcggaaatgcacaggacggagaggaggaggaggaagaccaggaggaacagcgaaccgaccgaactggacggaaattatttgcacagtacaaggcccaggtcaaacatttgcggcttgggttcggctcggactgcgatgaggaggcgatggcatcggccgtcatgcccactttcgccggtggagggggaattgccgaactgctgacaaagaatcacactccgtcttcgtccgcccttttctcgccgcccccttcggcgtcggcctcttcctctgcaatcaaaagggggagtgatttgacctccgacgaaatgttcaccggggaaggcttttcccagcaaggcttgcttaattacgctgtcggattcttcaaaaaaggtcgtctttttttgttaccggtggacaaaaccttcgaaatgcgaaagcccttgcgggggaccattgagcgcgagtcgacggcgcgtaccaccgcattaaagccgtcttcgtccgtcttctccacttcgacacgttccgttgccgctgattctgctccttccggcactgcgtccgcttcgtcgtcttccgtcgctgttgccgcgccgttgcgcattcgctttgcacgtgccgaaaatgacttgcaacgacgccgccgagagcagtcgtccttctacaagcagaagctggtggagcaggaccagtggattccgctcaaagtggagcatagagatttgttggaaatgtacgaaaaggacatcaacaaggtgctgctgtcttcagaatgtccgcccaagtagcaaaaaggcacaatgaatgcttatagacattatattgaaagtcaaaacaacttctcgaacgcttaaactgttctaataacttgcaattgttggttttcccatctggaaattaccaaattatttctgttga

SEQ ID NO: 48877 - DNA, 861 bp, Heterodera glycines
ctttcttttattgctttacacctaaactcatcaaaatgttcaccaaattaatgccatttttatctcttagacaaccgctggcagtggcctcctattctctcatacaacaggctcggaaattttcaacggcagttatgaccaattacgaaatgatcaaagtggagagagtgggcgccgacgacgtcgtcgcactgatcactctgaaccgaccgaaggcactgaacgcattgtgcagccaattgatggacgagctcgcccattccctcacttatttggacaaagacgacggagtccatgccatcgttctcaccggcagtgaaagggctttcgcagccggcgccgacattaaggaaatggtgccgaagaaatttgccgaggttttcggtggcggctttttggagaattggtcccaagttgcgactgtacgaaagccgacaattgcggcggtcaacggacacgctctcgggggtggatgtgagttggctatgatgtgcgatatcatttacgcgggagagaaggccatgtttggacagccggaaatcaaaatcgggacaatccctggagccggtgggactcaacgtcttgcgagaattgttggcaagtcgctggccatgaaaatgtgtttgactggcgaaccgatcaacgcgagcaaagcactcgaaagcggacttgtcgcggaggtgtttccgcctgatcagttggtgtcggaggcgatcaaattgggcgaaaaaattgcagcaaattcaccactgatggtcggaatggcgaaacaggcggtgaaccgttcatacgaaacgacgctccaagaaggccttttgttcgagcgacgacttttccacgcttcttttgcaacgaatgacc

SEQ ID NO: 48878 - DNA, 618 bp, Heterodera glycines
caataaagaaaatcaatcatttgcttctctcaacaaatcttctctcttctttcattcaaataaaatgccaccaaagccatcgggaaaaggggcgaaaaaggcagtgaagtccaccaagacggtgcgcacggctgacaagaagcgtaagaagtctcgcaaggagtcgtactcagtctacatttaccgtgtgctgaagcaggtccaccctgacaccggcatctcgtccaaggccatgtctattatgaactcgtttgttaatgatgtgttcgaacgcattgctgccgaagcatcgcgtctggcccattacaacaagcgctcgacaatctcttctcgtgaaattcagacggcggtgcgtctcatccttccgggcgagttggcaaagcatgccgtttctgaggggaccaaagccgtgaccaaatacacctcgtcgaaatgagaccatcgaaaggacgtgaccaaaacacacacaccatcccaaacagttctctatataactataagaaaaaagaaaaaccgttttctctgtattatgactctttgattttttcttttgtctgtcgtttattttgttttttctttttcgttcgataaacttggatggaaaactcgcttttatga

SEQ ID NO: 48879 - DNA, 634 bp, Heterodera glycines
gtccaattaagctcaattaatgctgaaaaataacttattaatccgtggcaaatccgtccttttctcgttgccgttgagggctttttccctgtccgctcagtgcgccaacggtgagcccattcgtcgcgtcgttctgatccccggcgatggcattgggcccgaaatttcttccgcggtgcaaaagattttcgaggcggccaaaaccccgattgactgggatcccgtcgatgtcacaccggtgcagggccgggacggcattttccgcattccgaacaaatgcattgagctgatgcacaagaacaaagtgggactgaaggggccgctggagacgccgattggaaaggggcaccgttcactgaatttggcggtccgaaaggagtttaatttgtacgccaatgttcggccgtgccgttcgttggagggccacaaaacgctgtacgacaatgtggacggggtgaccattcgggagaataccgaaggagaatattcaggcattgaacacgaaattggctctggtggtgtgcagagcatcaaactgatcactgaacaggcgtcccgacgcgtcgcccgttttgcgtttgaatacgcacgacaaaacggacgaaaagaggtcaccgctgtgcacaaagccaac

SEQ ID NO: 48880 - DNA, 638 bp, Heterodera glycines
cacttttccaatttcttaaaatggcagctcatagccctggcagttccggcgacacttcaacgccgtcgctgcgcaaatttctcaccgacgccctcgtcggtggcacagcggcgggcattgccaagacgggaatggcgcccattgaaagggtcaaattgatattacagtcccaagatgcttcttcacaaatcactgcggacaaacgctacaaaggcatcgtcgacgtcctcgtccgtgtgcccaaagagcaaggctttttggcgttgtggcgtggcaatttgccaaacgttcttcgctactttcccacccaagcgctgaacttcgccttcaaagacacttaccagagaatgttcatggagggagtggacaaggacaagcaattctggaagtccttcgtcatgagtttggcctcgggcggtgccgctggcgccacttcgctgtgttttgtgtaccctttggactttgcgcgaacacgattggctgtcgatgtcggaaaggccgatacccgtgagttcaaaggtttggcggactgcatcatgaaaatcctcaagtcggacggtcccatcggtctctaccgcggcttcttcgtctccgtccagggcatcatcatttaccgcggccgctacttcggctgcttc

SEQ ID NO: 48881 - DNA, 668 bp, Heterodera glycines
agaaggggaggtgaaacatcggcagtactaccattatttctttagtatgaatcgaattctaagcaaaaatttattcaatcggttctttgtcggttatgaaaatctcccgtcttgtcggcactacccaactctccgttcctctgctaatgcgccaaaaccagatgatttgtatgaaccgagattcgagagtgaccgcaaatatcctgacgttccccttctcaatgtgttgctacaggcgtatgattttcaacccgtcgagaaatttcaagcgtacgtacattgggccgccaaacattttgggatacaaatcgtagaaagttatgctcttgcacacacttctgagcttgtcaaggagtacaaggctggctcgaccattcccgtttcgcaatctgttttgaaaacgtacagcagagttgtgcgggttggacccgtccccggcatccaactccccctcttcattgcccttttgcaagcgcacgcacccgttgggatgaaaattgttgtgaagaaacattccccgcgcgacgaacgctgcagatatattcctgacccacaattggaagattttaaagaaacgttgcgtaatttggatgaccctgtcgtcaggaaacttttgggttgggaggcgtaacaaccgagtcaatggaaatgtacagtaattaatgctt

SEQ ID NO: 48882 - DNA, 636 bp, Heterodera glycines
ttcctttttattttctggtccaaatgtcttctaagccggcatacaaagttgctgacatttctttggccgactttgggcggaaagaaattacaattgcggagaatgaaatgcccggactgatggccatgcgggcaaagttcggtgcgcaaaagccattgaaaggtgcgcggattgccggctgtttgcacatgactgtccaaacggcggtgcttatcgaaacgctgttggaactcggcgccgaagtccaatggtcgtcctgcaacattttctccacccaagaccacgccgccgctgcgattgccaagcgtggcgtgcccgtctacgcgtggaagggcgagacggacgaggagtacgaatggtgcattgagcagaccctgattttcccggacggaaagccgctgaatatgattttggaccaccgaggcaacctgaccaaccttgtgcaccaccaacacgccgaacttctgcccggcatcatcagactgtccgaagagaccacgacgggggtgcacaatttgcccaaaatgttggcggccggactgctgaaaacggcggccatcaacgtgaatgactcggtgaccaagtccaagtttgacaatatgtacggcatccgcgaatcgttgccggacggaatca

SEQ ID NO: 48883 - DNA, 663 bp, Heterodera glycines
agtttaaattccaataaatcacgttaaattcattcggtccattctttcatcgtttaaagcgcaaacggtaaattgaccatattttctcctccatcgtcaacaattatgtccaaattcgaaggagggttctcttctcatgattcctatggctatggtcaaatgccttccgctttcccttccattggtggcgctgcgcccagtgcgcctccttttggcttttctggagcaccgatcggctcgcatgcattcggaggcgatattccgagcccacttgacgcggaaatccaaattgttctgagggaaattcagtcggaagtgcatcagctagagaacagtggcgaatacggggaacaattgaaaaatgcgcgtcgactgttggccaccgaagcaaccaagctcgagaataacatcgacccagaatggctcgaagtggacatcaacaaaccgatcaaagtctccaagaaggtgctcatccccagtttccgtcatccaaagtttaattttgtgggcaaagttcttggaccaaaaggcacgactttgcaaaatatcgccaaatcatacaaatgtcacgtgtacattttggggcggggcagcactcgcgaccgaaccaaggagcaggaaatgctcagcagcggcgacccacagtacgctcactactgtggg

SEQ ID NO: 48884 - DNA, 518 bp, Heterodera glycines
gtccaattaagattaaatttactttcctatccattcttttctaaattgaaaatggccgacgaaagtggcacgaacgcaggaggagccggtgccgctggtggcgctcagcccgccgagtacatcaaactgaaggttgtgggccaggactcaaatgaagtgcatttccgggtcaaatacgggacatccatgggcaagctgaagaaggcgtacgctgagcggactggcgtccaggtgacttctttgcgctttttgttcgatggccgccgcgtcaatgacgacgacacccccaaatcacttgaaatggaggaggacgacgtcattgaagtgtaccaagaacagctcggaggctacattgtggaggaataatgaagattgtgaacatttctccgtgtttctttctctgacgatgatcttttgcggatgttatatttatacttcgatttgtttctttttttgtttctttgaaagaattggattccaaacttttgttgtttaatttatcacacttgtaaaaaaaa

SEQ ID NO: 48885 - DNA, 647 bp, Heterodera glycines
aaataagggtgtaaatttaaattaaatttaaatcgaaatggcttcaacaacaattcgcttttgctcattgttcaagcgacttccagcaaagacatttgttagttgcaggactttgtcaacgagccggccgatgtttgcagatattctctacacggataaacacgagtggctttcgttggacgaggcgagaagtgtcggcaccgtcggcatcacaaaccatgctcaagaatctctgggcgacgttgtttacgtggaattgcccgaaattggcaaaaaattggacagtggcgacacagcgggtgccatcgaaagtgtgaaggccgcctcggacctttacgcgccggttgccggcgaagtggtggaacggaacgcggaagtggaggacaaaccggcgctggtcaacaaggactgctacggaaagggttggctgtacaagatgaaggtgagcaacctgaaggagttggacgagctgatgagcgagcaaagctataagaactttttggctgaggagagtaacaaagatgacgagacgcaacacttttagtcaatttgaggggaggaaagaatcattttgtttgcatgatttttgaggaatcaaatcatatttttaatttattctctacattatgttcacatattattcaagc

SEQ ID NO: 48886 - DNA, 3309 bp, Heterodera glycines
ctgaacatggccattttgcagaatctgaacgaaaaggaggccaaaatcccaacttcggtcggtgtgcagttgcgcattctcaactcaatgccgattttggccaacatcgaaggccaaatgaagatcaaagcggagtcggcaagtcttatgtctccactcggcatccaattcgacgtcaacacattggcatccgcccgcctttcgcaaatccagaaaatggaactatggactccgttcgcgtccagcggtgtggaaagtgtgcgctcggcccaagtcaatctgccgcttcaggccgaactgaacgccaactcggaccagggcatcagcctaaaggcgaacctgcccaagcagaagacgcagttggccagtgtccattccctacccatcaccttcactgcaaaagtggaccaaaacaccaaattggtgcgcgagccgcgccaaatcgtcaccatccacgaccctaagctggagagacagcagtacgagctgaactcggtccagggacagaagaacttggccatgccattacacttccgcggacattaccattggccagccgagccgaccagctaccagcagttcgcgcagctccttttggccactgaaaacgcggtgaacattcactaccagccgagccgggaaagtccacgcgaggccatcttccgcgtcaccggccaacacttcgaacagttggcacagagtgaacagccggacgcacagctgcgcaacttcttctccgagaaattcgccaatgcgtacagctgcgacgacgagcagtgccaacagaggggcgattgcgaacaatgcgagcaaatcgagcagcaacaacgagaggacgcgcaggagttggaggaccaacagatgcgacagcagtcgctgcacagcttcatcagtgcgtacaagccgcgccagcaatacaaacactcgctgaaaatggtcgcgcagacgaacggcggggcgaaagacgcgaaagcccagggcgacatccaagccatatgcgacgagcagaccgcgtactgcaaagtgctggtgaaggtggagcgaccaccaatcggcaatgagaaccaaaaatggatgctgaacgcacaagcgcacgttttgatgccggagaccgccgcatcagtggagcagctgcagacacagcccaagcagttgaagcagttcatcgcccaggcgaaagcccagtggggacagcagggacagcagacgcagcaggtaaacatccgcgtgcacggcgcccaggcgcacacgcagcaggtgcgggcggtgctacagcaacaacagggcagccaactgatcagcgcgcagcatttgcgcaacatgcaacgccgcagcgccttcctgaacaaattccaaatcgaggcaatttactcgctgaaagccaacgcccaaaatgcgatcaaccgcgtgttggagctgttcaaatcggcctacttctggaacaccaaatcccaactgatgagcggacagagtgcacagaaagacggaaagatcgccgccacaattctaatcgacccggtgactcagaagagtgccaacattaccatccgaacgccggcgcaacagttgcgcatggagcagatcgaagtgccgtacaaagtgcgccctttcgctttgattcgccagcggagtgcgcaacagacgcattcgctggctcagctgttccaccaattcagcatcaaataccgcccccaatgcaccgttgacgggcgcaaagtgaacactttcgacgacttgatctacacggcccccctctcctccaattgttactccgtcgtggccaaagactgcggctcagaccaaccccaatttgtggtgctgatgaagaaggtcgcgcagcagcagcagcagcagacgaacaaaagggcccaaaacgcggctaaggtgctgaaagtgatcacaccagagcagcaaatcgaatgccatccgaagacaaacgccgctggcattccaacgcaattgatttgcaaagtgaacggacaacaggtcaccggagatgagcagtgccaggacagttcttcatgtgtgcagttcaacaacaaacaacaggatgacgtgaccattcagacggaggcaatcgcagtgcgtttcaacggacgcaaggcgtggctgaaggtgtcccaggcatacaaaaacacccaatgcggactttgcggacactacgacgactcggacgaccagggggaggagctgcgcatggccaacggccagagagcttccgacttggccgagttccaccgctcctacgctttggaagacgcggaagaatgcccacaacaggtgatgaacaacttctacagcgaacagcagcagcagaacagcgagcaggacacattctacgggcagttcaaccaatttgaggacgaagacgaagcggacgatgagcagcaacaacagtctgaaaaggacgaatggcagaatgagcaattcaatggccaattcgaggagcaaaacgatggccaagtcactgacggaggcaatccgttcgaaggaattttcaacgaccaacaacagcagcagaagtgttgctgctgctgtgacgacgacgaggacgaagagggcaccaacgaacagagccaatgccgacaaaactgccaaaacggcggggaatgcccagagaagtgcaacaaaaacgaccaaaagcaatgccgaaagtcatcgccaccacagccgcaacaacaacaaaattgcaaaggcagcgacgacgagcagtgcaaagggatttgcaacgacggagacgaagcatgtgccgagcagcagcagcagtggaaagcagtttggccgattttgagaaccaaaacccacgagcagaaccacgcggtgtgcttttccactcgcccggtcaaacactgcccgccggatgcctacccgtacaatccgatgaacggttatgagcagcagcagcagccgaagaccaagaaggtcagcttcgtgtgcatggagcgggcggagccggagacgcgtcggctgttgcgctcgttgcgacgcggacagcgcgtggtggacgtaaacgcacgcggcgcctccttcacggagaatgtgagcgagccgcatcagtgctggcgcagacgctactgatggatgaacggacgatttggtggatgacagaggagtgaccccccaacggagtagaaaagcacaaagcgtagaccaacccaaaaacaaaacaataatcaccctctgctgatcaatgccattactcaaatgatcagcaccacaactccgccatttcctataacaaattgtatttttgtgatagtttagaataaaaaatttattaataaaaaaaaaaaaaaaaaaaaaaaaaaa

SEQ ID NO: 48887 - DNA, 783 bp, Heterodera glycines
gtaattcttactttttcattgtacaaagaatgagattgtgattgactctgtgccatctttttcttctgtttgtatttttggtgggcttttaaggaaatatggcatagaaaaatcagtgcagaatctttgtgtcgaatggatgacaaaagtcccgccgcaatttttgctcgagaatttgagcatcgtcaagcgcgcgatgtcgacgagttgcgcaggatattccacaggcacattgaagaggaaagtcgaaatgacgagcagcaaaggcacgagaaaacggcggcgccgatgctaacgacggcaccagcgatggcggcggcacttcccagtgcgcgcattgttcggacgccacacattggcacaaatgcccgcgagaatggcaccgcctcattgtccgccatcactccaatcgctgccgcctttcgatggtgcactccgctggccaacacaccaactgtaagtcgtctcactttgcccttccgtacgccatgttttgtccatatttctgtccatgtcaatcctggtcatttcttcgtccaattgccctcccatccgacattttcgtcgcttgcgctgctcaaccaatatatgctcaccgtatacacgcacaatcagccgggcgttggggcaccaggcttggccaagccgtacgacgtcggcgtgctttgcgctgccccggcgtacaacggatggtgccgcgccattactgtggcatacgaccaggaccaggatgggatggtgggccgtttcgtcgattacgggggctttgcccgtttggcccgg

SEQ ID NO: 48888 - DNA, 782 bp, Heterodera glycines
  unsure (1)..(782): unsure at all n locations
ccaagtttgagatgtttcagaaagttttcttggttcttttgtttttacttgcctttacagtctcaaatttgcggtccgatgaaggaattggggagatggatgcgaatcaaaaacctttgaattcggctcgaatactcgcttccaaattcactctttctcagtatgccgttgagagtatggaccttgtgatggagtacaatttgtttaatgttggcgaccgcactgcttttcgtgtcgtgctggacgatcgtaactcatttcccacccattcatttgacattgtgcgtggaatgcttcacatccgatgggaaaaaatctcaccgggagaaaatgtgactcattcggtggtggtacgaccgcgcagttacggcattttcaattacacttccgccatggtcacttattatgtgaccgaagatgccaaacaagcgaccgtcgggtacagcacagcgccaggcgaagggaacatttaccggctaaaggattatgagcgccgattcagttccaaaatcggtatttggctcgtctttttgctgttagctttacccacgaccttgttgcctttcttcctctggtacaaattccaacagaaatatgcgacaaaaagcgggacatccggtcaacaaaattctaaaaaggctcaatgaaaactaaaggcaattatggagtgcgcaaatccatgccacctttatatttattaccattttgtttccatgcaaacttgtatttgttgtgttaaaccatttcattccttatgctgttggcgtaaacgtntggnaaac

SEQ ID NO: 48889 - DNA, 618 bp, Heterodera glycines
gtcgtcttacgctcgacaaaaaaccgccataaaccgcgccatgcctcccaagttcgaccccaacgagaccaagatcatcaccctccgtgtgacgggtggtgaagtggctggtggttcggcccttgcccccaagatcggtcccctcggtctgtcgcccaagaaggttggtgatgacatcgccaaggccacccaggcctacaagggtctccgcgtgactgtgcagcttaccgtgcagaaccgtcaagccgccatctcggttgtgcccacggcctcgtcgctcgtcatcggcgccctcaaggagccgcccagggaccgcaagaaggagaagaacatcaagcactctggcaacctcaccttggacgccatcatcgatgttgcccgccaaatgcgccccaagtccatggctcgcaccttgaccggctccgtcaaggagattctcggcactgccttctctgtgggttgcaccgtcgacggcatgtcgcccaaggaggtccaggagaagattgacgccggtgagattgagatccccgaggaataattcttcttcatcactcgttgattcaatacattcggcttttgccttgtttgtctgtgtgtgttgacgctgtcgctcattcc

SEQ ID NO: 48890 - DNA, 1021 bp, Heterodera glycines
gtgatacatcgccaaccagtggagccggcttcttgcaacaactgcttgacttcttaagtgccgaaaactatggcgaattggcaaccattgttggtcgttattatgccatggaccgtgacaaccgatgggagcgaattaaggttgcctacgaggcattggttgccggagagggcgaaaagtgcgaaccggcgaatgctgtacaattggtgaacgagcgctacgcaaaccaacagactgacgaattcctgacgcccatcgtgttttcggacgaagcgcgtgtgaaagacaatgacacattggtctttttcaattatcgtgctgatcggatgcgtgagattaacaagtgcatgggtgatctgcaaaacctgcaggatttgggcaccaatgttgcattgccgaacggactgcacatcaaaacgatgacacagtacaacgcagagtttccattccccattctgttccctcccgtgacgcataaaaatgtgctcgctgaatggctcagtgttcagcaagtgtctcaattccattgcgcagagtccgaaaagtatgcccatgtgactttctttttcaacggtggacgagaagtgcaatttgagggtgaagaacgcgagttggtcccatcgccgagggttgccacttatgacctgcagccggagatgaattgtgaaggcattgcggacaaagtacgaaacgggtcgataatgttcagggacagtcttcggagttgattctttgaagaaaaaaccgaaaatcggttaaaccaacacttccaatcggggtatccccccaagcttcgaaaatcctaaattctctcaaatcatagtgcatttttttggggggggagggggagagcaccacgatttttagagtaaataaaacggaaaaatgtttttggcattcaatttccctctatttttaggtggtcaagcaagttgaattaggcaagcacccgttcatcatgtgcaattttgcatcacccgacatggttggtcacactggtcaatatcagccgacggtggag

SEQ ID NO: 48891 - DNA, 641 bp, Heterodera glycines
gtccatttaagattacctacatagtatttattcgaaaaatgtcatctaatgggaccgtgtctaatcaaattgggaatttaagcaatgtgggcgctattggcaattgggtggaagctgttgaccaggaaacagcacaaaaacggattgaatttctgaaggatggcatcaaaactgtcatcgattacgtcgatgaaccggatgggagcaaaagcaaagttatcgccacttacaaagtgataaacaaaaaagtgccacgtgtagttgccgaacggaaaaaatggaagaaattcggcacgtcaaaggacgacgggcccggcccgaacattatcacgacttatgtggcggacgaagtggaggtccaattcaccaaccgaggcggagagcaggacgatcgggacgacaaattggcggaagcgctgctcaagggacagtcgtcgaaggcgcactgtcgcttttgcaaatcggacgaccattggagcgtcacctgcccttacaaagacatgttcaaagagacgtctgaggaagagcaacaggaagcggacaaaggcggcgccaagcaaacgcccggccgttacattccgccgtcacagcgcggcggacccgcgggggaacggacgatgatgacgggaggcgaacaacgc

SEQ ID NO: 48892 - DNA, 884 bp, Heterodera glycines
  unsure (1)..(884): unsure at all n locations
cattttgttcccaatcagcaaaccataatattccttgattctctacattttcctacacaaaatgggccgggagcatcgttctgaccgcaaacgagactatgagaaagagcacagtccgttggcggacgaatcgtcgagtggcagcagaaagaggacaaaaagggagaagaaccgaagtgtgagcccggcgcgttctcgttcccacacttacagtccgtcaccacgccgagaaatttcgccaaagcgccgcgctcgaagtcgttctcgctcgcgtgatttgccctcctcacgcggtggtggtggcggcggcggcggttactacggctcgcgtcgtttccatgacggacgcgacaacccaaatccgaacccatgcttgggcgtgtttggcatgagtttgcataccacggagcgcgacctgaagcatttgtttggccgttatggcgaggttgattcggtgcaaattgtgtacgaccgtctctcgggacgctcgcggggctttggctttgtctacttcacacacaccaaagacgctgcgagggctaaggaaaatttggtggatgcagtgattgatgggatgaaagttcgtgtggattattcggtgacgcgcggcggtggaacacatagccgtcatgtgcgcaaaagcttctcgcgcagtccggtgcgcaacaaccgtagccgcacgcgcagccgttcccggtccgagtcgcggtcggtgtcgcgttagaaaggtgaaaagtgctaatggtttggagaaatgaatgaatgatggatgaggatgaattgattgattgacaatgattttgatccgctttttgtggtttagtattattgggctgtcgaatcataaagaacacataacgtnaagaataaaacaccggagatat

SEQ ID NO: 48893 - DNA, 683 bp, Heterodera glycines
  unsure (1)..(683): unsure at all n locations
acgtagtggagctgctgccgaacgacggggacttcctggtgcgcntgacagaagaaatttcgggcacggagcgtgtgtatgcactgtcggtgaacgtcggcggcttcctgaaccacgtcatcttccgccgacacaagggaatgttttccgtggacctcaactccgacaagggcttccgaacaatcgaacgattcgtcgacaattatctgcgcaccggagtttccgtcaccactcaacaatacgtcgctctcatcagggccgtgccccgcgcgcactgggagctgtcgcacacttcaatcatactgggcaatgaacttggccgcggcacgttcggggtcgtcaagagtggcgtctacgtggatcagcaggggactcgagcggcggtggccatcaaagaggtgtctcagacgagcaccaaagagcaaatcaaggagttcatgaatgaggcgcgagtcatgcggcagctcccacaccccaatgtcatccagttctacggcgtcgcggttggccaggagcccctgatgatcgtcatggagctggcgacggaaggcagcctcaccaactacttgaagcatcagcggcggagcgcgcgggtcaaactctacatgtgcctcggcgcatctggcggactggaccacatccactcgaaaggcatcatccattgcgaactcgcttgcaggaaa

SEQ ID NO: 48894 - DNA, 639 bp, Heterodera glycines
ctcaacccgtgggagaagcagcaaccgaacaacaacaacaggcaaaacaagggcaaggagaacggcacacgccaaccccaggctatgcctgtcggctgggtgctcggcgttcgttccaaaaccacgtccataaatgaagatgccggaccaagccatccgtcgacctccgacgctctctcaacaacggtcaagccaccggcatcgacgtcgtcgattgccagcgttcttcctcctcatccctctttctcattgattcaagaaaacgggttcgaacagcgggtgtacactgattggaggagtcagtgcaaaaaacagcgtgaggcacttggctacgacattcccgagatgcatacgctctatcggatttggtctctgtttttgcgggacaatttcaacaggtcaatgtacaacgagttccgtaaatttgcactggaagacgctgaccatggccttcggtatggcattgaatcgcttttccgtttctacagctatgggcttgagaagaagttgcgcccgaagctgtacaacgatttccaagaagccactttgcaggacgttaagcgcggacacacttttggtctcgagaaattcctcgcctctttgaaatattgtaagcacagcactcaaattggaggtgat

SEQ ID NO: 48895 - DNA, 857 bp, Heterodera glycines
ctaaaatgcaagagactcacattgttctcgggattgcctcggtgtgctctctgttggctatcatcgccacagtcgtcactctgccatctctgtactcggagatgagccaaatgaacagcaaagtgcgcgacggagttgaggccttccgcgtcaacaccgactcggcctggactgacttgatggacgtgcaagtggtcgtgacgccgccgtcgaagccccgtgataaccccttcaactccatcttccgtgccaaacgtcaactgcccggacactgccagtgcgctggcctccaacagccaagctgtccccctggtccgcccggcccgtccggaccgcctggacagcccggacagcctggaggcgcaggacagcccggacagcctggacagcctggacagcctggagcgaacggagttgtctcacgcccaattcctggcccgaagggaccgcctggagcgcctggccagaacggaaaccccggaagccaaggtcagccaggacagccaggaggccaaggaccgcccggacctcctggcgcgcccggtcagcccggccagcctggaaactctggccagcctggacagcccggagcaccgggacagcccggcaaggacagcggctactgtccgtgcccgccccgctcttccgtgttggcagtcaaaaagaagatggcggcagccaagaaagcataagcgacaagcgcagggagaagagaaccgaaagacaaaggaccgacgcgaaagcgaagctgaagatgatcataattgggtggaagttgttgtcggaatttgtgttcaccagcgcatttcccacacgaataaagggcattcactaaaaaaaaaaaaaaaaaaaaaaaa

SEQ ID NO: 48896 - DNA, 1016 bp, Heterodera glycines
gttccggaagtctcccaaagcgaagaaggccaaaagcaaaaatggcgcataattgtggacgcattgaaccgaacgcttcacgagggaggcggaggacagagcataaatcagccggggggacagccaaaatggacagcggaaatgatccacgcgaaggcgagacggggaaggaatgagaacgactgatcagaaccaattaatgatcagaggaacgctgatcaaacaattagtttatcagataggagggacgggagattaatcagagggacgacggctcatccaattgtttagagtgattaatggattttatcgccagagagtggttgctcaatgatggttattgaccaaagtttaggacattgtggccatccttcaccttctgatcactctcgcccttcattaccgggcaccgattcgcttcccgaacaatgtcaatgtgcaagtaattaggggaagggcaaggaaaaggcaatgacagccgaagggcgcaggttctgatctacactcggcacggcaaacaaatcagcaaaagcatcgtcactgaacagctgaccaccaaacagacggaattggcaccgaaaggcgaacgtgacgcatttgatactctttttgactatgggccggacaaattgcaacacgtgaaaaattcgctagtcgccttctgcaacaagcacttgaacaagatcaacttggaggtgaccgacttggagacgcaattccaagacggcgttttcctcatccttttgatgggtcttctcgagggttatttcgtgcccctctacaaattccatctccaagtgaacaacaacgacgagaagctgaagaatgtgcaattcgcttattttctgatggaggaggcgggcatggccaagccaaagtgccgtccggcggacattgtcaacggcgacctgaagagcacgctgagagtgctgcacgcactgttcaccaagtacaaacacgtttaggaggaggggagaacagacggagcagcgaaattagggacaaaagagcgacgt

SEQ ID NO: 48897 - DNA, 853 bp, Heterodera glycines
gggtttaattgtgtgattggtttaagtaaatttctcctcgtccgtcatgttttatcacgacttgcacgacaacgaaaatagtcatgataaagagttaaaacagttggtacaaatggacgaccttgcaattcccaaatttgtaatgcctccgctcggcattaagccaaaaaaatttgtgcgcaaacattttgggccgaacagtcggcttccaatggcgcagtttctgaagggcactaccacactgtcctttgtgtacaagccgaagacaccgcaagacaaaggcggcgttattgtggcggtcgattcgcgtgcaacgggcggaacttacatcagctccaaaacggtagaaaaaatcattccgatcaacgaccaattggtcgcgacgatggcaggcggtgcagcggactgtcagtattggacgcgggtggtgagcaaatattgcaatcttttcgaacttcgcgagggtacgcaaatttcggtggctgcggccagtaaatattttgccaatgttatgtacgactatcgtggccaagagctgggcgttcactcgatggtttgcggggttgacaagttcggcccttccatttacatggtcgaagctgaagggactcgcgtgaagattgacaccatttgttcactcgggtcgggcatgttacacgccatgtccattttggacaccaaatacaaggaggcgatgactgacgcggaagcgttggagttgggcagaaaaaccattgtgtacgcgacattccgcgacgcggcttcccgtggccattgcaatttgggtcatatcacttccgaaggaaagaccatatacccgccattcgatgtcaatgataagtattatgaattc

SEQ ID NO: 48898 - DNA, 654 bp, Heterodera glycines
gtttgagcaagaacattatggtaaacaagtttttaccgctgatcattttcgtttttctgctgattgacaccgccatatgtcgccatcaccatcggcactcccatcaccaccatcaacaaaatgagcagccggagatgatcagcgttccgcttcgccgcatggacaccgtccgcgcccgtctggcgctcaccggatcgcttgaacagttccgcaagcatcgcacggagtcgttgcgccgtaccgtggagcgaatgaacaacaactacaacaacaatgaagagtacagcagcgcggaatcggaccaggaacagatggaaatggcacaaaacggggccagagttggcacggaaattgacgaactgttgcgcaactacatggacgcccaatattacggtgacatttccatcggttcaccggcgcaaaatttcaccgtcatcttcgacaccggttcatcaaacctatgggtgccgtccaaaaaatgtcccatttatgacatcgcttgcagccttcaccacaaatatgatggcgccaaatcaacctcctatcagcccgatgggcgaaaggtggcaatacagtacggcactggctcaatgaaaggatttgtttccaaagacattgtttgtatggcaaacatttgtgtacaaaaacaggaat

SEQ ID NO: 48899 - DNA, 652 bp, Heterodera glycines
gtccaattaagagattaatatataaaatggccgtggtaagccgaatgtggtatattggaaaggagacttgcaaattcttccacggtgctgtgaaagtcttttttgacccaaattggcaaatcccaaagaccaagcttgatccaagaatgcccgcctatccaacccaacttcatgaatggcttcgcatgttcccctggcgtcattactgggcttactacccaattctgcgcaatttttgctacgtcttcgcctcagcttttgtcgttacgagcattactcaaccgacaagcgttaaaatcaccaaagaacacgtgatcaaccacgaattgcatcacatcgaagcgaaaatgctccacgcgtacacccaacggaaggaggacctgaagtacttcaaggagaacgacgtcatggccaaactgcgcccgaaaaactttgccagggatttgtcaatgggcgacttcaattacttcccctgggggtattccttcggagcgcactgatttctgcggagtacagaaaacgaaggtggacaacgcatttgcgatgccaagcacagattaggacaatgtttgttgaaatgtaccattgctattatattttgtgggaagtaagagaaataaaaggctagccttaaaaaaaaaaaaaaaaaaaa

SEQ ID NO: 48900 - DNA, 696 bp, Heterodera glycines
  unsure (1)..(696): unsure at all n locations
gtttgagttattttactgccatgcacaacatactcaaaaggttctttgcgcatgtttcgccttcgcttttaaagaagcccctcaacgacccatttccgattgctgcgtggcgctcgcacccggccaacatggccaaaggtgtgaagttcgatcacgacaacgcgttcgtgcgattctgccgctactatctatggcattactgttggagtgggcgtcagtacggtcttcaattctacgaccaggcattcgaaccgcatcccgtagtccaagaggcactgcgccggctccgtcttaaggacccctaccagtacgaccttcgtctgcagcgtattcttttggccagtcaattgggctcaaagaatgagcgactgccgaagaacatgtggacaaaatgggacgacgagacattctatctgaacccgtattttaacgaaattgaggaggaaaagctggagcgtgaagccagcacgggcatgaagccgggataccaactcaaagagcagatttaggggacagacattgtgttgtgaacgattaggcgcggaggaaaagcacattgcgtttgttgatactgttgccggagagaaattgatttgatgagtgattgttcacaacttttaggacgacatgtgttatgttcatttaacgtgaagtaataaaaccattttcttttcnannnaaaaaaaaaaaaaaaaa

SEQ ID NO: 48901 - DNA, 719 bp, Heterodera glycines
cagatgttgaaacagggcgactcaaattgtcacagcaaaaaagcgtcagggagccgttacagtgaattatttgaatgcattcgggacaatttgctgactttcatcaaggccaacatgcgccaaatgctcttcgacaagatttccgctgtccttgttcttgacactttggaagtcccgtcaccttcggatcccttccttcgtgaaattggcgacagcgatttggatgactgtttccgggcaattgctgagattgccactgacgaattcgtcccccactcgcccgatgggccgtcccatattgtgcagggcggttgcgctcgcttcgtgttccgcaaactgttgcaggcggacccgggacggtgtgacggacaccgcctcagcgacttcctggccgaccttcccgccgacaatttgtcctcctggaccagcatggactgcggatgttacaccctggtggaggtgttcaagagcgggtcggacaaggcccgcaaggtgctcagacgggcgctcagtgtggccatgttgcagaattcgcatttgtccggcgccaagtctttgttggatttgctattgggcaaaggcaaagagcaaccgacgcgggaacattcggtggctaatggcggcggcgctggtcgaaaaaatccaagaaaggcagcagcaccctttcagaaaagaagagagcggaaaaccaatcaagcttgagccgtttgttgttattg

SEQ ID NO: 48902 - DNA, 563 bp, Heterodera glycines
  unsure (1)..(563): unsure at all n locations
gtccaataagcaatactccctttttcccaaatcttacaaatgaacatgaatcaacttttggttggccgttcgctgttcccaaaaatcatccgccctttctcgcacaccaaaccccttgccaagtctgaggctgacccggatgattacggctacttcccggacccaattgaacactcgtggggtttggagaggaaaatgctcatcgctcgtctgaagggtgacgaccgctatgagccgaaggtgtatttccgcgctgaacataccacccgggactatccgaatttggtgccggtccatttgcaggacaaagtcgtcgggtgcctttgcgagccggacgcggagtacgtgaactattggcatattaggaaaggccagatgaagcgatgcgagtgcggacattggtttaagggcgtgcaagccgaccctgacagtttcgcctgaatgcgatggatacgaattggctttgaagtgataggagatcatataaaatgatcagttattttaattgtatttctaagttggttggataaatgtaaagcatatacnagaaaaataaaaaaaaa

SEQ ID NO: 48903 - DNA, 1011 bp, Heterodera glycines
  unsure (1)..(1011): unsure at all n locations
agagaaattcgctgagtgttttgctccaaattttcgtttcattcaaaaattgctgtctgtgctgcgaaaagttgcaggaaaatgtcatctgagtcaaatatggagaatttccccgtcaaattggacatggattatatcaaacggttggcacgcatcgaacggaccggccctaacacttttaatgccaattttcttgtggcaggctatcgcaaggcggtgaataaggacgttttcgggggacaaatgttcgcgcaggcaattgccgcggcagaagcaacggtggacggcgacgaatttgcaccgaacgcggcccattcgatgttcattagaaaagcattcattgaccatcccatcgaatatattgtcaccagaacgcgcgacgggcgttcattttgcactcggacagtcgaagcgcgacagaacggcgaaaccgttttctgtgcgcagatttcactttgcgttaaggaacgctcttccattgaacaccaaacagaaatgccagcggaagtgccggagcccgaggagttggtgccgttcttcaagacggtccgtcgagtggtcaccgaacacgacgagggcaggacggagcgtaacggacggaccatcgctaaccttcgcgcggtgctcgaggacgagcagcaaccgtccgtcttcgagttccgacccattcattccgacatttttcttggcattcgaccccattcgcccacgccgattcgttactggttgaaatgcgccgttcctttgggtagcgaacggacaaataaggcactgaaccgcttcctgctggcatttataaccgatgcaacaatggcttccactgccaaccgtgcccatgccagccacaattatcatccgtcaatggttgtctctctcgaccacatcgtccactttcattcngacaactttttcgcagatgaatggctgttgtgtgagaatacgagtccaatcgcgaggaatggacgagcgcttacagacggtcgcatttggaaccgaaagggacagcttttg

SEQ ID NO: 48904 - DNA, 770 bp, Heterodera glycines
atttttgccaaattttcgcaaatcaatctacaattacgatacctatttttaacttgcactaaaatttacgcaatatgtcgttgaacacggcgaatacgccggacggacgtggggttatcatttacagtggtgaaatgattttgcttttcgttcgcgaggttaatctttcttttgacaaattcactaacgccgcgttcaaaggcacaaagaagggcaacctttacctaaccacgcacagaatcattttcaataacactgaaacttcgtctcgcggcaatttcaagtcgttgtcaatgcctttcggatgcattcgaaatgtgaagttggaacagcccatctttggcgccaattatttggctggcgaattggtcgcacagccggacggaaattgggaaggagaagtgaattggaaattgacgttcaatcggggcggatgcatcgaattcggccaagctttgctgaaaaccagcgaaatggccaataacttttgtcctcggcccgcaaatgcgccgccgccgtacgctccgccgcctggcgcttattactcaccaccacccgcttattattggagcggaggccaattcaacggataccaggcgccggtccacgcgtttccagaacaaccgccgccggaaagtgtgttcatgtacgagcaaccacctccatatgcggggattgggccaattcgtggtcaaaatccggtcccatacccgtcgaatacgcccctgtatccgccgcaacaacaacctctaccaaccaacactccttcc

SEQ ID NO: 48905 - DNA, 686 bp, Heterodera glycines
ccaagtttgagatgaatctccgcgatcaattttccaccaacaaatatgttgcgcatcgcttcatgcagttgccaacgcacaacaaagtgcaggtggaatatgtgtggattgacgggtcgggcgaaaatgtgcgctccaaaacgcgaacagtggactttgtgccgtccaaagtcgacgatttaccggtgtggaacttcgacgggtcctccactggacaagcatcgggtgccgattcggatgtgttcatcaagccggttgccatgtacaatgacccgttccgtatgggcaaccataaaattgtaatgtgtgaggcattcgacaacaaaatgcagccccatgtgaccaacaaccgtgcgcgatgtaagcagacaatggacgcggctgccaaagagcacgcgtggtttggcatggagcaggagtacacactgctggacgttgaccagcatccgttcggatggcctaaggcgccgttcggcttccccgggccccaagggccttattattgcggtgctggagctaacaaagcttatggtcgtgatattgtggactcacactatcgcgcttgtctttacgcgggtattctgatttcgggtacaaatgccgaagtgatgccgggccaatgggaatttcaggtcggcccatgtgaaggaatccaaatgggagatcaacttttcatggcccgcttt

SEQ ID NO: 48906 - DNA, 492 bp, Heterodera glycines
ctgctttccattcaactaaactgtgctaaatatgtccggacgaggaaagggaggcaaaggactcgggaagggaggcgcaaagcgccaccgaaaagtgctccgtgacaacatccagggcatcaccaagccggccatccgccgtttggctcgtcgtgggggcgtcaagcgcatttccggcctgatctacgaggagactcgctcagtgctgaaggtgttcttggagaatgtcatccgtgacgcggttacttactgcgagcacgcgaagcggaagacagtcactgcgatggatgtcgtttacgcgctgaaacgtcagggccgaactttgtacggttttggtggctgagcagaacggtgacggaagagaacttcaaccaaaaacaatcccaaacggccctctttagggccacaaacatccaaatggacggatatgcttttcgaaaaacttgcttttgcattttcttttgtttgaataaatttggaaattaaaaaaaa

SEQ ID NO: 48907 - DNA, 1046 bp, Heterodera glycines
gtccaataagacatttttctattttcttttttttcaccctttgacgacaaacagaagcagcaatgagtggttgggatgcgtacattcagtcattgacttccagttgtgcggagattactcgcgtggccataattggcaattcggacgcgagtgtttgggccaggactgaaggggagaacgaattcaaggcgagtgaacctgagctcaagaaacttgtcggccaattcgatgatctttcgcaagttccgtccgtcggtgccgacctcgagggaattcattacattgtgccgcgaacggatgaaaatcttatctttgggaagagggacaaaacgggctttttcgctgtgaagaccaagtccgccattctgatcgccatttacaaggacgaggaaagtgtcgtcggcgccgacgtgcgaggggcggtggagaaaatggccaaataccttgaggacgccggttactgagccgttgctcggtttcctaaacgacttttgtgttgccaaacgaaaagtgctgagaatggctttgacttattcttccaaatgcattccttttccatcccaaatgatcacttattattttattattacacattctgtgaagtgcgcgtgccgatttcttttttattatttggcctttggatgtgaataataaaaaggtgtaacgctgagaaccaaaaactgcttttgcttttcgaaaaccttttccatcaatccgttggcgggcaaatgtctccgccaatccaattctgtaattgatacgggcagtccctttaattaatctgacccacaggtgccatgctttttgtttggcttggccttgcgtttgtaattcgagctcacctcgggggggggggaggaatgtccgttcccttttgccttggcaacattcgccttatttcgcgatgctttttgtctcctttttcgtcttggcattactttttccccttggtgactccgttctgtccgtcgttgcccctcctccgtctccgttgtctatcagtgcgtttcctccgtcactttccgccgatttcgtcacttttcagc

SEQ ID NO: 48908 - DNA, 548 bp, Heterodera glycines
gtgcatattcgatattcagttattgcaaattgttactcaaaatggcctcttttctccgttttttggcctgccgtcacttttctatgtcgtccgttttgcgcaaagaggcggaacaacttaccaatgaacacatcgacaaaattcggcagaggacccgtttcagtgagacgagcgcttttcacgggcgcggcagcggcggacggacgaacggcgaaagtggcgaggacgcatttaccaacccattttacattgccagctactacgacagtaaacgattcgaagcaatccgaggcgtttcaatcttcgcaagcatttcgcttctgttgatttatgtcgcatggttcaaagagccaaacgaagtggacgaactttgggattacgacatgcgtttggtgtactttgtggccaaaaaacgtgtgctaaaggaccaaattgaacaggcgaaaaagggcggccaaggaacagtcgatttggaaaccgatctcatcaacattgaggtgcaagagcaaaaaatccgcgaagaagaagagaagaaggcaaagaaaata

SEQ ID NO: 48909 - DNA, 667 bp, Heterodera glycines
aatggccgtttttgttaaagaccaaaattttgtgccggaaaaacgagtcgacgaagctgggcatattttaaatgatccgagtaaaagtttggccgatcgtttccgtgcgcttttccttctcagaagcgtaaaaagcgacagggctgtccattggatttgcaaatgcttctccgacccatcggctcttcttaagcacgaacttgcgtattgtcttggtcagatgcaaaaccccgcggcgattcaaaaattaatcttcgttttgcaagacactgaacaagaaccaatggtccgtcatgaagcggccgaagcgctcggagccatcggcgacccgtcgaatgagcacggactcagcaaactgttcgagcagtacagcggtgacgcagtccgagaagtggcggagacatgccttttggcactgcgacggacgcaatgggtcaaagagaagggaaaggacgacacggaaagtcggagcatttacgattccattgaccccgcgccagcagcggacggagggaaaggagcagccgaagtcgaacaacttggccaaatgttggtcgatcacaacatggctctgtgggacagatatcgagcaatgtttgcgcttagaaatttgaacaacgaccgagcaacaaaggcattggcggacggtttgctttgtgatgacagc

SEQ ID NO: 48910 - DNA, 901 bp, Heterodera glycines
gtccaataaggcattgattaagacattgcagaataaaacaaattaaagtgaaacatggcaaccgaagttgatgaaaatacagcagttgctgatccttggagcactgttgaagatgtgagcggtggagagtcaatgcaccaattggtcaccctggacgttcccgagattaaactgttcgggaagtggtctcttaatgacgtggacgtgtccgacatttcactcgtggattatgttgcggtgaaagaaaaggcggccaaatatttgccgcacagcgccggtcgttaccagcagaagcgcttccgtaaggcgacctgtccggtggtggaacggttggtctcgtcaatgatgatgcacgggcggaacaacggcaagaaactgatggcggtgcgcattgtgaagcatgccttcgaaatcattcatctgctcaccggagagaaccccgtccaagtgttagtcaatgctgtgatcaacagtggacctcgcgaggattccacgcgtattggccgtgcgggcacagttcgtcgacaggcagtcgatgtgtcgcctttgcgtcgtgtcaatcaggcaatttggttgctttgtaccggttcccgcgaggccgctttcagaaacatcaaaacgatcgcggaatgtcttgcggatgagctgatgaatgccgctaaggggtccagcaattcctacgcaatcaaaaagaaagacgaattggaacgggtggccaaatcgaaccgttgaggaaaaaaagcacagaatgcaaaagaggataaaggacacaaagggatcaatttgttcaattgttgttgaattttatgttattttgttcctcataaaacaaagagacaaattctaatcggattgtctgaataagatttgttttgttaaaaaaaaaaaaaaaaaaaaaaaa

SEQ ID NO: 48911 - DNA, 621 bp, Heterodera glycines
gtttgcccaacatgtctcttcccgtcgagatcgtcaaccacgaccagagcgaggcgcccaagctcttcggcaagtggtccttcgaggaggtccgctgcaacgaccttgccctcgttgactacatccaaatctcgtcgcccatctacctcccccacactgccggtcgctatgccgccaagcgtttccgcaaggcccagtgccccgtggttgagcgcttgaccaactcgctcatgatgcacggccgcaacaacggcaagaagcttatggccacgcgcattgtcaagcacgcgttcgagatcattcacttgctcacggatgccaacccgctccagatcctcgtggacgccattgtgaacacgggtccccgtgaagactcgacccgcattggttcccagggtaccgtccgtcgtcaagccgtcgatgtgtcgccgctccgtcgcgtcaaccaggccatcgctctcttgaccaccggcacccgcgaggccgcgttccgcaacgtcaagaccattgccgagtgcctggccgacgaattgatcaacgccgccaagggttcctcgaactcctatgccatcaagaagaaggacgagctcgagagggttgctaagtctaaccgctaaaaat

SEQ ID NO: 48912 - DNA, 672 bp, Heterodera glycines
gtttgagacaaagactcaaaaatgactagcaaaacttcgcctaaaatgccgcgcaattaccaaattgcatccgggctccagcgtttctccaaggcccgtatgtttcacgccaaagggatgtgggtcaagctgaagaagccattcgagaagaaagcaaagcatgcccaaaaagcagaaaaatttgttgtcaagaaaattggcggagagaaaaacggaggcgagaggaaagtgctcaagaagaaggagccgaagcttttgccacaagtgcccagtgttcaaatcaagaacaaaaacaggccgaagaaagttccattgcgcaaatcgatttcgcccggaaccgttctgatcattttggctggccgtcaccgtgggaagcgcgttatctttataaagcaattgccaaaatcgggtcttcttcttgtcacaggcccactgaagttgaacgcgacgccgttgcgtcgcatcgcacaggcttttgtcatagcgaccaaaacaaaactggacatttcgacgatgaatgtgccggagcatttggacgacaaatattttaaacgacaaagtggcaaagtggcggacagatcgaagggtgggatttttgcggagggagcgaaccagcagtacgctgtgaccgaccagcgcaaggaggaccagaaaactgttgactcgcaggtt

SEQ ID NO: 48913 - DNA, 495 bp, Heterodera glycines
caattaagagccagtttatttactcatttcaacaaacagcaatgaaatacgtcgccgcgtacatgttggcatcgctgggcggaaatggcgacccatcgccaaaggatttggaaaaaattctcgcagcaggcggactcgaggtggacatggacaatgtgaaggccgtcctcaacgcagtgaaaggcaagtccattgaggaggttattgcggcgggccagaagaaattggccaccatgcccactggtggaggcgctgcagcaccaactgcagcagcagcggccactgctgcacccgctgctgcggagaagaaggaggaaaagaagaaggaagaagtgaaggaagaatcggacgacgacatgggcttcggactgttcgactgatcaccgaccgattgatcgatcggacggaatattgtttttgcttcttaccatttcatcaaattaaaacgacgaacggaaaaacggagataaatttgttttttggtaaaaaaaaaaa

SEQ ID NO: 48914 - DNA, 650 bp, Heterodera glycines
tgagatttcaccatgaaaccaacaatcgatttgaagcaggacatttccaagtacaaggaacgcttccaaaaacttcatcataaaagagaagagtcaagaaaaataaaccacgaacacgtcgtggaggaggatcgacgtctgaagttgcccaacaattttgaggcaaagcgaaaacgacaagaatgggagttggaggagcttgtggcaagaaaggaagcggaggagcgtggcgaagattatgacagaataaaggcactgggaacgcaagcggacatcgccgacaaaatggaagcggcaaaacgaagaaaagcaaaccccgacacgggatttgcgagttatgaagcgatgtcaattcggcaatacgaaagaatgaccaatgggataaagccggacatggaatcttaccaaaagatgaaaggagtcgtcggagaagatcaattctacgcaagtgcaaatacgttgatccaaggctcgcattatcccaccgacaaggcactcgataaactttcggaggatgttcataaccagatgaagaaacgtgaccagtaccaccgccgtcggatgttcgaccctgatgccccgattgacttcatcaacgaacgcaacagaaaattcaaccacaaattggagcgctattacggcaaatatac

SEQ ID NO: 48915 - DNA, 1163 bp, Heterodera glycines
ttggctgcttttcccagaaccgccgttgcctttatgcagcaatgttctcgcttaatgagtgtcaggatgaaaagcagttctattaaggtaactttaatcggcgcaagtggaggcatcggccaaccgctcggattacttttgaagaagaacccttccattgcacacttggcactttacgatcttgtcggcactcccggagttgcggccgacctttcccatataaacaccccggcaaaagtgactggccatttgggaccagaccaacttgttgcagcgttggaaggtgctgacgttgtcattattcctgccggtgtgccacggaagcccggtatgactcgtgacgaccttttcaccacaaatgccggcattgtgcgggacatggccgaagcagccgcaaaaacttgtccgaaagctttcatgggcattataaccaatccggtgaactcgacccttcccatcgcctgcgaagtctacaaaaacaatgactgtttcgacccgcgacgcattttcggcgtcactcttattgacattgttcgagcacaggcattcgtttcaaaactaaaagggatggattgtttcccaaacaaaagtgtcggtggtcggtggccattccggagtgaccattgtcccacttctgtccagatgtacgcccaaagtcagtctgagtgacagtgagacgaaggcactcaccgaacgcatccaagaagcagggacagaagttgtgaaagccaaggctggcgcggggtcggccactctttcgatggcacttgcagctgaatactttgtttcggctttgatcaacgcgctgaagggccagaagagtgtgcagtgtgcgtatgtcaaatccgacgtggtggaaggccttgattactttgctggaccattggagctgggacccaacggcgtggagaaaatactgccattgggtgacctgaccgcttacgaaaaggagctgatcagcaaagcggtgcccgaactgaagaaggaaattgcgaagggtgtcaactttatcaagcaagggtagaagccagccggtagtaattagccaatcatttttgtgtcgagaaatgcattggcactgttactgtttgtcaaccgatgattttcatattatatgtagttttggttcttaatatcccaatcatgttttgtcctgctaccat

SEQ ID NO: 48916 - DNA, 1261 bp, Heterodera glycines
gaggtgtggaatttgaatggttgagacagcggaacaacctgctaaaaaggaagacgagaagatggaaactgccgaagatgagatcgatgctgaaattttgcaaatgtctacggaccaaattcgggagcggtcgctgttgctcgacaacgaaattcgcataatgcgcagtgaaattcagcgcattagtcacagtatgcaaacactcaaagagaagacaaaggaaaacaacgaaaggatcaaaatcaacaaaactcttccctatttggtctcaaatgtcattgaacttttggatcttgaagagcaacaggaagaggaaggagcaaacattgaccttgatgcccacaaaacaaagtgtgccgtcatcaaaacatccacgcgtgccacttactttctgcccgttgttggtcttgtggacccggaagaaatgaaaccgtccgatttggttggcgttaacaaggactcttatctcatcctggaaaaactgccacccgagtacgactcacgcgtgaaggccatggaagtggacgagcgtccgaaagaaacgtactcagacattggcggatgcgatagtcaaatcagagaattggttgaagcaattgttcttccgatgactaaaaaagatctcttcataaacattggcattcagccgcctaagggcgttcttatgtatggaccaccaggtacgggtaaaacgatgttggcacgtgccgttgccgctcaaaccaagtccacttttctgaagctggctggtccgcaacttgtccaaatgttcatcggagacggcgccaaattggttcgagatgcttttgcactggccaaagagaaagcaccgtccattattttcattgacgaattggacgcaattgggacaaaacgattcagttcggagaaggccggcgatagggaagtgcagcgaacgatgttggaattgcttaaccaactcgacggcttccagccaaatgacgacataaaagttattgctgcgacaaaccgtgtcgatgtgctcgacccggctctgctccgttccggcagattggaccgcaaaattgaactgccagcgccaaacgagaaggcccgggcgcacatcgtccgcattcactcccggaatatgaacgttgataaagatgttaatttcgatgagttggcacgttgtaccgacgattttaatggtgctcaatgcaaagctgtttgtgtggaagcgggtatgatcgcgcttcgtcgtgaatctcacatcattctgcacgaagattttatggacgct

SEQ ID NO: 48917 - DNA, 665 bp, Heterodera glycines
gtttgagattatacattgaaattgcgatggacactttgtttgacgtgcgaaacaacttttatttgggcgcttttcaacagtgcatcaacgaggcacagaaggtcaaatgcaagtcggaagaggagaaggagctcaaggacgcgttcatgtaccgcgcttacattggcctgaacaaatgttccgtgccgttgggcgaaattgacgccaccgatggcaatgggtcggccgcccttatggcaatccgacggttcgccacgtttatgagcggtgcgccggagaagaggtcagagattgttgaccaggtggccaaagaatttgaaacgaaaaagtacgctgacaacgaaatttgcctgctgatcagcacactcattttcatgcacggagaaaaaactgaggaggcattgcgcgtgctgaaccgcacggcgtccgattcgttggagtgcgccgcgttgcgcgtccaatgtttgctgaagctgaacaggggcgacctggcggccaaggaggtgaagcgaatgcaggagatggacgaggatgccaccatcacgcagttggcccaggcgtggctgaacatggccatgggtcgtgacaagctgaaggacgccttctacatttaacaggaaatggtggacaaatacggggccaccccactgctgctcacttcgcaa

SEQ ID NO: 48918 - DNA, 476 bp, Heterodera glycines
  unsure (1)..(476): unsure at all n locations
atgttgcgacagcttgactctgtccgtgaatacatccaacaattgcatgcgcgactcctttcactgaccgacaggtttgcccaaatttcaccgctttggcaacgtggcgaacccatttcaaaaccgctgccggtgatggcactttgcgagtacaagagcaaggacaaaattcacatcagacaaggggacaagtacactctgttggacaaccatgaccaaattcagtggcgcgtgcgcggcatggacgacgttgaggtggtgtcaactccgggaacaagcggcgccacgggtgccaccgctgtgtcacaactcattgaagaagacgaggaaaaatgtgcccgttgtgccacagcatcagccactgtacgaaagattgcaacaagcgttgaatcggaagaattatttttattatcatttgtgcgtttgttttgatgtgttaagcataaaaatttttcaattnnnaaaaaaaaaaaaaa

SEQ ID NO: 48919 - DNA, 769 bp, Heterodera glycines
attaagtttgatttctgtaaccttttttttttggtgttaatgatgtcgtcaaatgaagaagaagaatccggcggttcaaatgatgaccaattttcctctccgatcagtccggtcagccccattcaaccgatgagcaccgattggagtaacgcaattgatgcgcaggaaatgggcgccggaggtgttggaggagggatcagcagcggaagcctgcatgagagcctgcacgaactttcgccaatttgggccgacagcgatttgattggtgacacactttcggccgtaccggactcgcccagcgatgaagacccatatgccagcacaatttatcgcccagtttccatggtcacgcctgtcgctgcactgccgaatcccaatccaccgtcctgctcatttggtggaccgatggaaagcattgaggcgaaagggccgttggaattgcccaccaaaacgcggcttaaggtgcgtatcaaacggttggacattgtcggctcgtggcgttgggtggacggcaaagaggacgcgtgcggcatttgccgtactccgttcgagacctgttgcatggactgcaaattcccgggcgacgaatgtccattggtgttgggccagtgcaaacatccgttccacatgcattgcattgtgaagtggacgaacacgcaaagcgggcagaagcccgcctgtccgctgtgccgtcaggagtggaaatttgcgaccagctgattttttgcggggaaggcgaagaagactaataatgacttaatgtttttgt

SEQ ID NO: 48920 - DNA, 636 bp, Heterodera glycines
tggttttacaaatgggtcaaaaccaaccgcagggaggtgggcgaaagccaggcgatgacaaaggacaggaccctgaaaaaaaaacggaaataccatggaccgccggttccaacgcgaattggaaaacgcaagaagggctctcgtggtcccgacacagcaaacaaaatgcccaccgtgactccgatcactcgttgtaaactcaagctcctcaagtatgaccggattaaggactatcttttaatggaggaagaattcataaagaacatggagcgtttgaagcctcaggacgaacgtcaggaggaagagcgtgttaaagttgacgaccttcgtgggactccaatgtctgtcggatcattggaagaagtcattgacgatcaacacgcaattgtttccacgaatgtcggcagtgaacattacgtcaacattttgtcatttgtggacaaagaacagcttgagccgggctgtgccgttctgctgaatcacaaaacccactcaatcgtcggcgttcttgcggaggacgccgatccgatggtgtcggtgatgaaattggagaaagcaccgaccgagacttacgctgacgttggtggcctcgagcagcaaattcaggagatcaaagaggcggtggagttgccgttg

SEQ ID NO: 48921 - DNA, 1015 bp, Heterodera glycines
  unsure (1)..(1015): unsure at all n locations
ttctgaatctataagtactacttccctattttaaaataataattattaagtgaattttcgacttacctataaatgtttctgacccgcagcgaatacgacaggggagtgaacactttttccccggagggccgtctgttccaagtggaatatgccatcgaaactgtcaagcttggttccacaagcatcggaattcacaccaaagaaggcgttcttttggctgcggaaaggcgttcaatgagcaaattggtggtggacgactcaatgagcaaaatttcggaagttgagaagcacattgccgtcgcctcggccggtctcatcgcagattcacgcacttgggtcgaacacgcgcgggtggaggctcaacacttttggtttacttacggtggcaaaattcgggtggaagacattactcaaaaggtctcaagattggcactgcattttggagacgacgactcaactatcagtctcggccgtccgtttggagtttctatgctttttgccggcattgatcacacgggtgcgcatctcttccatttggacccgtccgggacgtacattaaatgtttggccaaggccatcggtgccggctccgatgcagcggaacaaacgctgcaagagcactgtaaaaactgcgacaaaaaaatggaaatggccgaggcaaaacaagtcgcactgaacacactcaaacagctgatggaagagaaaatcaattccaaaaatgtggaaattgttatgattaagccgcagacggacaaggaaggcaaaacgttgggcaaaattgtgtggttagaggaatcggagttgcaagaaatcatttcgcgattgtagtcgaaggggacggattagagaaggaaaatgggctttgcactgccccttttatgattggatgaccttttgttattctctgcctttttgtgacttttcagtgtataaggcaaatgaaagcaattaattgagaaattggctaatatccaataaatgtttcaattctcnnaaaaaaaaaaaaaaaaaaaaa

SEQ ID NO: 48922 - DNA, 699 bp, Heterodera glycines
aagcaaaaaaaaaagccaatggaattcaaaggcgaagaatggtcggacaatccgataagcgaatgccgaatggccgagttggtccggcactttttcgccttgggttggatgtgcgacaacggcagcggaatggcggtccgagtgaaagacgaacggacgggcgaacatttgattctgaactcataaaattcgttggagaaggaaattttttcggaaaacgatttatttgtgatgaaaatgaacggcgaaattttgaaaagcccgtcaaaatcggaccgatctccgacagcgccgttttatttactgcgcgacaatccggatttggcctgtgtcattcacactcactcaaaatgggcaaatctgatcacccaactgatcagaggagacgagttcaaaatttcaaaccaggaaatgattcagggttgtgaaaatcgtctcacaaaaagccgtctggataacattgacgtgctagtggtgccaattgtgcagacagagatcaatgagcatctgctttatccaattctgctgaggacgctgaagcaaaacgcgggggcaagtggcattttagtgcgtgggcacggctttttctgcttcggcagcaacagttggcaaagcaccaaaatgatgttggagtgctacgagtatttgttcgaattggcatgcgaaatgcttaattacgatttgccattggtcaaaagt

SEQ ID NO: 48923 - DNA, 631 bp, Heterodera glycines
gtccaattaagaataatctgaatcagatttgtagttctcactattcaatcctacaattagccttattttgcaaaacatccatttttgaacttcaacaaatgtctacgtggattcattgcaaccattgcttcatcgtgccaacaaatgactgcaacaaaacgcgattttggttcacttcgtgcggtcatttgatgtgcgcaaagtgtctgaaggcgaagcgatccaacaacaacaacgggcagcactttgagtgtttgctgtgccatcaacagaatgtgcaactcgtggagctcaaccgccatctgaggcccgagctgctggcgctgtttcgtccggcgaaggatttgatagacgaattcaacgccaagttgaagcaagtcctcacatttcagcagtcgcatcagaagcgacttgtcgaccatttgacggacaaggcacaaagggccacaaaatgggcacagtcagttcagaaggacatgcaaaaagtgtcggcagaacgtgacaaactgaaactcgacttggagcagtccaatgagaagagcagaaagacggaggaaatgcttgcgaatacacgccatgagctgcagcgtctcgccaacaaattccaccagcaacaccaccgtggaaacaa

SEQ ID NO: 48924 - DNA, 1214 bp, Heterodera glycines
gttgagcgctgctccctctttttctttctcccttttcccgctgcttttgctccttcccctgggatgtgcccttcgaattgcttttcgttgcttttcctcctcttctgtctgttttttgtgccttcctccgttttttcttcattttgcggcaaatccggcgtcccttatagttttgaggttctttcgaatggggcgcccgttttgggctgtgcccagccgagctgtgtgatctccgccaccgattcagagggcgacttccacgaggacagccaattcttcaccaacgcggatggccaaccggacggcttcttcagagacggggacagagccctcaaacgttacagacacagcacagcgccaaaactgattgcgaactgttcgggacaattcggcgagctttcctgtccccgcaaaaaccaatgggtcggtggcattgagtacatcgaccatccccggcaaccattgattctgcaatgctgcaccttcgagggccttcgcttctcccaggaagtcggctcaacgacggtcggacccggcgaagcaatcaccggtggtgaagtggtgcgagggggacggcaaatctcgtttgatgtgatcgcaaatgtgcggaaggtatccaaatcagcggaaggcgaaacggcaggaaaagtgcgatatgaggtgaccgttcggagaatgaactgcttgccggacccacctgaggtcgaagtcgaatttgacggagaagtgccaatggaagtgagcaaactgctgggaaatgccaaaaacaaagaagtgacggataaagtgaacagagcagggggaacgcagcagcagcagcagaacggaagccgaaagaaagtgccgatgagacagaaaagccgaaaggacggacaaccaaacgcaaaacagcagcagcaacagactgcttccatgggacaaagaaagcaacttcagtcattgcaacagcagcaacaagtcgaattgcaagaagtaacaggaggagagggagaacggcagccatttggtcgtaataacgaagtggccatacaaccaaacaatggacaaatgccacggaaaaataaccaccggccgcaaaaacaacaacaacaacaaaatgaagccgtacaaggagatcaacaacaaatattcaatgggggagaagggcaacacgcgattaaattcatcgagcaaaaccaacacaatttgggcacacactttgcggagcagcagca

SEQ ID NO: 48925 - DNA, 639 bp, Heterodera glycines
cttggacgcgatgaacaaccggatgccgattctggacagacgatggagttcaactacgttgtcatgtcgttggttggccgtccaatggacaaactccttcacgaatccggtgaccgcttcagccccggaactgcgatcggcacttcaattcaacttctcaaagcgcttaaggcgttgcacagcgttggatacctccatcgtgacattaaaccagcaaactcggccatcggcacgcctgagacgaacgaacagcgccttctctacctcctcgactttggaatggcgcgcaaatatgtcagagaggacggcacacaccggcgccaaagggacaccgcccgcttcagagggacgccaatctacgcaccaatctctgcgcacatcaaacgcgactacagccgccgggatgacattgagtcgtggttctacatgctgattaaattctacaaaggctctgtcccttggaatagccttcgcgacaaaaatgagattggcctgtacaaatgtcgccggatggaggaccagccacccgaagtgcgacgccaagccatcgacgaactgactgctggatgtcctcccgaatttaccgagatcctatcctacattgaccgactgcagcccgaaagccgaccagactacgag

SEQ ID NO: 48926 - DNA, 701 bp, Heterodera glycines
ccaagtttgaggtattattaaaataaaattccataatggacgtggcaacggttgtcgatgagtacattgattcatcggatttagagcgttttcgaaagacatacgaagaacagagtcgacgcggatttccaagtgccatggccgtatttaattatgcgcacgctttaataaaatcgacgaaagacgatgtgagcactggcatttttcttcttgagagtttattgaaacgatcggaagaagacattcctaaacgcgactacgtttattatttggccatcgctcacacgcgaatcaaagagtacgaccgtgcgctcgaatacatcaatttgcttctttctgcagaatcggataaccaccaagcattggacctgaaggaattgatcgaaaagaggatgaaacgggatggattgctcggcttggcactgaccgttggctttggcggtgctgcggtcgttggcgttctcggggcggcgctgttggctcggaaaaaatgagtggtgaaaaatgtgatgcccctaatttttaacttatactgatgagttgactgtatttatccgcatcgattgggtatctttgacactgataaaaatcgcttttccgttaaactcattacccttacaaaaaattatttttaatttcgcgctcactaaatattcaccacttttgagcaaacttttgtattgagcgatcactgtgaactg

SEQ ID NO: 48927 - DNA, 949 bp, Heterodera glycines
attttgttttatttattgcttctcaatttgttaaattttattcaacgcggttatcttatgtccgaaaaggacgtcccacttgccttttcgggaccggtcaaattcgtcagcaacgcgctcgccggaggcaccgcggcggttgtcacaaaaacggtgattgcacccattgagcgggtcaaattgctgttgcaggctcaggacgcgtcggcacatatcactgcggacaaacgctacaaaggcatcgtcgacgtcctcgtccgtgtgcccaaagagcagggcttcctggcattttggcgtggcaattttccgagcattgttcgctattttcctgcacaggcgttgaattttgcgttcaacgatttgtacaaaggcattttgagcaaaaattcctcctcaaaaaatggtcaatttttggggagttttgccagcggtgccgccgccggtgccacctcttcgctgttcacttattggctggactttgcgcggactcggctcgctttggacattggcaggtcccgtgaatcgcgcgagttcactggtctcgccgatcttttcgccaaaatttggcgttccgacggacttttcggcctctaccgcgggttcagcgtgtccatttgggcgtccatcatttaccgcgcctgttatttcgggtttttcgacaaggccaaggcgtacgcgtcgtcggacggcaaacggccgttgtcttttctcgagagatggctaattgcgcagggagtcacaatggcctccggaatgttggcctatccgttggacaccgtccgacggcgtctgatgatgcaatcgggccacaaggagcacattctgtacaaaaatggccgcgattgtgcgcgtaaaatctttgcgagtgagcacggcattgccggcttctacaagggcgggctcagcaatattcttcgcagcaccggcgggcgcttttggtgctcgtcct

SEQ ID NO: 48928 - DNA, 660 bp, Heterodera glycines
ataagaccgatcgtttcgctgttatctcgttcaatctctcctcatccttctcttccttccgtttctttctcctccgcacttttgttcacttcatttcgtgacttctcctccgaatttcaacggcataccgaagcctgtcccaacaacccaaaaatgactgctagtcgaagattgactcgcgcggaagtggcggaacacaataacagtagcgatgcatggataattattggcaacaaagtttacgatgtgaccaaatttctggacgaacaccccggcggaatggaagttttaatggaaaaagcgggcgaagatcgaaccgaggcattcgaagacatcggccattctacggacgccaggcaaatgaaagaagattttctagtgggagaaattgtcgagtccgaacattggaagtacagttacgacaaaagagagacgggcgcagacaaaacgatggaccaatcggaaaaaaggaacagccccgtggaaatgctggtgtatgcgttgctctttgctgtcattgttgccatcatttattaccttttgttggcttaaactgatgaatcttcgcaaatttttaagttaatcccccaaatcgttgacctaaatttgatttttattaatttttgtgatgtcggaccatttgcttatcccttttcaatg

SEQ ID NO: 48929 - DNA, 532 bp, Heterodera glycines
attccatggaaattgattcgcacccatccgcagcagttcagcccgaaccggcaccaattgagcaccaacagcaaaataacacgagaattttgccaaaatcgaaaaaatggtggaaaaaagcactgaacattaggccgatggccaacagcagcacaaagcccaggtcaagttgggagcgcaaaatgcagaagaagggcgagcgcgagcagtgccgtgcggtggaggccgaaatccggcaacggttggcagacgaacggaacgcgcgggcacaggcgttgaaggagcgcgagcagcgccgaaaaagcaatgagcggaaggcggaagttgtgcaagtgatccgaaacagtgcaaagctgaaacggatgaaacgcaagcagttgcggacgactgtgcagatgagagacaccaccgcgacaacttccgatggaaaacagaaataattggaggaaatcaaattttatttttttaattttgttgctgtttgatgaagaaataaaaaatttgtttccaaaaaaaaaaaaaaaaaaaaaaa

SEQ ID NO: 48930 - DNA, 1010 bp, Heterodera glycines
acgaggcaagtttgagctttgatcccgtattttcctctcttttcccatgccaatgttggcccatttcggctctttccaaggccaagatgttttcgagtgccaactccgctcagaaagcggagtggtcgtcaaagtgatcagcttcggtgcaattatccgcgattggctggtgccaacgcctcaggatcagctgcggtcggtggtcctcggatttgacagtttcgagaattacgtcgagcacagccctttcttcggtgccattgtgggaagagtggcgaatcgaatcggaagagcgagattcacggttgatggaaaggaatttttgctgacaccgaacgaagggaaaaaccaattgcacggggggacagagacatttgggagaaaagtgtggaagatggaaccgttgtgtgacaatgccgcggccaaatggccctcgggcgtccgtctctctttggaaagtgccgacggagagggcaccttccccggaaatttgcgagtgtccgtcacttatcggctgaccacaaataaattacgaatggacattgaggccacttcggatttgccctgtcctgtgaatatcgtccagcacaattatttcaatttgtctggccacggggacatccgcgaacattcgctgaaattggccgccgattggttcacgccgacttcttctgatcagattccaaccggagaaatactcaccgtttcaggcacagaattggactttcgggaagagaaaaaactccaaacgaaagacggaaaaccgattgaattggatcataattttgtacttaccaagggaaaaggaacggacgcacaaattgcagcagttttgagagctccggacaattcattggcacttactctgcgctccaatcagcccggtctccaagtgtacacgtccaagtcgctgtccgtgcccgtgcccggcctttacggccaacgctatgccaaatttggcggaatttgcctggaggatcagaactttccggacgcagtgaaccacgaaa

SEQ ID NO: 48931 - DNA, 765 bp, Heterodera glycines
gagaacttaatttgaggattacattgaaaataattaattagacttcaaaatgggtatttcccaagacagatggcacaagcggcgaaagactggggggaagcgaaaccccattcacaaaaaacgaaagttcgaaatgggacggccggcagcaaatactaagattggtcctaaacgaattcatttggtgcgttgtcgtggcgggaacattaaacatcgcggacttcgtcttgataccggaaactttgcttgggcttctgaagggtgcactcgcaaaacgcgtatcatcgacactatgtacaacgcttccaacaacgaattggtgcgcaccaaaacattggtcaagggaatgatcgtctcaatcgatgccattccgttccgccaatggtatgaagcgcattacgcactgccattggcgcgcaaaaagggacaaaagttgaccgaagatgaggaggcgcggattggaggagcacagaaacgctcaaagtcgactctgaagaaatacacggaacgccaaaaaaccgccggggtggagccgcatcttctggaacagttccaggccggacgacttctcgcttgcataagctcacgaccaggccaaagcggacgctgcgatgggtacattttggagggcaaagaactcgagttctacaacaagaaactgaaggctaaaaaggcgaagtgatgccgcaccgaagcttggaattgcgtttccaattttgttgtccgttccttttgagtgaatgataaattttgttgttttaaaaa

SEQ ID NO: 48932 - DNA, 917 bp, Heterodera glycines
gtccaattaagttgtttaaaatgcgaccgcttgcactcaaaggtcacgaaagagcgatcacccgagtccgactgaatcgcgagggcgacattctcttctccgcttccaaaggttccgccgtctgtgcatggtatacggagaatggggaaagaattggcacttatgaaggacattccggtgtcgtttgggacatcgacgtcagttgggacacacaaacgatggtatccgcatctggtgaccagaaagttatggtttgggacattgagacgggcgtttccaaggggttctctgagcctggttccgttgtccgttccatcggtctctcctacagcggcaatttggtggttttcacgctgaacaagccgaccacgggcggtctcccgggcattgtcgtggccgaccttcgcgacaaaatgacgcaacccatcctacgcgacactttcgacgaccaatgcaacgcatgtctcttctcacacttagacgatcacattgtagccggtgatcataccggacagctggcgatgtgggacctgcggcagccgggcgccgctagcaatttcacacacccgcacaaataccaaatcaacgaccttcagatcaccgccgatcagacatttatcatcacagcatcgaaggacaaaacggcacaactgcacagtgcacatgatctgcagcatttgaaaacgtacaagtccaatcgcccggtgaacaccgcctccgtctctcccagccgcgaccacatcgttttaggcggtggtgaagaacacatggaagtcactcagacggccacaacagcggagcaattcgtggcccgactgtaccatttgattttcgaagaggaatttgcccgattcaggggccatttcggacccatcaattccatcattttcgaccccacgggggacattgttgtctct

SEQ ID NO: 48933 - DNA, 704 bp, Heterodera glycines
ctccttcgaacagtgtgttccgatgttgccagcaataaaacctgcaaattccgatgggattgttttagacgcgcttccatatattgacgatcaacaatataccgatgaacatcgtcaattggcactgcaactgattcaggccgaatgcaaaaagtttcctatgacaaagaattacctgagaaatctgcctgaacctgactatgataagtttacaaccccgagaataatggaacaccaagcgaagatggccaacaaacaagaaattgagaaaatcgatttgttgcgatacgaagtgccatccccagcaaatacgagtcgatcgggcaataagaaagcgtggcttggtgccatcgataattgcagggcccaactgtcaaatcaatcgttacgcaaaatgaacttggaacttttggacgaatttggcccggaggcgtttttacggtcgaatcagcacctaaaaaagcaagttgagaaagaggaagccgaattgtttaagcttcgctcccaactctatgaattgaatgctcgccgaaaaagatcgcaattggatgctggggaaaggctggctgcgttgggacaaacatgggttgaactagtgacgaagaatgccgcgatggttgtccccaatgacaaacttgaaaaccaaattcgaacattggcgaaattatgtaaaatggactctggcatttgcaaaaaataaattg

SEQ ID NO: 48934 - DNA, 886 bp, Heterodera glycines
gatggtgcaataatgtgcggtcgcttttctcaattagctggcatcaaaggcaacggacacgcgaaggcacactttgagtcgacgggctttccattggtcgtcaaattggggaccattgagaacggagacggcgatatttacagctacaatgaggacgcgccggtctgcgacccatggcttggtcaacatctggcacgttttggtctcgacatcaaaaaattccgcaagaccgaaaaaacgactttggaaatagaacttgatgcgaatttaaagcacgaattctcggcaattcaagaagaaggattggagttggtcaatgtgagtgggcctggctacactgggctgatcaacctcggctcttcttgttacatcaattcggctctccaagttctgcttattgtccctgactttgtccgtgcgtttactgaagaactgttgctaagaaaacaaccacccgaaataaatgaggatttcgccgctcaattggctaaaattttcgtcgcgatgaaatcgggggattattcgcgagaagacaacaaacatggtgccgaaaaggagaagggcattcgaccgacgacattccgtcggattgtgggccgaaaccaccccgaattttcaactgcaaaacagcaagatgtggaggaatatgttcgctttctgtttgagaaggtcgacgcgtgctccgacctctcctcggaaaatcccgtcgctgcgttccgatttcgtctggtcactcgtttcctggacgaactttcagattgcgttcgctattctttccgtactgacaacattttatcggttgcaattccaatggacttgtgcaaggagtctgacactgttgtgaatggggtcagacgaaagagtgtcactttggagcagtgtttgg

SEQ ID NO: 48935 - DNA, 707 bp, Heterodera glycines
gtttgagcagtgcctttatttattgaatccgacaaaatgtcatccagctcgaaagctttcattggtaagccggcgccaaatttcatggcggacgccgttgtgaacggcgacttcaaaacaatttcgctggaacagttcaaagggcaatatgtggtgctgttcttctacccactcgatttcactttcgtttgcccaaccgaaataattgccttttcggacaaggcgggagagttcaaaaagatcggtgtccaactcatcgcgtgttctaccgactctaaattttgccatcttgaatggatcaacaagccgcgaaagcagggaggacttggcgagatgaacatcccggtgctggcggacaccagccacaaaatcagccgtgactacggcgtgctgatggaggaggcgggcattgcttatcgcggattgttcatcatcgatgacaagggcgttcttcgtcagatcaccatcaacgatttgcctgttggtcgctcggttgacgagacgcttcgtctcgtgcaagcgttccaatacacggacaagcatggcgaggtgtgcccggccaactggcagcccggcaccgacaccattaaaccggacccgaagggctcgcaggcgtactttgacaagaagggctgaacaattgagggggagagaagaaaggaggatgagacgtatggaattgctgatgctgactctgtgttgtgatc

SEQ ID NO: 48936 - DNA, 419 bp, Heterodera glycines
  unsure (1)..(419): unsure at all n locations
aatcaaaatgacgctcgcggtcgatctccttaacccctcgctcgagtccgagaagcgcaagcacaagctgaagcgcttggtacagtcgcccaactcgtacttcatggacgtcaagtgcggtgcctctggctgctctgccatcaacaccgtcttctcacacgcccagaccgttgtcttgtgctcgtcgtgctcgtcggtgctcgccacccccaccggtggtaaggctcgtttgaccgagggctcgtccttccgccccaaggctcaataagcgcagctcaacgtttacttgtaatgtgggagtcgtcgtcgagtcgacacggacgtgtgtgtttgtcgtcacggttgtcaatcttttcgtcttgcctgcccgccaaatgcaacagtcgtttcccgaaccnnaaaaaaaaaaaaaaaaaaaa

SEQ ID NO: 48937 - DNA, 636 bp, Heterodera glycines
gccatccagcggcactttacaacagtttcaaaacaaaatttattcgtctattaatatacaaaaatgaattttcttcaatccgattcattttcattcattcaaggaccattcaaggagagaaatgacgagcgaaatacgacatttgatcacaatcaattatcgaaggaagcggaaggatttaaagagaatattcggagccaaatcagcacaagggaagcgcggaaacaagccaaggatacgacattggcattggcagccgctaatttagagtccaacgggcgcattcagctgcggaaccgacgaattctcaggggacacatggccaaaatctacgccatgcattgggcgtccgactcgcggaatttagtttcggcttctcaggacggcaaattaattgtgtgggactcgtacaccacgaacaaagtacatgccattccgctgctgtcttcctgggtgatgacttgcgcgtacgcccccagcggatcgttcgtcgcatgcggcggattggacaacatttgtagcatttactcgctgaagacgcgcgagggaaatgtgcgagtgtcgcgcgagttgcctggtcacaccgggtatttgtcctgctgccgcttcttggatgacaaccaaatcgtcacctcc

SEQ ID NO: 48938 - DNA, 535 bp, Heterodera glycines
  unsure (1)..(535): unsure at all n locations
aagtttgagtaatccaatgtctctcactacaaaattgcgaagattgcggaagaaacccccggagggatgggacttaattgaaccgacattggaggagttcgaggcgaaaatgcgagaggccgagactgaaccgcatgaggggaaacggaggactgagaccgtttggccgttgttccggatccatcaccagcgttcccgatacatttacgaccttttctataaggaagagaaaatttctcgcgaattataccaattttgcatcgatgcgagactaatcgacgcccaattggtggccaaatggaagaagccgggtttcgaaaatttgtgttgtttgcgttgtatccagacgagggacacaaactttggaactaattgcatttgtcgtgtgcccaagtcgaaactcgaggcgggccgtgtgatcgaatgtgttcattgtggatgcagaggatgttccggatgatttcctccaatttgtcatcctctgtcaatttctcgatttctttttaattattaaattgcattttcgattaanaaa

SEQ ID NO: 48939 - DNA, 517 bp, Heterodera glycines
actacggacgttcaaataaccccacaacgcccatcaccatgaagttctccaaggacgtgtcctcgtcgcgccgcaagtcccgcaaggcccacttcacggccccctcgcacgttcgccgtgtcatcatgtcggctcccctcgccaaggagctccgtgagaagcacaacgtccgctccatgcccatccgcaaggacgatgaggtgctcgttgtccgcggaaacttcaagtcgcagaccggcaaggttgtccaagtgtaccgcaagaagtatgtgatccacattgagcgcatcacccgcgacaaggtcaacggcacctctgtccccgttggcatccacccctccaacgtggtcatcaccaagctccacctcgacaaggaccgcaaggccctcctcgagcgcaaggctgctggaaaggctgtccaggccgagtaaattgtcttcacgcttgtgtggaactctgggactcgtgcgtgtgagttgttctcgtctatgaatgcaatttgcgtgtttgactcaaa

SEQ ID NO: 48940 - DNA, 728 bp, Heterodera glycines
gtccaattaagatacaaaatgtccaattcttttcgaattctttccttattctgtccgctgtttctgcttctctttgttcctgagacttcacgagctctctattttcacatcgctgagactgagaaaaaatgtttcattgaggaaattccggacgagacaatggtgatggggcggtacaaagtgcaactgtacgacccgaacacgaaggcatatggggactatccaacaatcggaatgcatgtcgaagctaaggacccggaagaaaaggttattttgagcaaattgtacacgagcgaaggcatgttcacgttcacatcccattcccccggcgaacatctcatttgtctctattcaaattcgtccgcttggttcagtggcgcccaattgcgcgttcatttggacatccaagtcggagaacatgcccaggactacgagcaggtggcagccaaagacaaattgaacgaacttcaattgcgtgtgcggcaattgttggaccaagtggaacaaatcaccaaagagcagaattaccagcgctatcgcgaagagcgtttccgacagaccagcgaaagtaccaacagtcgcgtgctttggtggtccgtcggacaaacgattgtcctccttttgaccggtgcttggcaaatgcgccacttgaagggctttttcgaggccaaaaagcttgtctgaatcgatgcttttttcctggcagatatttatttgtctccgaattg

SEQ ID NO: 48941 - DNA, 1130 bp, Heterodera glycines
ccaagtttgagtcaccgcaatgggcgtacacaatgaattacaattggaaggatgcaattttcctgagacagcacattgttttttcactactaactggtaggacaatcacaattacaaagattcggtcttacgacgacaatcctggactgaaggaatttgagcgcatttttctttccatgatcaaaagattgacgaatggaactgagctcaaacttagtaaaaacggtacggaactcagttttcggcctggtctaattcatggaggagaattggagttcgactgtggggttcaacgttgtatcagttactttttggagcctctcattctcatggcgcctttttgcaaaaaacctttgaatgtgaatctgaccggtgttacaaattccgtcgatgaactcagcatcgacgccattcgggctacttggctcccggtcttttcccgctttgttcttgccgaccaatgcacagaaataaaaatcaaagccagaggtttcaagccgagtggcggtggttcagtgactttctccagtcccatcaaaaggaatttgcgtgctgtgcaatgcattaagccaggaaaagtttgcaagatcagaggtctcgcttacgtatgcaaagtgacgccatcaatcgcatctcgaatgattgacggagctaaaaagatgcttcacggaaacatttctgacatttacattacgattgaccagaggaagggcccccagggcggactatctcccggctttggaatcttcttgacggctgaaaccaccgaaggcgtatttttccatggagaagcgatgtcgcgccctaagggccaaaacgaagaccaaacagtgccggaagaaattggggaacaggcggcaagacgtttgctggatgaaattcatatgggaggctgtgcagattcgtcctgtcaatctttggccgccactttcatgactctctgcgacagagatgtttcgaaatttctccttggtccactcacaattaacagcgtacacacccttcggaatttgcaaatgtttttcgagcaaatgtttaaattggaggaatggtggaaggttatgaaagaaatcgtcggaaaaggcggaaatgcgatgaaaaacggaagtgaggacaaatgtttgatgacc

SEQ ID NO: 48942 - DNA, 530 bp, Heterodera glycines
caaatctctgttataataagcgttttgagtgcaaaatggccggtatcgcagcaggaagactgacggaggagcggaaagcctggcgcaaagaccacccattcggtttcatcgcacgacagtgcaaaaaggaggacggcacattggacctgtacaattggatctgtgccattcccgggcccaagtcgaccatttgggagggtggcctgtacaaattgcgcatgatcttcaaggacgacttcccatccactccgccaaaatgccgctttgagccgcctctcttccatccaaatgtttatccgtccgggacggtctgcttgagtctgttagacgagaacaaagactggaaaccgtccatcaccgtgaagcagttgctgctcggtatccaggaactgctggtgtcgcccaacccggaggacccggcacaggcggaggcgtaccaaatttatgtgcaaaatcggcccgagtatgagcgtcgagtgcgcaaacaggcccaacagttctcagaggaccaggtgctgaagcagttgttg

SEQ ID NO: 48943 - DNA, 335 bp, Heterodera glycines
gtccaattaagattgtgaaagaatggctgcgcacaaaacatttatcatcaaacgaaagttggccaaggctgccaaacaaaatcgtccgcttccccactgggctcgaatgaagacgggcaatcgcattcgctacaacgcaaagcgtcgtcactggcgcagaaccaaactgaagttgtgagcgatggaccccgagaaaacatcggaagacgccggacgggcgttgattttcgacttttttgtttgttcatggagttaattttcatacatttttgtgtggactattgttggtaaaattgttgaatttgaaaaaaaaaaaaaaaaaaaaaaaaaaaaaa

SEQ ID NO: 48944 - DNA, 627 bp, Heterodera glycines
ccgccacaatgatgttgctgcccacaaaaatcattaccaaactttgggagtgtctcgtgatgcgagcgcaaaggatatcaaaaggcattttttgagctgaccaaaaaacaccatcctgacatgaaccctacggataaaacgaaagcagccgaggcgtttcaaaatataactgatgcatacgaagtgcttggttccgaagagaaaagacaaatttacgatacgctcactgctccgaaaccgcaagcccatttcggcagaacgccaaatttcagacggactcgttccaaccatataaacatgggacctgcaggagggcataaagattggaccgatttggacatcgatttcagagatttcgagcacttccaacgagaaaaccggagacggcagacgttcaaagactgggcccgggcgaatacaaaatccgaattttactggtcatctcaccaatcttcgaaatcatataaaagcccgctagcgttggaaagagagaacttggagaagaaaatgcacgacgaagtcatggagagacgaaggcgaagcgcgacaattcccatgtttgacgaactgcaaagagacaagcagaaaagggaacaggaagagaggaagaagagaatgaagaattac

SEQ ID NO: 48945 - DNA, 1045 bp, Heterodera glycines
  unsure (1)..(1045): unsure at all n locations
tccaattaagctactattagatgagcctatgagcaaccaatcgaatagcaatagccaatcgaaacaacagcaaaggagcgaacattttatgtccagtgtttttgaggagtgcgacgccctaaaacaggaatacgacaagtgctttttgaatttcttcaaaacttttgtaaaggaagacgaacgacacgaaaggacagtcaatccgtgccaacaattgcaaaacatttatcacaagtgtttggaaaagaatttaaagacacataagccatacgacatcgatttggacgagttgaagaaggaagtgtccatcagcatcgaggagaacatcgactggaaacaacgcgggaattgatggaggaaattgtgcaaagtgcggcgaacggcggcataagttcgacagcgccggaccaatccagcgaaagtcgtttcaaccaattggaacggaatttggagctgttccaggaaaatgcgcgtcatatgggagtgatcgccagtgacttcacttccaaaagtcaggagccgttgaatcagaaaattcacactctcatctcgggccttcaggttcttgaccaactcaaaagccaattcaccgatgttcgtgttcccattgaattgttggactatttggaccgtggtcaaaaccctcagctgtacaccaaagaattgttggaacgcacgcggcagaggaacaaagaactgaacgggaagacggagatgtacaggaagttccaggcgtgtcttctgcaggaactccaccgcgaaatgccttcggacgtggaggaatacgtgcgcattcgaaaaccgagcggaatgaatggggcggcagcgggaaacgcaatggcaaattcggcgatggcagcggaggaaacacagcacgcgatggagtgacggactgcgtgcaaatgacggggtgggaacttttccggacaaatttgttcatttttctttttgcattgtcatccaatcgttccccatttcagttgtttctctttgaatttcttccaatgataaatattaaattgctnaaaaaaaaaaaaaaaaaaaa

SEQ ID NO: 48946 - DNA, 852 bp, Heterodera glycines
caataaaggtgccaaatcttatatttttaaattattcacattctttcctccaaaattcgttctttcatgtcccttttgagctttgagggtcgcgttgccctcgtgaccggcgcaggcggaggaattgggcgtacttatgcacttgaatttgcacgcagaggtgccaaagtgatagtgaatgacttgggaggggaccgccacggaaaatccgcgtcgacttcggcagcagacaaagtcgtagcctaaatcctagcggcaggaggaaaagcggtgccaaactatgacagtgttgaaaatggagacaaaattgtgaggactgccatcgataattttggtcgaattgatatcgtgataaacaatgctggcattttgcgggatgtcagttttggcaaaatgtctgagttcgattgggattcggtaatgaaagtccacgtgaagggtgccttttcggtgactaaagcggcgtgggaacacatgcgggcgcaaaaatacggacgtttggtgtttacttcgtccaattcgggcatttatggaagtttcggccaggcgaattatgcagcagcgaaaatggcactgattggtctatccaacactttggcgttggaaggagcaaagtacaacatcgccagcaatgttttggtgccaactgctggttcgcgaatgactcaaacagtgatgcctgaagaattgctgacggcgatgaagccagaatttgttactccgcttactgttttcctggcacatgaaagttgcaacgccaccggaagagtgtttgaagccggagcggggtggtatggcacagttgagcacgtgcattctcgaggaaggaggatagcagaaccaaccgtggag

SEQ ID NO: 48947 - DNA, 676 bp, Heterodera glycines
ccaagtttgagattctgctggattgttatcatggttgctacttttgagaaactcgtaaagactgatggcaaagcgcccgatgaccttgaaaaacaagttgcaacggctttgtctgaattggcacacaattcagagatcaaggctcagctcagcgaactttattttgttggagcacaggaatacgaatttggaaacaaaaagtgtattctggtatggattcctgttccgcaacttcgagactaccaaaaaattcacccaaaattagttcgtgagctggagaagaaaatgagcgggtgtcatgtcatcttcattgccaagcgtaggattttgccaaaacctcaacgaggtaaaaaccgtaagccattgggacagaagcgtcctcgttcgcgaacactcactgctgtgcatgactcaattctcgcagacgttgtattcccagctgaagtggttggcaagcgaactcgagtcaagcttgacgggaaacaaatcatcaaagttcacttggacaaggcacaacaaacgaccgtcgaacacaaggtggacaccttttcgcatctgtacaagcgactgactgggaaggatgtggtgttcgaatttccggagccgttattctgagaattgaaaataaagagcctctccgttatttcttttttgttgttacgctgttgagaagatg

SEQ ID NO: 48948 - DNA, 623 bp, Heterodera glycines
ggcttttccaaactcaatgataaaacctgtgaatacattaaagagtttaatgaggacaatgactgattgtcgctggatggcgtcggtgccaatggcatttgagcagaaagtgtcgatggcacaaccacaacaatccatggcatatctcccggacatcgaaactctgacgaagggaaaagtcagtccgacgattctcaaaccttacattgacccgactctgtgctcttcccacccaaattcctttgagagagaagtgaccgtccgaagaatgctcgacgcgcgtgtccatttgggccataaggttggcactctcaacgataatatgaaatgggcattgtatggagaacgtcttggcatttgcgtctttgacttggaaatcactcggcattatctgctaaaggcgttggaatttgtccgatctgtggctttgtttgggcggccgctttctcttcgtctcgaccaataagtcctcaatgctaatggtggagacaatggccgacgaaatgggacagtacgcccacacgcgccattggcagcccggcacattcaccaactcaaagagcgtcttcagagggcccattcggctgcccaacactgtgattctgttgaacaccctgactagc

SEQ ID NO: 48949 - DNA, 2179 bp, Heterodera glycines
  unsure (1)..(2179): unsure at all n locations
aaagggcagttgctgctgttgctcccgcaccaaatgctaacgcagcctcggctcaaacaacccaaccgcaggttatggcaccatcttatccgttggcttctctctatgtcggcgatcttcatccggatgtcactgaggccatgctctttgagcggttcagcaatgctggacctgtgctctccattcgtgtttgtcgtgatgcaattactcgtcgttcgcttggctatgcctatgtgaattttcaacaaccggcggatgctgaacgtgctttggacaccatgaactttgacatgatcctgaacaagccaattcgcattatgtggtcgcaacgtgatccaagcattcgtcgctcgggtgctgggaacattttcatcaaaaacttgggcaaggaaatcgacacgaaggccatctacgacactttttccatgtttggaagcattctgagctgcaagattgccactgacattgagggaggaagcaaagggtatgggttcatccattttgagactgaggaagcggcgaacagtgcaattgcgaaagtgaacgggatgcttttggatgggaagaaagtgtttgttggaaaatttgtgccacgcactgctcgtgagaagcaaattggtgacccgtccagtcgtttcaccaatgtttatgtgaaaaattttggcgaggcaatggattcggagaagctgagcgaagtgttctcacagtatggcgaaatcatcagtgcaaaagtgatggaggatgacagcggcaaatccaaggggttcggctttgtcgcctacaaggaccatgaaagtgctgcgagggcggtggagaagatgaacgaggtttcggtgccaggcagtgagaaggtcgagcaaaagtttacggtgtgccgtgcgcagaagaagagcgagcgccaggctgagctgaagcgtcgttacgagcagtacaaagctgagcgcatccagcgttatcagggagtcaatctgtacgtcaagaacctgcacgataccatcaatgatgagacacttcgaagcaattttgaatcctacggaaacatcacaagtgcaaaggttatgtgtgatgagcatggtcgctccaaaggattcggttttgtgtgctttgaaaaggcggatgaagcaaccaaggctgttgtggaaatgaacaacaaaatcatcgaaaacaagccgctttacgtcgcgcttgcgcaacgtaaggaagaccgcaaagctcaactggcctcgcagtacatgcagcgcttagccgcgatgcgcatgcagaaccctgctggcctcatggggacaatgtatgcgcctgccagcggtggatttttcctgccacaggccatccagaaccaacgtgctgcgccgttcatgcaaacaccgaatctgtccggggcacaaatgcgtggcgctgtccctcgctggaacaatatgggcggtttcaaccatccaatgcaaggctacatgatgggtccagctgttggcggtcagttcggcggtgctaatcaaattgctcgtggaggacctcgctccggtggtatgggtggtggcggtggaatgcgtcagtacgggggacaaccccgtcagcaacagaaccgcatgccgggcatgggcggaggtcatcagcagcaagggatgcgctaccagggacagccgaaaggaatgcagcaacaacaacaccagcaggctcagcaaccacaaattgcctattcgtcgtatccgcagcagcagagccgtggcatggcaccgcaaatgggcggcggaggcggtggaggagtcaaagctggccatgcgatcactgcaacacaccaggaaccgttgaatacacagatgcttaccgaggctgacatgaccggacaaaagcaaatgcttggtgagcgtctgtacgcgatggttgcgcgttgcttccgggacggtgatgtcgagaaagttggcaagatcacgggaatgcttctcgagatggagaatgccgagattttgctgttgcttggagacgaggaaatgttgcgtttgcgcgtggacgaagcagcaacggtgctttaccaggccacgtgtcataaggaggcgcagtaggataaatgaagtggatggattggatgaataaattgatgagtaaaaggagaaatcaaaaaaattgatatgttatttggcttctttgtctgagtaaatgcttatctgttaaaanaaaaaaaaaa

SEQ ID NO: 48950 - DNA, 611 bp, Heterodera glycines
gaattcaagaaaaagatatcacaaattttctttatttgtacaaacatatgaataaattaatattttatacatttttgtattattaaatgtcatcacttatccgtggtgaaattcagcagtttgcatcttttgcaaatgttttccactggtttgatgagcttcatggatgcttccgacctcttcactcttttaaccaattgagaattccttggctctccgcccatttggccacttcttctttgaatgccgtccatcttccgttgtctggtaaacagattttagatgtcggatgtggtgcaggcattttatcgacttctctttgtcgacgaggcgctttagtcactggcttagatgcggataaatctgtgctagaaattgctaatggttataaggaaacaatggcgccgagtcttcgcaaaaaaatagaatttattcctggcacgattgagagacttgcgcaagaaaaggatcgaatcggaacattcgatgcggtcgtttcttcggaagtggttgagcacgtttccgacttgcccttgttcattcggagttggtgcaaattggctcgtccgaattctccaatttttttcacaacaatcaaccgtacaatttgg

SEQ ID NO: 48951 - DNA, 693 bp, Heterodera glycines
gttaagccttcactttcagtaattcttattgttaacataatgacgcaatttctccccgacaatttgttggctctgtttgcgcctcgtccgccgattcaattcaaaccgccgccagatgatctattcatccaccgaaaacacatgcaaatggggggcatggccgagtgtgtccatggttttgaggatccgaaggacactcctccaaaacccaaaattgagacccgagaggagaagagagcgcgaaaacgcaaggaaaaggaggagctaatggcctacaaaattgagcaaggcattgccacttggacacctgcggacaatccgaaggcgaccgttgacccgtacaaaacactttttattggccgaattaattatgaaacttcggagtccaaactacgccgtgaatttgagaagtacggcaaaataacgaagattattatggtgcacgacaaaaacagcaaaccgcgcggttacgcctttatcgaatatgcccataagtcggagatgtcagccgcttacaagaaggccgacgggaccaaaattgacggacgtcgcgtggtggtggactacaagcgtggccgcacgcaaaagaaatggctgccgcgtccgttgggtggcgggaaagggggaccccgcccaatgcgggagtccaaggcgaaaatgttggcgcgtgagttggcccgaaaagggggggga

SEQ ID NO: 48952 - DNA, 597 bp, Heterodera glycines
gtccaattaagctgacaaatgttttcaattgttggaaaaaaggtcttcaacactacctcgtgcaattttctttcgaaggcattttacgctcatatgagcaaagatgaaataatgtggcattggcctgcgcagaaatttgaccaacatttcatcgattacttgaacaagccggacattgacgggtgggaaatccgaaaagctctcactgaactcgggaactttgacgtggtgccagaccccaaagttgttgaagcagcgctcagagctattcgccgtgtcaatgactttgcgcttgccatccgttttctggagcagattaaatacaaatgtggtggacccaaaagccgatccattgtgtatccgtatatcattcaagaggtcaaaccggtgatggatgagttgggcattccgacgctcgaggaacttggctacgacgagcccgaattcttcactcccgaccccgagtggtactgggagaagtcctggtacaagctttacgggttcgacaaactgcctggatacaaacacttggcctgaactgtttggccggagatggcgtgtgcatagaataggaaagaaattgttggacgactcttt

SEQ ID NO: 48953 - DNA, 701 bp, Heterodera glycines
aataaagaaaaagctttgaaacatttttaagaagcttctctcttttgatcaaaatgacttcgaaaatggtggccgtgataacaggggcgagttcgggcctcggcaaagcaacggccgttttgttcgctcggaatggctaccatctctcactttgtggccgtaatgaaaaagcgttggagggagtggcgtcgaattgtttggcagagggcggactgacccgagaacaggttctgacaataattggcgacgtttgtgaggagaaaacgcttcaaaacattgtgaaacgaacggatgaaagctttggacgaatcgatgttttggttaattgtgccggtgttattgcgtccggaggagccgaaaacactccgacttcagttttggatggtttgatgaatgtgaatgtgaaaagtatgatcagactaagtcaattggttgttccgtatttggagaagacgaaaggaagcattgtgaacgtgagtagcatcgctggcatttgcgcgtttcctgctgtgacttactattgcatttcaaaagctgccgttgacaaatttacggaatgcctttccatggaattggcaccgaaaggcatccgagtcaatgccgtcaaccctgcactaatcgtcaccgaattgcatttgcgttcgggaatgcccgaggagcagtacagtgattttgttcgtcgcggtgcccaaactcacgca

SEQ ID NO: 48954 - DNA, 895 bp, Heterodera glycines
ggtttttcgagaaatgacaaatgagcgtgatttttctcacgatgaccacattaacaacgctattgggaccaatggcgacagtaaagacgcagccaaaagaaaggacatctgccgtgattttctgaataatatttgcagcagggggaatcgatgcaaattttatcatccggaagacagtgtcgaaaagaatcaaaactcggcggatgagccttatcagttctgcattgattttcagaaccagggctgttaccgcgaaaattgtcgttatgttcacgcgtttcgcgaggatgtcgatcgttacaagcgcagcggcgacgtgacgcttgggttggcgcgagctttggcagcgctgttgaaaggcgatacgataaatggaattccgctttgcaaagagttccaaaatggacactgcgcgcgcggcccgcaatgtcgctattggcatatcaatcgcgacgaagagcgacgcaaacgctttggcggcggcaggaactgcggcggttcgccttcgtcgcttgcgttcggcgcttacccggcggtgcctccggcaggagcgcaactcagcagacgaagaggtgacgagttcgtcagtgaagattttgcaccgccctccaaacgatcttttgctcacaatcagccgtttgcaacgattcccggacagatggctccaacgtcagcaccaaccgcaccgtctcacccgtcacctcaattagtaattgagttggaacgtcgaaacgcggaattaaccactgaagtggaaagtctgaagagggagcttaaccgggaaaaggagcgttacgatgaccttatgtcgctttttcgagccgcccaaggccaaccgacggttcaacgttcggtgatttcgactccgtctttggtacccgccaatttgcagcca

SEQ ID NO: 48955 - DNA, 1080 bp, Heterodera glycines
gtccatttaagcgaaaaatgcactcgggagaataaacaaggagagaaacaggcggagacacgggcgcaactcaaagacgacgcctttctcagggaaattcactcgcggctgaaacccggcattgaaaattcggagcgtcgtttcgatgtgcacaaattcacttgcgccgctttggaattgcccgacttttcggacttcgcccgactccgtccgttaattgacgcactcattgctgaattggatctcaacgatttcctcggctgcaccgcggcgctcgaaatgctggcggagacggccgccacggcgccaaagtgtgtgcccttttttggccaaattggcctcctggacaaagtgtacgcgctgttcatccgaaccaaggaggagccggacatgggcatcattcacattgcgtgcattcgcttcttcgcctatctgtgcaccaccgatgacaacgcattgaccaaatttcccaaattcacggccgatgttttcgacgcggtgttcagatttgatgcattcgacgtcacgcgtcgtcagttggccttcgaaacgttggcagtgatcagttcgaccagcggggccaagcagatattctcgcagaacgaaactctctacaacatgcaacgggcgatgagcaatttggctgtggcggtggcaacggccgccgagccgtcgctgaaggcgcgtcatttggaagcagttcggatgttttttgatcggattgccgacgaaagcggttgccaacccgaacagaaatgcaccaccgcgtccgctgaggctgaagagcagctgctccaccggtggttccgctggttgggcgaaccgttcccccggctgttgctccaatgtgtcagggatcccatctccgaagttcagttggccgctctccgcgtgctgatggcactgacgcgccaccaatgggcgtatgcccatttttgtgccataactgatttcgtcaatttgctggtcgaccgttccgtcaatttcgacgccgacgcgatgcagctcaaatacgcgctcatttgtcgcttggttgaggccgcgccgtccgcgctgaacgacggacagatggaaatgctg

SEQ ID NO: 48956 - DNA, 641 bp, Heterodera glycines
gccaattgattgacggcggtcattgaattcctgttatttgtgttgtttctatcgtttttttgtgacaaatgaaatacgcccagctagttgtcggccccgccggcagtgggaagtccacttattgtgcagctgtgcaactccattgcaaaacggtcggacggacggcgtttgtggtcaatttggacccggcggcggagcaattcaattacgattgtgccgtggatatgcgagaattaataagtgtggaggatgtgctagaagatgaggacatggccatgggaccgaatggggcattggtctattgcatggaatatttggccgacaatttggactggctccactcgcacctcaacgagggcgaagacgactactttctgttcgattgtccgggtcaaattgagctgtacagccatctgccggtgatgtgtcaaattgtgcaggcgctgcgcgagtggaacttcaacgtgtgcagcacctttgtcatggacaccaccttctgcttggactcgaccaaattcatgtcagccactctcaccgcactgtcaacgaccgtttcgctgcaaacgccggcagtgaacgtgctcagcaaaatggacttactgaggccggaagaccgacggacagtcgaagaaattgtggac

SEQ ID NO: 48957 - DNA, 538 bp, Heterodera glycines
gtccaattaagttgtcagttttaatgtctaacataacacctgggaaacacaacacagactcagagaggagagggaggaggtgacctcagcgcagataaacttagggaaatcaactctctgattgcggcatttccgagttccattggacaaacgccgcctgattccgcgcttggcacagcactgaacaatatgatggtgcaatggaactcactgctctcgcaggtggtcacagaggttgaccacccacagccaatcctggagcacatcaaagaaacggcggaattctccgtcaaacagtttcgtgacgcatgcttgggtatgatcagcgaattgacacgcacttcggtcgattggcaactgaacttcccaaacgaaatggcagaacaggaaatttccgaatatgagaactcaatccgaagacaagaacaattgttgggtaaaatcagacagaaattggacgacgaaattttgtcgggagaaaattcgaattttgtaccttaatgtttggattatcacttggatgaatcgcttatcatta

SEQ ID NO: 48958 - DNA, 675 bp, Heterodera glycines
gtttgagataattattttttgctttttttgaaacttcgattgcattgattgtgaaccgtgtcccttaaattcctttcttcctcgacgtgtctcgcgcgagttcggctaaaaataccgaaaaagctgaatatcaaagagcaattcaaaacagtggcaaagacctttctgcacatcaattcgagtgaacgtttcttccatccgttcgtccgttttcaatgaatttccgtccctttgcctttctctccctccgcttttcctcctcctcttccgcctcttcttcgtcccttcttccctcttaccggaaggcaattgtccatccaattgttcgtgtcgaccacgcgggcgaattggcggctgacagaatttatgccggtcaactcgccgttcttccgaaaacccatcgtctcgttccgataattgaacaaatgcgacgcgaagaaagacatcatttggacgagatggagcgattgatagtcaaatacggagtgaggtcgactgcgttggctccgatttgttcggtggccggttttatgttgggtgttggcaccgctttgcttggcgaaaaggcagcgatggcatgcacaattgccgtgggaggaagtcattggccaacattacaatgaccagatcaaagaattgatggcggatgatgccaatgccaaccgcgaattaatg

SEQ ID NO: 48959 - DNA, 1193 bp, Heterodera glycines
aagagacacaaattgttgtgggagtggcctccgtgtgctcccttttggccattgtggccacgttggtcgttgtgccgtcattgtactcgcagatcaacgaaatcagtctgaaggtgcacgacggagtgcaggcattccgcgtgaacaccgactcggcatggaacgaactgatggaagtacaaattacggtcactcctccggcaaaaccccgcgagaatcctttcgtctccatcttccgctccaagcggcagctgcctggacattgtcaatgtgccggcgtccaacagccccaatgtccgcctggcccaccgggacccgcgggggcacccggacagcccggataccctggacaagccggagagccaggacagccgggaatgcctggacagcccggagcgccatgcccggatgttcctcacgtctgccagcattgcccagctgggccgcctggaaagcccggagatcaaggacctgccggccaagccggtcaacctggcaggccaggccagcctggacagagcggaggagtgggcccacccggacctcctggcccgcaaggacaagccggaagcccaggacgacctgggggatcgggacaaccaggacaacccggacaaaatggagttgtgtataagaccgttcctggaccgaagggacaacccggccaacctggagcaccgggacagcctggcgcacctggacgacctgggaagcctggagaccaaggacaacccggagccccggggcacccaggacagccaggccaacccggagcaccgggacagcctggtcatcctggcgctgctggagcacccggcaaagatgcctcgtactgcgcctgcccgccccggtcgggcggcggttatggcgtttccgggggaggcggaggcggtgccaaagtcgaacacgcgcccttgcccgctgaacaggcacctgtgccggaacaaccggcagaaagcgtcggcgtagcgcctgcaccggccgaagtggcgtcaaacgccgccggtggccaaggcgaagcagaagcggcgaaaggatacaggaagaaaatgtgaaagatcggataattattaatgcagaataaagtgattgttgatgagaggaagggacaaaccaaaattcattgaaattaaataattaataacattttaataaacaaaaacaaccggaaaaaaaaaaaaaaaaaaaaaaaa

SEQ ID NO: 48960 - DNA, 746 bp, Heterodera glycines
  unsure (1)..(746): unsure at all n locations
atggaatcttctaatgaggagcagcagcttcaggaaattgaggctttggagtcaatgtattccaacgaactgagggttttgtgccgggactttccgaatatcagtgtcgagttggatgtccgccccgatttggacgaattcactgaactcttcggcaagagtgtcatttctctgcgcgcaacttttccctcggactatccgaattgtttccctgtcatcgatttgccagattttgatggggatgacgatgaaaacacacttcagaagactcagttttgggacgaatgtgaacggagagtgaggtcggaattggacaaagtgatggaggattgtgtcggcatgccaatgcttttcacactgctcggcgctttgcaggaattctttgtccaaatggcagatgattaccttaaaaaccgtgatgaattggagaggataaaagcggataaaattgaacgcgaggagcgggccaaattcgaagggacacgagtgacggtcgaatcattcaaaaaatggaacgatgcctttttgaagtctgtcagagtgccacaggaaaaaacaaaagacaatcagacgacaaagagaatgaccggaaaacagctattcctttcggacaatcacttaacatttccgatttgcaatttattggaaatgccaaggacgaaaatgcagttgaaattgaccaatcactttttgagggcgacatcgattttgacgacgatgatgaggattacnagcccgaggctgat

SEQ ID NO: 48961 - DNA, 892 bp, Heterodera glycines
tgtttttattccatttgttgatctgtgtttattcattggtttcctatttatttcgcctttgattacggaatgcctgagaaaaaaccgacgaaatgcctttcaaagggcaaagaattgccttgcggacgtgagattattcaggattttgtaatgatgatgcccggctccatggacaaataccatcagttatgttccattctcagctcattcgaattgtggagtgaggaatcgcgcacttccttccttagccaatttttggattcctacgatattttggacgtgaattgttcagacttggtgcttaaattatgcaaaattcgttggcataccgttcctccccaaatgctttcgcaatttgctgactttttatgcgctttggccatcaaccatgtccaccatatcaattcagtgttcaattgcttcgtcgaccatttcttgccaattggcaatgcgaaagatccttcaaattttgaggcgcatcgtccgccagcggtggtggacgaccatttccaagagtcgctgtacgccttggccaacctttccatccaaaacgttgtttcctgcaaccctttgacgacgcctcttctgctcaaatgttttgtgaaacgctttccgcacatcaaacagccgtctccgaaactgctcgcctttatgcgaaatgtgctccgttttgccgattggattagggacgaggaaatctctgccgaaatttggtcgcttatcgtcgagaaactcctgcacatcgatgctttatgttttgagcgggaggaagaagaacaacggccgactcattccaatcgattgaaacagaaaaaattggacaacgaaaccgctagcgaagaaacaacaaatccgatgagggaaaaactgaacacattggtcgaattcattc

SEQ ID NO: 48962 - DNA, 776 bp, Heterodera glycines
gtccagttaagttccttcgccttgtgaatttttgctttgacttttttatggagagattgttcaataccccgatttcctccctttctacgaacacatcaaattgcacacgaaacaccatttgtcttggctttttggatgggtccatccaatgtttttcctttgacacacagcgagggatcactccatcgatggaaagttcggtaaaactcggtggaatgtggcgcaaacggatgaaacggtccgtcagggcaatgcaaatttctgaggatggcacttcgctttatgcgaccagttcgaacagggccgtctgtttgtatgacgttgagacggggaagagagtgcgctgtattcgcgaagggcacaaaagtcggcccagtgcgatggcactgctgccgggcgaaagacggcattttgcaacgggtgccgaaaacggcgaaataaaagcatgggactttggacagcccaagccgaacgtgcacacatttggcgagcaggcggacataatcaatgcgttgcacatttggcgcaataatttgctggccgcgagtggcgacggcactttggccgtttacgacacgcacaaaggcaaagtgcgaattcagtcggagacaatgcacagcgaattgctcagtttggcggtgactgaaagattcacttacgtcggagcggccgatggacacattgaagtgttcaggcatggccaatttgggaacatccgcgaacgtatggaaaccccctttctgatgggcgtcgagcaaatggtcgtcttgcgcaac

SEQ ID NO: 48963 - DNA, 899 bp, Heterodera glycines
aattaatccgcgcattgccattaaacaattttctcttttggattaaaataccgcaaattatgcgtttgttttgaatgaaaagtgcgtaaagaacatgcaatcacagcggggaagcagcagccggtcgaagacgacgacgacactatggaataatttatatttgaagcttaaaacactgcctaatcacataacataaaatgtgtaattaaggctaatggccgctcaattagcctcggctctatcctcgcccgactattacaattgccaaatgcagccgggattgacacggcgccaacgcgacatttgcgtccgacatccgtccgccatgcgatcaattagcgatggcctacgagcggcgattgacgaatgccacgcccaatttgaaagggaacgatggaattgctccgccacttttaacgtcggagtcccctcggaagaagattctacgcctgaaacagcttatgttttcgccatttcttcggccggtgcttcggccgccgtggcgagggcatgcgcccgaggggaaatccccgagtgtggctgtgggggaggggaacaaacggtgatcaattctccagacgttgaaggcctttccggagcggaccctcagcagttcatttgggccggttgttctgacaacattcgctttgggaatcaatttacgcgtaaatttattgacactgccgaaaaaaagcgaagcgatgcgcgctcattgatgaacctgcacaataatcgcgtgggacggctccttttggccacaaatatgcgcaaaaagtgcaaatgccacggcgtcagcggttcatgcgtgacaaaaacatgttggaaaacggtgccgacgatggaagaatttgcggcacttttgaaacagaaatacacaaatgccaaacaaatggcattgg

SEQ ID NO: 48964 - DNA, 807 bp, Heterodera glycines
ccgcccctccgtccgtccgtccatccgtcccccgttttaaccccttcctcccccctttctcgcccatcttttcatccaattctccgtcttccgcctgcccattcttctccagcaaattatccattttgacgctcaatgggtggggaagggagcggcagaagcggtggtgtatccccggaatgcctttacgctgtgctgggagtgcagaaaggcgcggacgaagcggagatcaaaaaggcgtatcgaaggttggcattaaaatggcacccggacaaaaacccggaacggaaggagaaggcggagaaaatgttcaagcgggttgcacaagcgtacgaagtgttatcagatgagaaacgtcgaacggactacaaccggcacggaatgtgccggccagcagaggcggcgttcgcctcggcacaccgacggcggacagcgccggccgattcccactacgcccaccaccagtcccaccctttccatgctcatttccgttcccctttcgatattttccgtgaatttttcggcgaccctttgtcatcgtccgactttcatcgttcgccgtttttcgcttttcccgccaacggcggaatgaaacagaggagacggcatacgacaaatctattcggagacggggcatttggagcgcattttgcgggaaaagacgagaacaattgcgaattctccacggtgattcggttcagcacgagctcaaaggacccgggaaaaaagatcaaaaagacaatcacacaaactagacttgtaaatgggaagaaaattgtgacaaaaaaggtggaggacaacggacaa

SEQ ID NO: 48965 - DNA, 490 bp, Heterodera glycines
ttgagctttatttacatttcacttttgtcaattcgtccgtttattcaatggccaagcatcatcccgacctcatcttttgtcgcaaacagcccggcgttgcgatcggacgcctctgtgacaaatgcgacgggcggtgcgtcgtctgcgattcgtacgtgcgcccgtgcactctcgtccgcatttgcgacgagtgcaactacggaagctatcagggtcgctgcgtaatttgcggtgggccaggcacaagcgacgcgtactattgcaaagagtgcaccattatggagaaggacagggacgggtgtccgaagattgtgaacctgggcagtgcgaagacggaccttttctacgaacggaagaaatacgcgttcaaaaagacgtgatcatagccgggggttggactgtcagggtttttgtctgttttttccgaccgttcgacctccgtttaatttaccatcgtttctttttataaaataaaaccgcgttctccaaa

SEQ ID NO: 48966 - DNA, 491 bp, Heterodera glycines
atatttttaagcgttttttaagccaaaatgtcaaacgagttttattattcgaacaaatacgaagacgacgaatacgagtatcgacatgtccacgtcaccaaggaggtcgccaagcaggtgcctcacaatcggctcatgtccgagtctgagtggcgaagccttggcatccaacagagtccgggatgggttcactatttgatttggccagctgagcgtcacattttgctctttcgccgtcccaagccgaaggtgaacggcgctcagaagacgatgatgaagacgactgccaatccgagtcaagtccgagttggctgattttgggatgccgatcgatcgagagcagatgaaaaagtaccgcaatcaattccaatactcccactcatcacaccattcctacgtatcgccgtcgacagtctttctatccgatcaaacaccaaccaatgtgctcttaattacctgctgctgacttaaaataaattattttgctaaac

SEQ ID NO: 48967 - DNA, 910 bp, Heterodera glycines
cacattctcttctcgccaaagccttctccgcatttgttaagccgccgttctcctcaacaaataacacacaaccatcatgtcggaaaagaaggtcaaaaaggtgaagaagaagtccaggaccggctccgaggcgagctccttcgaccagaagaccatccaggagttcaaagaagcatttggcattatggaccaggacaaagacggagtgatcagcaagcaggacctgaaggacttgtacgccacactcggagttgtggcgagcgactcgcagatggacaacatgctcaaggaggcaccggggccaatcaatttcaccgttttcctgacactgttcggagaacgactgactggcactgaccccgaggcgacaattatcggcgcctttcaaatgttcgacaaaactgactgtggcgaaatcacagaagagacattgatgaaaattctgaagaacaaacggggggagccattgacggaggacgaagtgcaagggatgtacaaagggaaccctccaattagtggaggcaaagtggactacaaggcattcgcgcatttgatcacgacaggcgcagcggaggagttggccaaagtgggctaagcggggccatggacggacgggggaggaaggagtggcggggccgaggccaacgagtgacctgccgattcgggggaaaaccgatcatccatcccgtcgttctttccatccttacgatcgatcacccttttccccctcgcccattgtatctccttttgttctctttctaatcgctccctctccaaaatgtgtgtcccggctggcgagaatggcagcaccttctaattctataaaatgcatcgtttgttttcgcttcactcagtgcacttccaaataaaatcgaatggatgggtaaaaaaaaaaaaaaaaaaaaaaaaa

SEQ ID NO: 48968 - DNA, 322 bp, Heterodera glycines
cctcgtgccgaattcggcacgagggtttgagtgaatagctttgctttatctaattttgcgtaaagatggacaagccaatcaaactcgcgaaagtcacgcgtatccttggacgtactggtagccaaggccagtgcacgcaagttcgtgttgagtttttggatgacacaaatcgttcgatcattagaaatgtgaagggccctgttcgggagggcgacattcttaccttgcttgaagctgagcgtgaagcacgtcgcctccgataaatcaacactaccattttgttgcgtatttctgaattgttgataaagaatgttgttaaaaa

SEQ ID NO: 48969 - DNA, 763 bp, Heterodera glycines
cctacttctgatcaatcccgttatcctctcccaattttgtctgcaaaatgtcggacgactatcgcagttcgattggcccacggcctgcgttcaaccgcaactcaacagcctattcaagtacgggcggacctgtctcgggcggcaaccgcgtgctgaaaattgtcacggagacaatgtcatcgagcaccagcggcggcggcggtggcatgtcaccgtttggcgccaacgcggctcaaatccgtgactcccgtgatcgcgagaagaaggagctgagtgatttgaacaatcgattagccaattacattcaaaaggtccgcttcctcgaggcccacaaccgcaagttgaaggcggacctggacatgctgcaaggacgccgcggcaaggacaccatcaccatcaagacgatgtacgagagcgagattcagacggccaaaaagctgatcgaagacacgggccgatcaaagcacgagttggagcaggacgtggccaaactgcaacgtgacttggacgtagcagcgccgcaaatacgaggaagctgttcgctcacgggccggtgaccgtgaaaagttggacgatttgctggtccaattgagcaatttggaggccgaaatcagcctgttgaagcgtcgcattgccctgctggaggaggagctgagcaaactgcgcaaggagaactcacgactgcaggccgacctgcagcgcgtgcgtgccgagttggatcaggagacgctgaaccgcattgactaccaaaaccaagtgcaga

SEQ ID NO: 48970 - DNA, 1023 bp, Heterodera glycines
gtcacattttatggcgttaaataattgttttactgagaatagatatccaaatgaatgcattctttcctatggctcgatcgctgtttcggatccgctcgatgcgttcgtttgttgtcgtttttccatccatgaacaccaggagaacatctgcgcatttggcacagaatatggcagagtagtgatttgcgatgtgacagctccgattaagggcgaggattttatcaaacatcgatttgccactggaaaaaatgctgtgttcgacttatgtttcattcctgatcgccctaatttattactttctctttgtggtgcctcaaacctagagcttttggacatcgaacggtcgtcgtccatttttttgcttggtcatcgtgacacggtccgatgtgcttccgtgtggcctgaaaatcccttttgcgttttgactggttcaagggacggtgacattttgctttgggatttgcgtgaaaaaccattgaaaagagaaattggtcggaaaagtgtgtcaaattctgtttcttctcttcgacgatatcaaactgctcatgaggcaaccattgcaataacaggccttttgcacatgagcgagaattatttcatctcttcttcatcgtcatcttcaagtggtattagaatttgggatttgcgatatcaaatcgcttcttcgccaatccgctctcttttcgttccccagaagatgagcaaagaatcgggcgttgcctcaatgtgttgggaccgattccgttcttccttttttgcactttgcactgacaatgccatttacgaatatgtcccctctcttaacagttcatttccagtgcgaagtttgcggacaaattttgtcaattcattttttgtacaatgcgctgcttcacctttctctgaccatcttttatgtggctcctctttttcaaaggcttttatttgggatttacagttttaggaggatcgcaaatattttcacgacatttcgtctcattatggaaaaaatcatgcacataaaaggaataaaaaaatgttacc

SEQ ID NO: 48971 - DNA, 520 bp, Heterodera glycines
ccttgttgtagtcgaaactccactcttccccacccacccacttttctcaccatgtcgtacggcgattaccagcagcgcccccgtggctgcttcaactgcggctctgccgaccaccaggcccgcgactgcgaccaaggcgtcaagtgctacaactgcggcggcaccggccacacctcgcgcgactgctccgagccccgcaaggccaagacctgcaacaactgcaaccaggagggtcacattgcccgcgactgccccgatgcgccggcccagtctgcccgctcgtgctacaagtgcggtgaggtcggccacatttcccgcgactgcacccaaggccgtttcgccggcggtgaccgcatggccggtcgcaactgctacaagtgcggcgaggccggtcacatctcgcgtgagtgcccgcaaaacgctggtggcgactcgtcgtggggtggcaactcgggcggctcggcgcgcgcctgctacaagtgcggccaagagggccacatctcccgcgactgccccccag

SEQ ID NO: 48972 - DNA, 640 bp, Heterodera glycines
aaatatggttttcgacccgaaatcgaaagacaaggcgcgggaacttggttcctaccgcgatatgcggttcgaggggtcgttgcccgaacaagaacgtcggcttgcacagtccaccactctctacattggtaatttgtcttactttacttctgaagaacaggtatgggagctgttccgccgcgctggagacgttcgtcgggtgattatgggcctggaccgttttaacaaaacgccatgcggtttctgttttgtcgagtattatacacgtgaagatgcagaaaatgcactgagatacataagcgggactcgccttgacgacagagttgtcagatgcgattgggacgcgggttttaaggaaggtcgccagttcggtcgtggtaaacatggcggacaagtcagggacgagtatcggcagaattttgattcgggaagaggcggatggaacaaaacaattcaaaaacgaaatgaccaattcacccagcgaaatatcaaagcctgacattcgacttcgttggacaaaattcaatttaaaatctcattgcttattattattgaccgttgttttgttatccatttaaaatttgctcttatactttcatttcattacatttttggtgtatcagtgaacgcattcattcat

SEQ ID NO: 48973 - DNA, 924 bp, Heterodera glycines
ggatggccgaaccctcgcggactacaacatccagaaggagtctactctccatcttgtcctgcgtcttcgtggaggaatgcaaatctttgtcaagaccctcaccggcaagacgatcaccctcgaagttgaggcgagcgacaccatcgagaatgtgaaggcgaagatccaggacaaggagggcatcccaccggaccaacagcgtctcatcttcgctggaaagcagctggaggatggccgaaccctcgcggactacaacatccagaaggagtctactctccatcttgtcctgcgtcttcgtggaggaatgcaaatctttgtcaagaccctcaccggcaagacgatcaccctcgaagttgaggcgagcgacaccatcgagaatgtgaaggcgaagatccaggacaaggagggcatcccaccggaccaacagcgtctcatcttcgctggaaagcagctggaggacggccgaaccctcgcggactacaacatccagaaggagtctactctccatcttgtcctgcgtcttcgtggaggaaagaacatctttgtgaagactctcaccggcaagacgatcaccctcgaagttgaggcgagcgacaccatcgaaaatgtgaaggcgaagatccacgacaaggagggcatcccaccggaccaacagcgtcccatcttcgctggaaagcagctggaggatggccgaaccctcgcggactacaacatccagaaggagtctactctccatcttgtcctgcgtcttcctggaggaatgcacatctttgtgaagagtctcaccggaaagacgatcaccctcgaagttgaggcgagcgacaccatctagaatgtgaaggctaagatccaggacaaggagggcatcccaccggaccaacagcgtctcatcttctctggagagcagctggaggacggccgaac

SEQ ID NO: 48974 - DNA, 777 bp, Heterodera glycines
cctcgtgccgaattcggcacgaggtaaaatcactgtttgactcgcattttaattcgctgccaaatagcaaattcaagtgcatgatttcaagaatggcctcctcttcgtgttcctcgccgtcttcctcctccaaatttggaccacaaatgaaatgttcaacgccaaaacccgtgccaatggatgatgacggcacggaggagggcgaccacggcgaacagttgctgttggaccggcacgagttgcgcattctgtgcgacgagcatttgcagagcggtgactgtcagacggccgcattttgggccgaaaaattgttggcattgagcatcgggaggacactgaacgaacggttgccggacattgcgcattatttgtcggtgcttacggcggcccaattttggcagacaatcatcacattaattgaacggcatgacctgttccccaagcatttggtgttcgcctttttccacatcaatgcgctgttccatcgcgagttgtactcggaaatcattgcactgcccgtcggctatttgtgccattgggacgacgtgccgttcattcagccggacagtgccacgtacatttgtgccgaaaatgacgcggtccgtgagcccggcattcgccaacagttggacacattgttacgtgaaaagaaatacgaaagtcgaatgctgttgctgctggccaaaacgtatttgatggtgcagaacaggccggccgccgccggctgtttaaagcattgtctgacggcgaatcccttctgttccgaggccatccatt

SEQ ID NO: 48975 - DNA, 1080 bp, Heterodera glycines
gccatcgtcgccattctttcgtatggtggctataaccaggaggactccgtgattatgaatcaggctgggattgatcgtggtctgttccgttcggtgttttaccggtcatatcgtgattcggaacaagagattgacaatgtgaacgagcaactgattgagaagccgacgcgcgacaaatgcaaagggatgcgaaacgccatttatgagaaattggacgatgacggcatcacttcgccaggcactcgagtgtcaggtgacgatgtgatcattggaaaaacaattgctttgccggaggtggaggacgagttggaagccagcacagcgcgctactctaagaaggatgcgtcgacaacacttcgaagcagtgagacaggcattgttgaccaggtgatggtcagtgtcaacgcggagggcaacaaattcgtcaaaattcgcgtccgttcaattcgaacacctcaaatcggggacaaatttgcttcacgtcatggtcaaaagggaacaatgggaatgatgtacagacaagaggatatgcctttcacatgcgagggcataacgccggacattatcattaatccacacgctgtgccgagtcgtatgacaattggacatttgattgaatgcctccaaggaaagctttctgcaaacaaaggcgaaattggcgacgccacccctttcaacgacacagtcaatgtgcagaaaataagtgctttgcttgagggctacggctaccaattgcgtggcaatgaaataatgtacaacggatttaccgggcaaaagttgagcacacaggtgtttctgggcccaacttactaccaacggcttaagcacatggtcgaggacaaaattcactcacgcgcccgagggcctgttcaggggatgaaccgacagccaatggaaggcagggcacgtgacggtggactgcgatttggtgaaatggaaagagattgtcaaatttcacacggcgctgctcaatttttacgggagagactttttgaggtgtccgatccatacacagtttatgtgtgcaatcaatgcggattggtggtgattttcaatcaacggactaacactttcgagtgc

SEQ ID NO: 48976 - DNA, 1129 bp, Heterodera glycines
atttattttagttttccaaaataatttaaattttctttattttaataaaataacaactaaaatatggataaaaatataggaaataaaaacaacaatgaatttttattgcttggaatgggaaatccattgttggacctgcaggtcgcaactttggacacacaaattcatgcaaagtatggacttgcagaggacggcgcggacctaatcaatagtgaaaatagtgcctcacttttgccaatttttgacgatatttccactcttggcaataagattgaatttgtacccggtggttcagcacaaaacacggtccgagtttgtcaatggatggtcaaagcattcggcgtaaacctcaagtcctgctacttttttggtgccgttggcaaggacaaatatggtcaaattttgcacgagaaggcccaggctgcaaacatcgaagtgcgttaccaggaagtgccaaccgaaaagacgggtacctgcgcggttttggtgttcggcaataagaggtctttggttgctcatcttggcgccgctgaacatttcacccctgtccatcttaacattgaggccaaccaatcactgattgaaaagattagcaatttttacgtcgagggatactttctaaccgtctctttggaatcgattctttttctggcaacgcatgtcatctcttccactcggcccaaacatttcgctctcaatttgagtgccgaatacatttgtcagttttttttccgaccgacttgaaaaagtgctcccctatgttgacattttgtttggcaataaacaagaagcattggcttacgcaaaaactcgagaaatcggaaaaacgtgacgttggggacatcgcattgtatttgagtgaaaaggagaaagtgaacggtgagaagaaaacggatagtcgtgataacacagggccctttgccggttttggtggcccatgactgcgaactcactcagtttccagtggagccaatttcggaggacaaaattgtggacaccaatggggcgggcgatgcattttgtggaggctttttggctgcattttccaccggccgctctttggatctttgcgtccgtgctggtaattttgctgctcgtacaattattcaacaaattggctgcacttttc

SEQ ID NO: 48977 - DNA, 615 bp, Heterodera glycines
gtccaattaagatttattgtaattttgccacgcatttaaagtaggctgaaccaccgaatcatcccatccctcctaaaaaaatttggacgcaaaatttttaaatggccgaatccggtgaacatgaccatgactttacatctggcgagtcgggtgcagctgccacttacccaaagcaatgctctgccttgcgcaagaatgagttcgtcatgatcaaaggccgtccttgcaaagttgtcgagatgagcacctcgaagaccgggaagcacggccatgccaaggtgcacctggttgcgttggacattttcaccaacaaaaagttggaagacatttgcccgtccacccacaacatggaagtgccagtggtcaagcgcaaggagtaccagctgctctcaaccaacgaggacgggttcatttcgctgatggatttggagacttgcgacaccaaggacgacctgcgtctgccggaaggcgaaattggtgaccaaatcaaacaggcctacgaaaaggacgataacggcattcttgtgtcggtggtgactgcgtgcggtgaggaggccatcctcggctggaagttcatgccaaacaaatagttggaggacgacgacggcgatgacg

SEQ ID NO: 48978 - DNA, 641 bp, Heterodera glycines
tgctcatttgtcagcccatcccaaaaactgataaaaaaaatggcgttcctctcccgtctctccatccttccaaattcgccaatttcgctgcttgcagtttctttggccgttttggctttcgtcgctttggcatcggccaatccgccgacggcacgcgaaacggcgccaaatgcacagcaaaacaatgccaattcagtggcaactggggaaattgcgaaaaatattgcggaaaagatggagcggatgaatgagttcattaaggcgaagaagttcatcgatgcacataatttggcatttgagaagggcgaagtgtcgttcaaagttgcgccaaaccatctgatgcattttacacctgcccaatataatcgaattcgcggcttgcaaatgcgcagcaaccgacaacggcacaacatggcaactctggcgggaaacagcagtactttgccggaaaagttggactggcgcgagaaaggggcggtgaccgaggtcaaagatcagggggactgcggctcgtgttgggcattcagtgccaccggtgccattgagggagcattggcacagaaaaaagcgtcaaaaattatttcattgtccgaacaaaacctgatcgactgttcgtccaagtacggtaacgagggctgtga

SEQ ID NO: 48979 - DNA, 507 bp, Heterodera glycines
cactgtttgagttggattctgtccatttcgctgtgtcttcctcagaaattttgttgcatttgtgcaagacggaaatttgcaagtcggccaatgtggagaatgaggaccgaatgcgccgcctcatttcgcatttgttccgtgctcgctccctttacccgctgtgcccgtgtgaccaaaatttgccatttgcgccctctgcgagtgccaatgccaaactgcgcctgcccaggaagccacacgtgatggttctgccttcgctgcttcagccagtcacaaaggtggtggatgactgcgtggtgctcaatccgggccgcttcgacagagggaagggcaccggcacattttccgttctcgacttggacctttcgagtgccattggcgccacttcggtctcaccgttttgcgaagtctcactcttttcaacccaacaacaacaatgacaaaaatcacatttttgagtgtcgcaattgcccattttaacatttttgacaaaataaattttcggat

SEQ ID NO: 48980 - DNA, 656 bp, Heterodera glycines
gtttgagcatattataaaatcgtgccaacaatttgagggatgtccggtgacaattcggcactcattgcagcggagcaagcggcgtatggcccattttttggctcacttggcgtcactgcggcgatgattttcaccgcggccgggtcggcctacggcacggcaaaatccgggactggcattgcttgtatggctgtagcaaggcctgacctcgtgatgaaggcgatcattcccgtggtcatggccggcattgtggccatctacgggctggtggtggcggtgatcatttccggccggctggaggcggccgggcccggctacaccatcgaccgcgggttcagccagttcgctgcaggcctcgtgtgcggtctatgcgggttgggcgccggctatgccatcggcgtggtgggcgacgcgggcgtgcgcggcctgtcgcagcagccgcgcctgtttgtcggcatgattctgatgctgatcttctcggaggtgctcggtctctacggaatgattgtctcactgctgctaagttcctcctgaacaatggaaggaagaaagaaggaaagaatggcacgtctgctgaacattgtgccgaccgtcgtgttgtgatgatcaaaatgaccagccaccgtatataatagataaataccgtattttccatc

SEQ ID NO: 48981 - DNA, 1429 bp, Heterodera glycines
gtaaaccttttttttcttttccatggacatcgaaactgatgcaaatgcagttacacttgccttttaacatttgttagcattcattctcattttgctgttgttcttttggatgtttccgtttcgcccaataagaaaagtcccgtggtaccggcgcaaagttcctgatcggataagcttagttgcagaagaaacaattagccctgccgatgagaaattggttgggtggcgtttacatgactattacgaaattcaagagctcgtgaatatattgccgacgataaaggaaaagatcgattttgtgaacccctacgagaggccgtggaaacagtcggagctacgttggcacagaccatggatggcacctttatctaagcctcgctcggcatgggtcgtcccaccaactccagcttattttgatgtgctcgacttttccaaatatatcaccaagacacggttggccaccgatgaggaagccgaatgggaatttgacgcatattacaaaggcataaatttgccaacagccaaatttgaggaacgtgttgccgaaagtctggcacttcatttggaaagagaagaaatgtctaaaagagagaatcaccccgaaaaggaaagggaagaaaaccgcgccaaatttctccgctcgctcatcgatgatgcccatttaattttggcacatggaaacccaaaaatcatcgaccatcgcatttcacattctgaccgttgcgagtccttttggataagggccggttttctccctctgtacgagagtttgcccgtttgggaaatggaaaaagtgccgtccattcgaaaagtgaagttcaccggcgatgacagacgccgtcttggcgaactttcctttacaatgcgcgacaaacatacgatgcaagtgcggacgaaaagcccaatgaaaaggctcttcgattgggatgaacctgacaaactcgaggcaccagtgtttccgccgtcttttgacgttgcggatgaattgataatgtcacccatggtttataatcttctcgccgacacagagccattgtggcaatgcccaggctacgaatatgactcgggtgaaacgcataagtacggtcggttggctatcaaggacattactccgctgatcactcgtctggacactcattggcgttgcgacacggaacatgagcgaaaggaagtgctcagagaatgtttggccgcaacggcggtcgtatctctcttcaattggttgaatggacaagcgcattgtcttggacacactcaatacacagaaattgtcgccccgttgagttcccaattgatactttctgacggcttgcaattgttttatttcgctctcggtcaactcaacactctcgcaattaacattgatgttgaaggcttcaataatcagcggtccaatttttgttgtgttaatggacccttcaaactgtac

SEQ ID NO: 48982 - DNA, 716 bp, Heterodera glycines
  unsure (1)..(716): unsure at all n locations
gtgctttttaagaaatataatgccaattcaagagataaacaattaggtatttgctttgggaaattcacatatttgatttgttggttaccaatgactgctccttgcattgatgttggcaatcttttactcattgatgttgagacggacgccgaagatttggccagtagcaactcagaacggattaacgaacttacaagcaaaaatgcccagcttttgttcaatgaaatatggaaattacccagaaaaattgtgcaagatgcgacttgttctcagcttcccgaatacacttatggccttcctcgtgaaaaacccattccaaaaccgaaagaaccaacgaaatgggagaagttcgcgagggctaaagggataacaaagaagaaagacaggaaagtctgggacaaaacgactcaggaatggaagccgaaatacggatacagacgagccgagaaccaatcgaaggaatggctcattgaaattcccgaccaaaaagacccatacaaagattattttgctgagaagacggaggaaaagcgggaaaagaataacaagcaggagttgcaacggctgaagaacatttcccgcgcctctaacaaatacaaagttccaactgggaacagaaaggtgttcaaagattgatcaaatcaaatctgtcaattgttttatgtttttgttgttttcataaacaattttaatcnnaaaaaaaaaaaaaaaaaaaa

SEQ ID NO: 48983 - DNA, 644 bp, Heterodera glycines
  unsure (1)..(644): unsure at all n locations
cacagagggtttgagatcactcgatttctctgctttttgtccattagactttatttaattccttccattctaaacagcgaattgcttttacgccaccataaaatatgggtttggccatttccggtctgttcagtcgacttttcggcaaaaaggaagtgcgcattttgatggttgggctggacgcggcgggaaagaccaccattctgtacaagctgaagttgggcgaaattgtcaccaccattccaacaattggcttcaacgtggaaactgtcgaatacaaaaacatttcattcaccgtctgggacgttggtggacaagacaaaattcgaccgttatggcgatactatttccaaaatacgcaaggactgatttttgtcgtggacagcaacgaccgcgagcgtgtgggcgaggcgcgtgaggaactgatgcgaatgctggcggaagacgaactgcgcgacgcggtgctgttgatttttgcgaacaaacaggatttgccaaatgctatgaacgccgcagaaatgacggacaaactcggactgcacaatcttcggaaccgcaactggtacatccaggccacctgtgccacgtcnggcgacggactttacgaangcttggactggctgagcaatcagctgaagaacaga

SEQ ID NO: 48984 - DNA, 635 bp, Heterodera glycines
gttttggcttctgtataaatgaatggaggtggcagcaacaacagttttctctgtgtaatttttgactgtaatgcgtacaattggggctgtgtggtcgctgaacgcggtgtgtctacgcttaacgaaactgtctccgcactaattgctctttgcaatgcgcacaatttctcctcgctcggaaatcgtcttttgctactcgcaaaaggagccaaacaacaagaaaagaaattgttcaccaacgaacgaattactgcgaaagaattgacaaattttgggccggccattgaaggaattattcatcaaattttggctaagaatgtttctgctgaagaaagccctttcaatttgtccagtgcattgtctttgagtatttgcgcattccaaaggttcaagaagcaatttccctcttcatttgggcatgttgtcttcataaacctttcggaacaatttacttctgagcaaaatgccctgctgaatttgtttttcgcctctcgtcagtactctctgcactttcatgtggcctcttttcacaaaactgtgccaatcctgcagcaggcttcggacattaccggtggttcctacatgtacattgacaacaccaagcttttggcccacaaactgctgtgtcactgcat

SEQ ID NO: 48985 - DNA, 826 bp, Heterodera glycines
gtccaattaagatatcctttctatttgacaaatgtcccgttttgtgtgtgctatttctggaaatgagcccgaggtggctgtggcatcgcccgtctccggagaagtctttgagaaacggctgctcatcaagtacattgaagagaacggcaccgatccgatcaccggccacaaacttgacacttccaacttggtcgagctgaagcaggacccgggcattcgttctatgcaaaagtcattggccaccgcctcgttgccttcgttgcttaagcaattgcaagacgaatgggacgccaccatgctgaacaacttcacgctcagacaggagttgaaggcagcccgcgaggagttgacccacgcgctttaccagaatgacgcggcatgccgtgtgatcaaccgtctgagcagtgagctgcagtccgcgcgtcaaatcatcgcgacactgccgcacggacgacgcgctgccgcggagagtgagacggaggcgaccgatgttgagatgcgtccggaggaagcggaggagggcgctggtgcggacggtctgccgggcatcagcgaagagttggtcaattttttcaccgacaaatgccaagacttttccaccgcgcgtaagcagcgtggccgaaatttgcccgaggggttggcatcagtggaacaaattcaaaagtatgaggaggttgcgtgccacgatgcgctgcacagtgccagcgtgcccggcatcaccgcgttggatttgcagaaaaatttcatcgcaaccggcggaatggacaagaccatcgtgctgttcgactcggagacggagaacatcaagaacacgttcaaggggcac

SEQ ID NO: 48986 - DNA, 575 bp, Heterodera glycines
taataaaccaatctacggtatataattcaacatgtcgtctggtgtaatggtgaattccgaatgtcaaaacgctttccaacaactttcggaagggaaacgctatcgttacatcatctacaaaatagtggacaaggaagtgattgttgaggtggcagtttcttcggaagacattggctccactggaactgaaagttatgatgacaattcgaaggccgcgtatgaaacatttgtgaaagacctcaaggagcgaactgagggttttgtggactgtcgctacgcagtgttcgacttcaaattccagacacagcgccccggcgcaggcacttccaagatggataagattgtcttcattcagctttgcccggacggtgcgtcaatcaaaaagaaaatgctttatgcttcatctgcgtcggccatcaaggcgtctctcggaaccgctaaaattctgcaatttcaggtgtctgatgagtcggaaattgcccacaaggaattgctgagcaagctgaacgacaaataccgcgacaattgaatgattggttgggatatgatgtcctgcacattcctctcaatttttg

SEQ ID NO: 48987 - DNA, 885 bp, Heterodera glycines
ccaagtttgagcatttgtgttccgtttagcagaactatgatatttttgacttcgttttccaaacatccgttgtccgctgcctttcggttcttttcttctgttaacgaagtgaccctccaaacgcgtccctacaaactgttcaaactcgattcgggtccttcgacggaggtgcgactgacgcgggatgaggcgttggattattacagaaaaatgcaattggtccgacggatggagacatcggccaataatttgtacaaggaaaagcgtattcgcggcttctgccacctttactccggacaagaggcgtgtgccattgggatggtggcagcgactgacccgaaggatgccgtgatcacggcttaccgatgtcacggatggacatatttaatgggcgcgacggtccaggacattttggccgaactgacaggacgcattgctgggaatgtttacggaaaaggcggatccatgcatatgtacgccaagaacttcttcggtggaaacggaatcgtcggcgcacaagttccgattggggcgggcattgcttttgccatgaaatatcgccgccagaaaaacgtttgtttgacactttacggagatggggcggccaaccagggacagctgttcgaagcgacgaacatggccaaactgtggggattgccgtgcattttcgtttgcgagaataacggattcggaatgggcactcccgtggaccgtgcctccgcctcgaccgattattacacgcggggtgactatgtgcctggcatttgggtcgatgggatggatgttctgaccgtccgcgaggccactcgctgggccaaggagtactgtgacgcgggcaatggcccactgatgatggaattggccccttaccggtactacggccaa

SEQ ID NO: 48988 - DNA, 574 bp, Heterodera glycines
ccccgagaacctcctctagaagcgctggggcaccgagaagaacgccaccgctgccctcgaggccgccaagggtcgccgtgccgccagcaaggtcaagcgcgtcgtcatcttcaagcgcgccgagcagtacgtcaaggagtaccgcaaggctgagcgcgaggagatccgcctcaagcgtgttgcccgccaggccaacaacttccacgtgcccgctgagcccaagctcgcctttgtgatccgcattaagggtatcaacaagattgcccccaagccccgcaaggtgctccagctcctccgcttgtaccagatcaacaacggtgtcttccttcacctcaacaaggccaccttggagatgctcaagctcgtcgagccctacgttgcctacggtacccccaacctcaagaccgtgcgcgaactcatctacaagcgcggttaccggaagggccacggccagcgcattgccctctctgacaacgctgttgttgagaagtcgcgcaggcaaggcggaccttatctgcgttggaagattttattcgacgagatctacactgtcgggcccaaccttcagaaaggg

SEQ ID NO: 48989 - DNA, 596 bp, Heterodera glycines
  unsure (1)..(596): unsure at all n locations
ctttgttcatttattttgtttgaatgcgattctatgtcaaaaacatcgaagaaaaattttgtgacaaagcaactcgttaaagaaattgttattccagctgacaatgaatttgttgggaaaattttagcttcacgaggcaacaacctccacgaagttgaaaccgatgaaggggaaaacttccttgtgagtatgcccacaagatttcgaaagaaattatgggttcgtcgcggcacttatgtgattttacagtcaattgaagaaggagacaaagtgcgagctgaaattgttcatgttttggacccggaaaacattgcgtttttgatggaaaaagaagtttggccggagagatttattgtagaagctgcgcaattgaccaagcgagggcagcgaactgaagaaaatgacgattcggacctattccccgcaacttcggaatctgaaaattcggctgaagagagttcttccctcgtttctgaagatgtagctttgaatggacagacaaatgccattgatgaaacaacgatttaaaagaaatttaattttgttgcaaagaatttttaaataaattttttaacnaaaaaaaaaaaaaaaaaaaa

SEQ ID NO: 48990 - DNA, 464 bp, Heterodera glycines
  unsure (1)..(464): unsure at all n locations
ttgagacattgcagcattttctctgatggacgaagaggcgaagcaggaaaacctggcgaaagagcttctaaagctcacttcttctctcaagcaaaattttacgactgccggttcggtgctaaaggaagacaatgcgacattggatgttatgcaaagggtcgccctgtccaacaaagaaaatctgataagggagaggggccgacttggccaccacgcctaccaatcgtgcttcaactgtgtgatggtcatgacagtgattgtggtcatttggtcgttcattgcgatgattattatgatgcgaatgttccccaaaatttaagtgttttatattttccttggataactcaaaacgggcccaaaccaacaaaataagaacgattcacttctgtgattgcttctgagctgtgttattctgttttgtttatttatttttcgtcatttaaatttgtttttctttnnaaaaa

SEQ ID NO: 48991 - DNA, 645 bp, Heterodera glycines
tgtgcatttggacaatgagcgggtattgaaagcactgtaccatcttttacaaggcttttcagccagtccaccgaacattttcgtattttgtggcccttttctcggcattcaacgggcgcacagttacatggagcaggcggccaacgcgttcaggcattttgcaaacattttgtccgaattttcgcacgcttaccacgccaccgaattcatttttgtgccaagtgctgacgatgcgcctccgttgcaaatttttcccaggcccactttgttgcagttgatacaaaaatgctttaaggaggctaaaaatatgcattttgccaccaacccatgcaaattggtcttcaaggaccggcacattgtcatctttcgtgacgatgtggtggagaaggtgtgccgttcagcagttttcatgccaaaaaacgcgatggccagccgaataccaaaattgttctgtgacacaatttgggcccaacgccatttctcgccgttgccactgttcatcaacccaattcaaccccattttgacccactgtttcaactgttcccgtcacctgatgctcttgtgatcgctgatcgtttcaaagccttttttgagccagcggacgaacggcgacgactgacaatgaacccgggccccttttcact

SEQ ID NO: 48992 - DNA, 651 bp, Heterodera glycines
gattgccaagctgtcgtttttgccggaggtcgtggaagtcgaatgccgtctttgaccaatcaaatgccgaaggcgttgttgcccatggccaatatgccactttattggttttcgcttaatttacttcgactgaatcgcgtcagagattgccttttgattgttcccctggggcaaaaattgcaaattgaaaatgcgctgaaaacggacggcggtggacgatggccaacacttaagggaatggacatcgaagtggtggccattgacagtttggaggaggacgtggatgactggggaacagcggacgtactcaaaagactgctcgggaaattgaagagtgatcacattttgttgattagcggtgacttggtcagtgatgtccggctgcgtgacatgttcaagcagtacatggagaacaacgctgtcctgtcctgtctgctcaccgattcggctttgggtgggcctatccccgggcctaaagatcgcgttaaaaagtacagagattttgtcattttgggtccgaacggacaattgctctttttggtggacgaagacgattttgcggaggaggaaggaatcccaatttcattgtttgacagatgccccaaggcaaaagcaaccgcaaaatataaggacgtgcatttgtacctcgtc

SEQ ID NO: 48993 - DNA, 572 bp, Heterodera glycines
caagtttgagcatttttatataaacaaaataaatatgagcgcggagcggaaaaagtccgtcttatttttgttcgatgtggacggaacattgacggcgtcacgacagtcaattacgccgtcaatgctcgcctttatgcactcggtgaagagccgtgtgcctgttgctgtggtgggcggttcggacctggccaaaatttttgaacagctcggcggcacgcaacaacgcgaccaatgcttggccctgttcgattttgtttttgccgaaaatggtctcaccggattcaaaggcactgagccgatgccatcggagtcaatcagcaaacaattgggagaggcaaaatgccaagaactgaccaatttctgcctaaggtacatgtccaacattgagttgccattgaagcgcggaaattttgttgaacatcgcaatggaatgatcaacgtgtcgccgattgggcgcagctgttcccagtcggaacgtgaccaattcgtgcagtttgaacgcacgacgcccattcgcgcccaatttgtcgaggcattgcgccaacgattcccaattgaacagtacggactgg

SEQ ID NO: 48994 - DNA, 843 bp, Heterodera glycines
  unsure (1)..(843): unsure at all n locations
cctcgtgccgaattcggcacgaggcaagtttgagggtatccaattttttgcattgttttgcaactgatacaacatgatcatctacaaggacgcgttcacagacgatgagctcgcctctgactcgttcccgatgaagttggtcgacgacctgatctacgagttcaagggtcgccatgtcgtgcgaaaggagggcgaaattacgatgagcggggcaaatccgtcagcggaggaaattgacgagggcactgaagaggcggtggaacgcggcattgactttgtgctcaaccatcgactacaggagatgaattgttacgagaaccaggcaacatttaaaggctacgtcaaggacttcatgaaaaagatcattgagtacatggagaaggagcagaagtcggctgacgaaattgctgcgttcaagaagaagatccaggcctgggttgtctcattgctggccaaggaccgtttcaagaatctcgcattctttatcggcgaaaacatggccgagggcaagggcgaaggacaggtggccattgttgagtaccgtcaggagaatggtgaggaagtgcccactctgatgctgatcaaggaggcgctcattgtggagaagtgctgacgacgacgacaagcgatatacgagaaatgcgcgcgatattattattataacttttttgttttaatatgatatggtgacacaatgtccagttactctattacatattgttgttgttgttgttgttttgttggctggccttcgtttgacacggaactctcaattggttgattatattgatggtagataagatcgcggttcgcaactgttanaaaagaaaaaaaaaaaaacaa

SEQ ID NO: 48995 - DNA, 800 bp, Heterodera glycines
agacattgtggcacacaacttcattttctactatcattgaattggctcaacaataagctcacatcgggacgatgactgtcagcaaagaattaaatgagctcaataattgcctgtcgactcgtgcttatctccacggtttccttccgtcacaagaagaccaatacgtatttaaaagtatcaagtctgttccttccgagaaagaatatgcgcacgttgctcgttggtacaagcacattcaaagcttcgatgatgttgaacgtttgaattggtcaaagaaagctggacaaacaacacagactgtcgcttccaaagagactccggcaaagaaagttgaagccgaggaggacttcgacctcttcggagatgaggaaagcgacgacgaggaaaaaaagcgcatcactaaggagcgcctgaaggcttatgcggagaaaaaggcgaagaagcccgggccggtcgccaaatccaacgttatttacgacgtgaagccatgggacgacacaattgacatcaaagagattgaggcgaaagttcgttccgtccaatgcgacggcctcgtttggggcgcttcaaagattttacctgttgcatttggcgtgcagaagcttcagatctgctgctgcgtcgaggatgacaaggtttctacggactggctcgaggaacagatcacagacttcgaagacctggtccagtcagtcgatgtggtggcgtttaacaaggtttaaaggaacgattgatcttttaccatttgttaatttttgttgttgtttcattttgttaacagtaaaagctgaactatcaaa

SEQ ID NO: 48996 - DNA, 468 bp, Heterodera glycines
tatgactacaaaaatttcttcggcagtgtgctggtgatcactttggacgattttaaaaaggtgaacggaatgtccaacgaattttggggctggggcctggaggacgacgacttttacctcagattgaaggcggcgggaatggccaacaaaatccgtcggccgtccaatttgagcaccaatcggtccaacacatttttacatttgcacacgcggaaccgacgaagggatttctcagtggaagaatccaggaaaaaggctttcgtcgcggtgccgagccgttgccgaacggcgaaattgtgccattgtcaatcgcgtcactcttttggggctgaacaacttttggcgtgtgatttttaacgccgacaaaatacattttcaataaaaaaaatgagcaaatgtttttttgttagtgcttttgataaacaatttttccaaagcaaaaaaaaaaaaaaaaaaaaaaaaaaaaaa

SEQ ID NO: 48997 - DNA, 1374 bp, Heterodera glycines
cgcaaggacaatcgcgcagtgcaaaaactccgccgagaagttgaaaaagccaaacgggcgctgtctgttcagcatcaagtcaaacttgaagttgagtcgctgattgacggcgaagacttctccgaaacgctcacccgagccaaattcgaagagctcaacatggacttgttccgagggacgcttaagccggtgcagaaagtgctcgaggatgccgacctgaagaaggaagacatccacgaagtcgtgttggtcggaggttcaacacgcatcccaaaagtccagcagctgctcaaggaattcttcaatgggaaggaaccgtcccgcggcatcaatcccgacgaagctgtcgcctatggtgcagccgttcaagcaggagtcatttcgggggaggagaactcagaaattgttctgttggatgtcaaccctcttacaatgggcattgaaactgtcggtggagtgatgacaaaactgatcactcgcaacactgtcattccgaccaaaaagtctcagatattttctaccgcggcggacaatcagccaactgtgactattcaggtcttcgaaggagaaaggccgatgacgaaagacaatcatttgttggggaaattcgacttgaccggcattcctcctgctccccgaggcgttcctcaaatcgaagtcacttttgagatcgatgtcaatggaattttgcacgtgactgccgaggacaaagggactggcaataagaacaaaattacgatcaccaatgatcacaaccgactgtcgccggaagagattgagcgaatgatcaacgacgcggaaaagttcgcagaggaggacaagaaaaccaaggaagtggtcgaagcgaggaacgagtttgagtcgtacgcctactcactgaagaaccagctcggagacagtgaaaagttgggaggaaaactcagtgcggaggacaaaacgaccatcgaaggggctgtggatgaggccatttcgtggttggactccaacaaggacgcgccacctgaggagcttaaggagcggaagaaggacctcgaggccaaagtgcagccgatcatcagcaaactctacgcagggcagtcgcctccgcccggcagcgaaccgccgccgactgaggagaaggacgagctgtgaacggtggaatcaccaagtgctaactgtgacgactttccttggtctatcccccttccttcccccactatctctttggtttttcatttatttatgttattggtatttttcagatcttgattctgtttttgtttttttttggatttatcctatctcatttcttgatcgagttgttgtgtggatatgtacggttttgttgactattttgtgcagcgttatatataaattctgcgataacctaaaaaa

SEQ ID NO: 48998 - DNA, 776 bp, Heterodera glycines
gtccatttaagccattaaaatgtcgtggatcctcgactggttttctggcgtgctcaactatttgggactaaccaaaaaaagcggcaaattggtgtttctcggccttgacaatgcgggaaagacgacgcttctccacatgctcaaagacgaccgtattgctcagcatgtacccactcttcacccaacgtccgaggaactttcactcggtggtattcgcttcaccactttcgatttgggtggtcatgtgcaagcgcgtcgtgtatggaagagttactttcccgcattggacgccatcgtttttttggtggacgctgccgatttggaacgcattcaggaggcacgagaagaactgtggagccttttacaagacgaacaagttgccaatgctccactgctcatcctgggtaacaaaattgacaaaccgaatgcactcggagaagatcagctcaaatactacttgggagtccaacaatattgcactggcaaaggacaagtttctcgagccgacttgaccacgcgaccgttagaaatgttcatgtgttcggtgctccggcgtcagggctatggggagggattccgttggctgtctcaatatttggactgattgaatgaattgctttgaccattgctgtaaacgatcggaaagacggctggaatttgttcgataattcaaaccatttgtgcacatcatttttacttgggttaagccgactttaagttgtattactataaaattttatttcccgatatccgtgataatgaagaaattaaaattg

SEQ ID NO: 48999 - DNA, 689 bp, Heterodera glycines
acctcaaaaggaggcaagtttgagattcagtttctttttattacaaataaatgggacgtcgtatccgagctcaacgcaaaggacggggtgggattttcaaatcgcacagcaaacatcgcaagggcccggctaaattgcgcccagtggattactccgagcgtcatggcttcatccgaggcattgtaaaagacataatccacgatcccggccgaggggcgccattggccattgtacaattccgcgatccatacaaatatcgggtgaagaaagagacgatgattgcggcggagggattgcacactggacagtttatttactgcggcaagaaagcacaagtccaaattggaaatgttatgcctattggagaacttccggaaggtacgaccgtctgcaatttggaggagaaggccggtgaccgtggacgtttggcaaggacttcaggtaattatgccattatcgtcgcacataaccccgacacgaagcgcacgcgaattcgtcttccatctggtgccaagaaggtcgttccatccgccaaccgtgcaatgattggcattgttgctggcggtggtcgcacggacaaaccgcttttgaaggcaggccgagcctaccacaaatataaggtcaaacgcaactgttggcccaaagttcgtggggtggcaatgaacccggtcgaacatcctcacggagga

SEQ ID NO: 49000 - DNA, 676 bp, Heterodera glycines
attttgcacctttttgccaccttttaagcctaataattaacaaatagcacgacaatttaaagagttgcaaaatgaccgcctctttgcaacaaattcgagcccaacccggctggacggcggacaaatgcaaagagcaaattgaggtggccaagagcgagaatcggacattccaacgccaaacgctgcaggcgcatctggtccatttgctgaacaaagagcacaaattcaacgaggccatccaattggctgctcaacttgtgcgcgagctgaagaaggtggacgacaaggatttgctggtcgatgtgcaattggaggagagcattggcttttaccatctgtccaactacacaaaggcacgtgccgagttggtcagcgcacggactatcgccaacaccaaatacactccgcccgccatgcaggcccgtctcgacctccaatcgggcattttgcacgcggccgacgaccgcgacttcaagacggcctactcctacttcttcgaggcgttccaggcgttcgactcggtcaatgagtcggcgctcgcgcagcaggcgctgaagtacatgttgctgagcaaggtgatgttggaccagtcggacgaagtgcactccatcatgacgggcaaaacggcacaaaaatatgccaaaacggagacggaggcaatgcacgccatcgcaga

SEQ ID NO: 49001 - DNA, 593 bp, Heterodera glycines
tgaaaactctgcaaccagcaaccaacatcattttgcacatcggtgctcgcgcaatgagctcaatgtccgccgctggcggtgccattgccgcatccgtcgaacaacaaccggcggtggagccagatcgatccacattctaccataaagatttgtccattgtccgtgccactgctggacaaatgcagcccaagccgctgggaacggttgatcagatcaaatttggacatcacttttctgatcacatgatggaggtcgattggtcggacaccgcgggatggaatcagcccgaaattagcccgttgcacagtgttcagcttcatccgggcgcaaaagtgcttcattatgcgattgaactgttcgaaggcatgaaggcttaccgtggcattgacgacagaatccgattgttccgtccagaaatgaacattgcacgcatgaagcgtaccgcggcacgtgcggcacttccggattttgatgcggaagaaatgctgaaggtcatcgccgagctggtccggcttgatccggaatgggccccctacttcgccccctcctccctgtacattcacgccaaattgcaccgcactgatccaaggctt

SEQ ID NO: 49002 - DNA, 652 bp, Heterodera glycines
ttgagatttaatttattgtgcaaagctcttaaatctccgacttcaacatgggcaatatgttcgctaatctgttcaaagggcttttcggcaaaaaggaaatgcgcattttgatggttgggctggacgctgccggaaagacgacaattctgtacaagcttaaactgggcgagattgtcaccactattccgacaattggtttcaacgtggagactgtcgagtacagaaacatttcatttaccgtctgggacgttggtggacaggacaaaattcgaccgttatggaggcactatttccaaaatacgcaaggactaattttcgtcgtggacagcaacgaccgcgagcgtgtgggcgaggcgcgtgaggaactgatgcgaatgctggcggaagacgaactgcgcgacgcggtgctgttggtatttgcgaacaaacaggatttaccaaatgctatgaacgccgcagaagtgacggacagactcggactgcacactcttcggaaccgcaactggtacatccaggccacctgtgccacgtcgggcgacggactctacgaaggattggactggctgagcaatcagctcaagaacagaggatgaacagcgagcggaccatgcgaattggaagatgacggaagggaatttgtttttgcgcgcag

SEQ ID NO: 49003 - DNA, 788 bp, Heterodera glycines
cgcatccgaaagtggaagtgacaaaattgtgttccaaaagaatgttactgggcgaggtagccaggttttggatgacgccgagtttgttaaaatgtatgatcggtcgacttcgaaaaccttgaacacttcctcagccaatgacaacgcacagtcaaaccaacagaaagaacaggttcagaagtggaaagtcggtgatcaatgcatggcactctacgaagtggacggaaagtggtacccggccaaaatcgagcagatttcgcctgtaaaaaacacatgcactgtctcttacattggttacgaccaaaaggccattctgaagttggaggacattttgggtgaatccgatgttgaggctgccgatgaccatggcgatgagcgtgaagcggaagggacaagcggaacgactaagattgcggacaatgatgtgaaaaaagatgcatttccgatcccggatttatgtcctccaccaccgccatcgatgtttggaaagatagccgttgcgggcaatgagaaggaggcactgaccaacatgcttatgtcgtggtacatgtccggataccacaccggcttctaccagggtgttatgcatgaaaagacgacccgtcagaagccaaaatagataacgttgccatacggcttaaaaatcatctcactggttgctgtccatttttattgtctctcccctccctcagttattgtttaattttcttgttcagacataaattgccggtcaacatttccaaagcaataaacggatagcctttaaaaaaaaaaaaaaaaaaaaaaaa

SEQ ID NO: 49004 - DNA, 591 bp, Heterodera glycines
aaaccatctgtactatgtaaaagatcaacaatccacaattttgtggcctcacatatgtgggccgaatttctccggcaaatccagtttatttgagcttccaatgcacgcaacgacgcttggcattgccatccatgaaacaatgcacgcactgggcctgcaccatgaacagctccgactcgaccgtgatctgttcatcaacatcaattgggcgaatataaatccgcaaaactatgacacatttgcgcgctcggagtctggtcaaatacactagctatggcgtccgatatgactacggttccatcatgcattacgccagcaacattgcgtccaaatcagctggactgaaaacgatgacggcaaagaccaaccccggtgccaacgatgcgcagatgggccaacggagagggctgagtgcaacggatgttgaggaactgaggcgaatgtactgcatgccgggttgcgcggatgccaacgtttactgcggcgtttgggccaccaacaatttgtgccaattggccagcacgaggccgtggatgatgcaaaactgtcgcaaatcgtgctcactttgtggctaaaggcaaaacgacggac

SEQ ID NO: 49005 - DNA, 536 bp, Heterodera glycines
cagtttgttcacttcttcgtggttgcgcacagccaattgcaaatggcgcgggttgattcgcaactttttgttctccgtcgccgcgttgccggccagctcgagcacttcggccgccaggtattccaacaccgatgccatatagacaggcgctccggccccaatgcgctgagcatggcgaccgtggcgcagcaaacgatggatacgtccgacgggaaatgcaacgccagcacgagcagagcgcgtgctgtacgttccgctcgcagcaatcttcacaaataccaccctttccgcccgccttcttcgccccttttccgcccgccttcgcttttccgtccgccttcgctttgccgccctttccgctagccgtcgtcttcgtagtagcttttccggctttcactggagacgccacttgagactcctgactgttggtcgtaccggtcgaagcaacggaggcaccacgattgtcagacattgagttgttgttgttgttggttgagatagagagagaaaaccaaaatatcagtgagatgagctat

SEQ ID NO: 49006 - DNA, 694 bp, Heterodera glycines
caagtttgagatcaattttctgtttaaacataacgaaaaatgaagctgattgaatccagcgacatcgtcaaattcccagacaatgtcactttcgcgctcaacaaccgtgttgtgactgtgaagggaccgcgcggtacgctcaagcgcgactttcgccacttaaacattgaaattatgcgagaaaacccgaagctgctccgtgtgcggaaatggtttggcatccgcaaagagttggcagccattcgcacagtgtgctcacacattgaaaacatgatcaaaggtgtgactgttggatttcggtacaaaatgcgctcagtctacgcgcattttccgattaacatcacgcttcaggagaacaacaccgtcgtcgagattcgaaacttcttgggcgagaaatttgtgcgccgtgtcggactaccgcaaggcgttagcgctgtaatgtcgaccaaacagaaggacgagttgatcattgacggtaccgacatccaaaaagtgtcccaggccgctgctcgcatccaacagtcgacgaccgtcaaaaacaaggacattcggaaattcctggacggcatttatgtgtcggagaaggtggccattgccgatgaatgagcacacaaagataaaaacccattgttaccccttttttgttggtcaaatggataaagaaatgttgttaaaaaaaaaaaaaaaaaaaaaa

SEQ ID NO: 49007 - DNA, 492 bp, Heterodera glycines
caagcttgagacaatttatgcgttttaccattcaattacttcaaaaatcgcaacgttgttataaacttctttttgcaaattacaccaaacaagttgcttctgtgtcgccgcttttaattcatcgtcaaaatttgataagtttttcggccttccgcaatttttgctcttcaattgagacgaaaaaggaggaaatcggccgaatcaaatcgcaattggcaatcatttttacgtgtaaagtctgttccacgagacaggggcctaagcaattctcgcgttcagcttatgaaaacggcgttgtgctgatccgatgcgatcactgcagaaatcaccatattattgcggacaatttgggctggttcagcgatttggacggcaaaaagaacatcgaagagattttggcatcgaaaggagaggcgatcaaaaaggggacggcggtgttggagatggaagtgccagcggaggaggagggggacaacgccaaatacagcaaat

SEQ ID NO: 49008 - DNA, 1316 bp, Heterodera glycines
gatcgtttaatccacataaatcaattgcgcaaacgaagtccaaatggcagaagtcggaaactcgtacagaccgccgctaagcgaagagaaacaaaacgaactccgcgcaattgctcagaaaattcttcagccgggcaaagggattctcgctgctgacgagagcacaggttcgattggaaaacgcttcgatactattgggttggagaatacggagaacaatcgccgtcgctaccgccaacttttgttcaccacaccgagctttggacagaatcttagcggcgtcattctttttgatgagacattccgtcagtcaaccgacaacggagtccgatttgttgacgtcatcaaaaaggcgggagccgttgctggcatcaaagtggacacgggagttgtgccattggccggcactctcgatgaggggacgacccagggactcgacaaattgtcggaccgctgtgccgagtacaaaaagggcggctgtgactttgccaagtggcgttgtgtgctgaacatcggtgcccacaaaccgtcccatttggcattgatggagaatgccaatgtgctcgcccgatacgcgagcatttgtcagcagaacggacttgtgcccatcgtggagccggaggtgctttgtgacggcgaacacagcttggaacgatgccagaaggtgactgagttgactttggcctacacctacaaagcattggccaaccaccacatttacctggagggcactctgctcaagccgaacatggtcacccccggccaatcccactcgcccaaggccacgcccgaccaaattggtctcgccaccgtgactgccctccgccgttctgttccgattgccgtccccggcattgttttcctctccggcggccaatccgagatcgaggctacacacaatcttaacgccattaacagtgtgcccgggccgaagccgtggacgctgtccttttcctacggaagagcgctgcagtcgtcagtgatcaaaaaatggaacggcaaagacgagaatttgggcgatgcgcagaaagtgttgctgcaccgtgccaaggccaacggcgacgctcagcaggggaaatacaccggcgaggaggcagccgcgtctgccgctgaatcactttttgtggcaaagcacgcctattgaacagaagtgtggaatatgcgatgaataggcgcgaatccgagaatcactcatcatatattttagctggaggaattggcagaataatctgacaatgaacacaatgataattttgtttcatatttcattgttgtcactttccgtttggtgcacttaataattaacatatagtgat

SEQ ID NO: 49009 - DNA, 714 bp, Heterodera glycines
taatttctttggcattcggacaaaagcgaacagatctccgcctagccccaactgatcatgaccgaacgaccttgtcgttgaaaatgcagcgcgacaaattgcgccaagcgtatcaacggtacgagcgcaacatcgccaaggacgcggagagagcgcgggcactgctcagagacggacgcaaagaccgagcattgttactgttgaaaaggaagcgcttccaggagacgatgatcaatcggatcggtttttttttggagcaggtggagcggacgatcaccgacatggaaatggcacagatcaacagggaagtgttcgacaaccttcggcttggcaccgaggcattgaaggcactgaacgagacaatttcgttggacgaagttgaacgtttaatggaggagagcaaagaggcgcaagagtttcaggaggaattgtccaccatgttgggccaacaaatgtcggaggaggacaacgacatggtggaggaagagttcgagcgaatgctctccgaacaaatgccggcagtgccaacagagcaaccgacggacacaaaagagggacggaaaacagcggacaaagagaggacaaaggaggagaaggagccaaaacgacggagggaggcggtggcgcaggaggcgacctaaaggcgtcggcacttcaaattggtgccatcgacgggtcggacaaatgccaaagacagtggccatcggctgcttt

SEQ ID NO: 49010 - DNA, 619 bp, Heterodera glycines
attcacactccgtattcaatcgatatacctttcaatttgtctttactatgcctcttcattggacttctgtggacactcgcaacgcacttttgtgcgccgccgttccttccattggcgccttcgtgggctcgacgatggccatcaaagatcaggaattggttcaattcctcaagaaacaaaactttccttctttcgcccgttgttgcaaatacaattatttgctggccaacactgccgtcaccattccgttcggttacgcttcttatttggtctacaaaattggaggaggtgtcagttgcaccgactcaaaaatcgcattgggactgtacggtgcgacgctgctcagcggctgttttttggtgccaacgctcaaaaaacatgataccaaggcgctgactgccaacgctgttgtccttgccggactttccgtcgccacttcagtggctttctacaacatcgacaagatttccgcttattggaccatgcccttcactctttgggccattttatgcgctggacttacggtgaaggcgaatttcgatgcgccgcccgcgcagccgctcgatgcgccgcccgcgcagccgctcgaagcgccgcccgcgcagccgctcgaagcgcc

SEQ ID NO: 49011 - DNA, 640 bp, Heterodera glycines
ataagaacaaaaaatccattgactgacgattaaatgttctcaacagatgcgcaagatatactcggtggtggtggtagtggatcccaattggccaagaaaagtgggttaccaacgatgaagttgaccaatttggacaaaaagaaaaaaatcacaacaaatggacagccaaaacggcctgtcggaatgcatcgggaactgtacaatctcttcgttcaccagggcaaggacaataacaaagaaaagatcgaattcgttgatgccaacacagacaaagaagggattttctctcgcaaaagcgcagctgggtaaacgtcctgtcagaaaatggctttggtgtccatttgagaatgaggcgagaaaggatggacttgcgcttaagcattgggaacgtgaggacaaacattcaacgccctactcctttgtgcagttcaataagcaacttgatgtgccttcttttacggatgaggaatatgaagaacatttggtggacccgcgttggactcgtgaacagacacagcacttgttggagctttgcaagcagtttgatttgagatggccaatcattgaggaccgatttgatcaaaattgtgccggaatcgaaaaagcatggaggacatgaaggagcgctattacgggttgg

SEQ ID NO: 49012 - DNA, 646 bp, Heterodera glycines
taagttcgttttaatgccttccgctagagtttcttcggctgattcttctgccgtctctgtgtccaacaaaggcatttctcttggtctttcctcctctggcacttctccgagtaatgtcattgtttcctccgtgcctgtcaatagcggcacttttcgtggtctttcccccattggcaatgtttcttcgctcgttcgcgacgtcttcggccctttagcggccgttcgaaggcaaagtccgacggttcaagtcgccgcgggggcaggcggaggaataatcgcaggttacgtttttgggaagaccagcaaaatggttgccattctcctgggctcgaccgttctcttccttcagttcgcccaatgcaaaggctatctgcaaattcaaaacggaaaactccgagaggacttcgaggcggcacgcgacaaattgggcgaaatgatcgacggaatgggtgccattggcggcgaagcggtggtgggaatgattgacggaacgggcggccgtagttcgggaaatgagttattcaaaattgtgtctgacagtgcgcactttctctgcggaatcgtcggcggaattctcgtcagatttggcatgtcataatcagagggcggattaaacagcagcggtaaaatgtaatgtcttatatgt

SEQ ID NO: 49013 - DNA, 719 bp, Heterodera glycines
gtttcgcttcctgttttatctttcttttctgtgggaattgatcaacaatccaacgtaatttctttgtcccatcctccaacggatggctccggcagcgccactccaatttgtggccggcactgcgctgaaagtggtcatcgtgctgctcaccatcgttgtgctcgttctattggacccctcctacgtcactgcgtacatttccatcaactatgagatcgtgctcatctacatcatttgtgcacttaccctcctctattgcattgtttcgatcatcatgtacgccattatgcagaaaagcgtgcgggaaggcgaagagcttcacctgaccaactgtgccctctccgagattgtcttcgctggcgccggaatgatttgctggatgctcgtctgtggcatcggtggcactgtcgcgcaacggacaatcattgagaccggtcaatacttcggctggctcggggcgtgtgccggcatcatcgtctgcctcttcatgggcgtgttggccgtttttgcgctggacattctcacgaacaaaattttgtcgccaacccgaaagtatcgctacagtacgccgcaaatgtgagagggggaatacgatgcaacgcgaacaaccatctccagctacagtacacacacataccaaataccaatacaaatttctcatttaccatttgctttttgtctcctgccaacttttgagtgtaagcaaaataaagagaatc

SEQ ID NO: 49014 - DNA, 433 bp, Heterodera glycines
agaaagtgtttcgaatttgcatttgattcaatgacgaaaggaacttcatcgtttggcaagcgccacaacaaaacccacacgctgtgccgccgctgtggtcggtcctcataccacattcagaagcacacctgctcgtcctgtggctatccggcgaagcgaaagcgcactttccaatggtctgtcaagtccatccgccgacgcaccaccggcaccggccgaatgcgtcatctgaagcttgtgcaccgccgcttccgcaacggattccgcgagggagtgaccgcgccgcgcaaaggcggagtgaaagcgtgagaagagtgaagaaaaaaggcatcaaaaaatgatggaaaatgttttgttgttgactgattgttacaagaaaaaaatggtcatttaaaaaaaaaaaaaaaaaaaaaaaaaaaaaaaaaaaaaaaaa

SEQ ID NO: 49015 - DNA, 756 bp, Heterodera glycines
ctaaagcctgccgctttttcattgttgtttcaaattctgtaaatctcttcaagcagaaaatgacgtatgacctcgagaccgctgaaagggctgcctatgcgccattctttggctacattggtgctgcatcggcacaaattttcaccgtgttcggcgcggcttatggcaccgcaaagtcggcggtcggcatttgttccatgggcgtgatgcgtcccgaattgatcatgaaatccgtgatcccggtcatcatggctggtatcatcggcatttacggcctcgtggtggcgatggtgctcaagggtaaagtgacctccgcttcaaatggttacacgttgaacaacggttttgcgcatcttgctgccgggctgacctgtggcctgtgcggtttgggtgccggctatgccattggcattgttggtgacgcgggcgtgcgtggcacggcacaacaaccgcgactgtttgtcggcatgatcctcatcctgatcttttctgaggtactcggcctttacggaatgatcgtggcactgatccttggcacatcatagaatgttgtggcccaaacaaagaacacacacaaatacaaacattacaaccgcacatattttcttcgtacgactcgaaaaaagaccacttttcttcaccgttttattattttttaagtttgatgcgttgtgaagaccaaaaaatttaagtaattttcatctctcactttctgatgatatatgtttctctacgataaattttgtactttcaaaa

SEQ ID NO: 49016 - DNA, 1338 bp, Heterodera glycines
cgagcttatacacaccaatatttcaattctcccaattctataaagcaagtaaaatgtttcttcttttcttattatcaatgcttctacttcagacaaatggttggcgtgcccgcgagcgtgcaattgaattggccgactcggacgaatcgatcgaattgcagaacattggccaacggaaaacggacattcgaacaccgacagaacgaatgtctgctcttcgtcaaatgatcgaacgcggcttttccgattggaatgcttacaaacagaagcatgggaaagcatacgcggaccaagaagtggagaacgaacggatgctgacttatttgagcgccaaacagttcattgacaagcacaacgaggcgtacaaagagggcaaagtgtccttccgagtgggagagactcatattgccgacctgcccttttccgaataccaaaagctgaacggattccgtcgtttgatgggcgatagtttgcgccgcaatgcgtccacttttctggcgccaatgaatgtgggcgatttgccggaatcggtggactggcgggacaaaggatgggtgaccgaagtgaaaaaccagggaatgtgcggctcgtgctgggcattcagtgccaccggcgcattggagggacaacacgtgcgcgacaagggacatcttgtttcactgtcggaacaaaatctgatcgactgctcgaagaagtacggaaacatgggctgcaacggaggcatcatggacaacgccttccaatacattaaggacaacaaaggcatcgacaaagagacggcctacccctacaaggccaagaccggcaaaaagtgtttgttcaagcgcaacgacgtgggggcaaccgactcgggttataacgacatagccgaaggggacgaggaggacctgaggatggctgttgcaacgcaagggcccgtctcagttgccattgatgctggtcaccgttccttccaattgtacaccaacggcgtttactttgagaaggaatgcgacccgcaaaatttggaccatggtgtgctcgtggtgggctacggcaccgacccaacccaaggcgactattggattgtgaagaacagctggggcacccgctggggcgagcagggatacattcgcatggcacgcaatcgcaacaacaattgcggcatcgcttcccacgcctctttcccattggtctgatcggagtgaatttgttgcccttgcgctgattcagagacatttcatttgattaatcgtgcaaaatgataagataattgataatccatcagtcaatcggtcgatttccattttttatgttcgcaattttattcacatataaataaataacttattttaaaaa

SEQ ID NO: 49017 - DNA, 789 bp, Heterodera glycines
gtttgagtttccgccttaatttgcccttgataatttgttatttctctctgctgaccaaaaacaataatggtgggcatcacagagctggctgaagcgaccaaaaaggcgtttggcgccgggccactgatcgctgcgaactgtgcgacagcagagaatgctaagagcggcaatgaagtggagtttggctcgatgaagttctacgggttatgcggcattggcggaattctctcttgcggtatcactcacaccgccattgtcccgttggatttggtcaaatgtcggattcaggtcgaccctgccaaatacaaagggatcatcggcggcttcaaagtcactctccaagaggagggcgtccgcggcttggccaaaggctgggcacccaccgccattggctattcaatgcagggccttggcaaattcggactgtacgaaatgttcaagaatgtgtacgccgggatgatcggcgaggaattggcttacagctgccgtacctatttgtacttggccgcctcggccagcgcggagttcttcgccgacatgatgctggcgccgatggaggccaccaaagtgcgcatccaaacatcgcccggagcgccgccaacgctgcgcggctgtgcgccgttcatttaccggaccgagggactgatgggcttctacaagggactgccgccgttgtggatgcgccaaatcccgtacacaatgatgaaatttgcctgcttcgagcgcaccgttgaactgctctacaaacatgtggtgcccaagccagagccgaatgcacccaagcctgac

SEQ ID NO: 49018 - DNA, 842 bp, Heterodera glycines
  unsure (1)..(842): unsure at all n locations
tgcgcatatgcaccgaagcatttgtattcgtcccaattggtttttatggcggatggatggatgaaaaaaagggcagcatttattatcgcatttgggaccatttgttctttggatttgccggcagaagcaaattcaaaagggttgctgagacgggttggcgcttcacttattattccatcatttggttcgtcggagtgtccgtgctctacaaagagccgcagttttccagtgtaatcgaatgctttcgcgagtggcccaaacatcacttgccaaatgatgtttggcaatattacatcatccagtcaggcttttacctttctctcctcttcagtctttttgcctttgacgttcggcggtccgaccattacgaaatggccacgcaccatttggccaccattttgctcctcttcatgagcttctctatcaattttgtgcgtgccgggacgctcattttgcttctccacgacagtgcggacgtttttcttgagcttggcaagctgttccgttatgctggctgggaccgggcggtgaccatcgacttcagtgtgttcatgttggtctggatcagcacacggcttgtctacttcccactgaaacttgtccggtatatgctgttcgacgcacccaagctcattatggagacctatcgatggaccgacattcttcaaaaaccgatcatccctcgcgtctttttggccgttctttgtattttgctgctcttgcacatcttctggacctatttgttgatcaaaattgccatcaaatccgtgaagagtggcgttgatgacatcanggaagatgaggacgacgattcggaggaggaagcggagaagaggaaaaat

SEQ ID NO: 49019 - DNA, 979 bp, Heterodera glycines
  unsure (1)..(979): unsure at all n locations
tttatttttgactttccaaaatggtttccgttggacttgcaaatgctcagcgacttgttgcgattgtgactggcggtgcttcggggcttggctgtgcgactgttcgtcggttggtcgccaaagggttcaacgtttctctgttggatttgccaatgtctgaaggagcgaaagtggtggaagaattgggcaccactgacaatgtgcttttctctccggtcgatatttcgtctgatgatcaagtgtattttgccatggacgcaacaacggagaaatttggtggtctcattgttttggccaattgcgctggaatcgctttcgcgcacagattgtacaatccgtcgagcagagcccaaatggacctcgacaaaattcggcgactcatcgacgtgaacatcttcggcaccatcaacgtgatcagacacgccctcccgctgctgattgacaatgtgccggacgaaaacgaccagcgcggagtgatcatcaacacttcatcaattgcagcctttgaaggacaaatgggacagaccctttattccgcttcaaaaggtgccgttgcatcattaaccgttccattggcgcgcgattattccaacaatggcattcgcgtgatggcaattgctcccggcttaatggacacgccattgctttcctcgttgccaccaaaagtcaaaaagttcctttctggcactgttccgtttccgaaccgattggggaagccggaagaatttgccgcattggtggagcatatcatcgacaaccattacttaaacggcgaaatcatccgattggatggtgggattcggatgaatgcttgagaaggacagcagcagaagggcacaattggctctttgatcacttttgttgactttttatctttgcattgttttttgttgtgcgtccattcccacaaccctttggattttataaattgccaaaggcngactggacaaaacatcaaaaaacaaaagccaaaaacaaa

SEQ ID NO: 49020 - DNA, 568 bp, Heterodera glycines
gtgactctctttttcgtttctctccgttttcccatgtttacccctggcgacgatttctgcgccgcctgcggttccatcatgcaaactccgaatgaattgaccgccggctccggtgtcaccaatttcatcaaatgctccgtctgcgatgcaaaatggccctataaaattgtccacggccaattgcttagtcggcacgaaaggaatttcgagcagcgaaacgccgtgggggaagagcggcaaaaacagcagagaaaagagacggcgagggaagaggaggaggaggacgtaacggtggaacacgtgtgcccaaagtgcgagtggaccacggcgacttacaccacacaacagacgcggtcagcagacgagggacagacagtgttctaccaatgtgtgcgatgcaaacaccggagcatcgaatattcatagagagagggcgaagataagagaagagagacaaagaaagggcagacggatggacggacaaattgccacgcttttgagtctgtcgtctacgacaatcgcacaattttctttgactttttattggcaaaaaagttgttgagttgct

SEQ ID NO: 49021 - DNA, 551 bp, Heterodera glycines
gtccaattaagtcggcagaaaaaaaagacatttttctgctttcggcccaaatacgaataatgagtgtcggtttgtcctcaattgtcgatgattctcaccagcgacaaagtcacttttgggctgagattctcccgcccggcgttggtcacaccaacgacatttcgggagatgccatttggacactttcgagctgtaaggagggccttggcgtgcatcagttgttgaacgaccgcgaagacacttattggcaaagtgatggtcttcagccgcactcaatcaccatagaattccaacggaaaacggaagttgactttctgctgatgtttttggactacaaactcgacgagtcgtacactccctccaaaattcaagttcagaccggcgcttcggtgttggatttggacgaacccaagtccctttccttcacagagccttcggggtggcaaatgatcgaccttcgccatgccgggacgaagcgaccggcgaatgtctttgtcatcgttgttcagattatccaaaatcatcagaacggacgggacacacacattcgg

SEQ ID NO: 49022 - DNA, 595 bp, Heterodera glycines
gtttgaggaaacaaatgacaaagttcgaagagaccaaatcaaaattagaggcagaatttgaaaagcttcgaaatttggaaaaagatcgttcaaaatgcatgaccaacagacggcagttggagagccaactgacagagaattccatggtcaaagaagagttcgatcggttgaaaagcgatgccggcgttttcaagctgattgggcccgtgttggttaagcagaatttggaggaagcgaaacaaaatgtggcgaagagaattgattacattcggacggaaatcgaaagaattgagtcattgctgggcgatttggagaaaaacatcgaagtgcaaaaggaatccgtcgaacgaatgcgcgacactttccgacaaacgctggcggtggccactgccccaacggcgaattcgatcaacgcttaatgagtgaatggacgaggaccgatcagactgattgtgagactgatcacttctttcccaacccgaccaaatatttttttaacatttttgcccggctattatcatttctaaaatcgtttgttcgttttaaagtgaagcagtgttgttgattgattcgtttgttgatttgtcataatcta

SEQ ID NO: 49023 - DNA, 669 bp, Heterodera glycines
ttttagattcaaatttattttcgttgtttcatttcctttcattcgcaatgcatcagtacaatctgctcgcaaaccgatcgttgctcttcactaaacgtttcttcgccgtcggtcctcccggcactaaggccacatacaagcggacgaagccgcacatgaacgtgggcacaattggacatgttgaccacgggaagacgacactttcgtccgcaatcacaaaactgttggcagccaaaaaacaatgcaaaattcctgaagtatgacgaaattgacaatgcgccggaagagcgctcgcgtggagtgacaataaacgcggcgcatttggaatacgaaactgacaacagacactacgcccacgtggactgtccaggccatgcggactacatcaagaacatgatcaccggcgcagcacaaatggagggcaccattttggtggtggccatcactgatggaccaatgccacagacccgtgaacatttgctgttggcacgtcagtgtggcattccgcaggagaacatttgcgtgtttctgaacaaagtggacgaagtcagcgacgccgagacgcgcgaattggtcgaaatggaggtgcgcgaactgctcaacgagttcggctacccgggggacacggctccgatcattgcaggttcggcactgtgcgccttggagggc

SEQ ID NO: 49024 - DNA, 1213 bp, Heterodera glycines
  unsure (1)..(1213): unsure at all n locations
gtttgagagaacatgtcccaaactgaaaaggaactactggcagaaaaggtggacaggcagcccaatgaggaggcgaagccgacagcttctctaaatttgttcgacctcagtgtaatgcccgactcagaaacgagcattgaactcaaccaaatgcgagtggacgctgtgccggacttggcaaggttcacccaattacagtttcttggtctccgccaaaacttgttgacatcgttgaatgcgaaccttggccggttgaccacgcttaccgagttggagctgtacgataaccaactgactgaaattgccggcctcgaccagttggtcaaccttgtgatgttggacatgagttacaacagaataaccaaaattcaagggctttccacaatgacgaagttacgccgtctgttcctcgttcacaacaaaattaaacggatcgaaggcctggaaggtttggacgcgttggaactgctcgaattgggggacaaccgaattaaggtcatcgaaaatttgtgccatttggtcaatttgaatgaactgtttgtggggcacaacgacattcagcgaattgagggaatccaaacgctgataaagttgcgagttctcagtctgccggctaatcgcttgaccaaattggaaggattggacacactgacggagttggagcagttgcacctcagtgaccagggcattgaaagcctcgacggacttggcaatcagtcgaaactgatcattttggatgccgcgaacaacagaatcgtcaatttggatggcttgggacatttacagaaattggaggacctttggctgaacaacaacaaaatcgttgtttggtccgaggtggataagttggcccaacttcgcgccctcgacacggtgtacctggagcacaacccgttgtacaccacggacaccaaccagtacaggcgcaaggcgatgctggcactgccgcacattcgccagttggacagcaccgtgtgccgtcagcaaaaaaatgtggtggaggaagacacaaaacaaaacagcgaagacaacaacaacgcgaagccaaacagccaaagaagtgccgtggcgacgacggcacagaaaacttaatttattttcccgctatcaaacgaccaaagactgattgatcatttcacgtttcattagccatgtaatttaacgtgtttaataaacctatgcatctnanaaaaaaaaaaaaaaaaaaaaaaaa

SEQ ID NO: 49025 - DNA, 583 bp, Heterodera glycines
acaagattgagtttcattgctttttctattgaaaatgaccgaacaaactgagcgcgcataccaaagacagccgaccgtgttcttgaacgacaagttcagaactcaaggaattggaaagaaggcggccaacaaagaccgttattggaagaatgttgggcttggctttaaaactccccgtgaggctattgagggcatatacattgacaagaaatgccctttcactggaaatgtttcaatccgaggccgaattctcaccggagtagtcatcaaaaacaaaatgcagcgaacgattgttatccgtcgcgactatctccatttcgtgccaaagtaccgtcgttatgaaaagcgccacaagaacatgtctgtgcattgttctccgtgtttccgggatgtgtccattggtgacatcgtcacaattggcgaatgtcgtccgctgagtaagacggtccggttcaatgtgctcaaggtgatcaaagcatcgggggcgaagaaggcgttcgacaagttttgagagacccttatttgaccaccctattcattgttgctgtttgttatgacaaaattttggttgaaaaaaaaaaaa

SEQ ID NO: 49026 - DNA, 699 bp, Heterodera glycines
gtccatttaagattacctaattagttaattatcttcaaaatggacatgagtgaattgtgtgcaaaagttaatgcaatttataagaaggaaacggaccacaaagtgcaatcggaaggacttcagaaactgcttgagggggtgctcacctccgtgccgtcggataatttgaagcaaattaccgaggccgtgagcaatttggtcgagactgtggtgaacaatgagagtacctccatggtcgtgtcccgtcaattcatcgccgacatcgcttcctatttgagtcagccttcgctgaacaccgcactgatcaaaggcattggcgaggccgtgctcactcagcttcatgcacgtgcacttgcctacgaggagcagagcacccaaatccgcatgattctggccaatgcgcttgagcgtgaccgccaatttgagcaatccgcgcggacgcttatgggcataccaattgaaactggtcaaaggggctatcgccacgaattcaaaatggaactgtacttgcgaatcactgagctgtttttggaggccgacaatgtcgaggaagcggaccgacacgtgaaaagggcctcacttttgcagcaggacgtgaaggaggaggccctggtcatcaaatacaaggcactttacgctcgcgtgttggaccgtcagggcaatttcacggaggcggcgcaccgttaccccagctatcgc

SEQ ID NO: 49027 - DNA, 739 bp, Heterodera glycines
ggattatcacttgcaggcttcatcgctatacgtcctttaccgcgcgccgccctcgtatctcactccaacgcaacatcaatctaacatgggctgacactgttgaggttgccgccgccgaggtccacgttgcgtcgaccatgactgtggaggaagccctccaggacgtgctcaagcgttccctcatccacgacggccttgcccgtggtatccgcgagtccgtcaaggctcttgaccgccgtgaggcccacctttgcgtgctcgcccaatcgtgcgacgagaaggaatacgttcgcctcatcgaagccctctgcgccgaacacaacatccgcctcatcaaggtcgaggacaacaagaagctcggcgagtgggccggtctctgcaagatcgaccgcgacggcaacccccgcaaggttgtcggcgcctcggtcgttgtcgtcaaggattggggagaggagtccgaggctctcaacatcattctcgagtacttcaagtcccaataagttgggtcctctgcgaggttggtcggcgcacgttgcgcacgcatgattgtcggtttgctcgctcgctggcgttcccgggtttctcgttccaagattgacctcggcgctcgggttttgttggttgcgagtcgagccggtttctttgtctgtgtgtgtttctgcgtgccttcccatcagcccattgtactttttcttgaatgcaacgttgcgtgtccttgtggcacactcattttcgcttt

SEQ ID NO: 49028 - DNA, 852 bp, Heterodera glycines
attaaaatactagtttttattttttgaataatggacgatgatgacgcaatcggtggtgctgaggcattcaaatgggaacaagcttacacggaagggctgaacattcgttcggtgctccaagaggacgaacatggctccgtcgaggagtccatccgtcggttggtcatggacgagaagcgacagcgacggatggaccgactgccggccaaaatccgactcggaatgatgcgttatgtccatttggctgtcgattgttcctccgccattctctccgccgatttctttccctcgcgtctctccgtcgcgttggaatgtcttcgtaaattcgtcgacaaattcttcctgcttaatcccctctcccaaatgggactcatcgctgtgcgcgacaaacgcgccgagcgcatcagcggatttaccagttctgtccaatttctgctcgaatctctgcaggacatcagttccaccaattgtggtggtgaattctctctccaatctgtcctccaatgcgctcttcactctttccaggcttttcctttgccttttccctttttaaattcgttcgctttttagggtttgcccgcccattccagcaaagagtgcattcttttgattgccagcttaagttccgtcgatgcgtcccctctccgccacactttcgagcagctcaaaatgcgttccgtccgctgctccatcgtttcatttggtgccgaagtgttctcatttaaacgcctttgtgcgacaacggagggcaaatacagcgttgccctggacgaacagcatttggagcttctgcttgacgaacatgtccaaccgccgcccgtccaacgccgtccgggtcagcaggactcaatc

SEQ ID NO: 49029 - DNA, 461 bp, Heterodera glycines
  unsure (1)..(461): unsure at all n locations
gtttgagtttacataaatagaaaattgcattttaactgttattccgaaattaaatgttcgcccatctgacaagagcagagcgttcaggctgtatttttaacaggattctcggcttgatcattgctggccatttgaaatgggaacaacggccgctttggttcgacgcttatgtcgcccattcaccgcattacgagccaaaatgggacatcaaaatgccgaagcgtgacgaaccgttgccacaaattttctaccaagaggaccttatcagagccaagaaattgctggagatgcgcaacgaagaaccgaagtatgagcttgatcagcaacaacagcagcagcctgatcagcttaattagttttccgattttgatgaatttgtgttttctattattattttttgtttattttcgtttgagattttagagaaaaaaaagtcgcgtaaaaaanaaaaaaaaaaaana

SEQ ID NO: 49030 - DNA, 1851 bp, Heterodera glycines
ccacccgaaaaatgtcggcgtcaattccaaggcgttcttctcaggattcgctggcagaaaaagtgaaaagcaaggagctgatctacgaggccagaatgaagatccaggaacgactgaaggaactcggtttccccgtccaaaacacaacggtcaaagggccaagtggcagcgaacgtttcagagaaactgtgctcaaacccgaggaggcgagcgcattcactcagttgcacatggagaagataaagcgacttaacgaggcaaggagtcgggctgccaaaggcctttccactctgaatttaaagacaccgtcgttagtttttgacacaatttctgccgaaaagcaaatggtggcgaagcgtgaaccctcggggcctatccgccaatccttggagaaggccgattcgtcgactatagaactgaaaaaatctgctgcttctccacatggccaacaaattgaacccgattccagcacaagtgccgctcagcaagaatttttggacccgcgaatttacataaaaccggccgctcgccaaaaacgacactttgaattcaaactccctggagagtatgaaaaactggccaaaatccagcggtcaaaagccaaattggagcgacttcagtctgaaattgaaaaggcggcaaaacaaacgggcatttcctctgcggtcaaattggcaattgtgacgcctagcggactgccggagacgagcactggcgaatacattccgttggtggagtggtgggacgaagtggtgctcgggaacaactgcaaagactacaacgaaatgccctcgcaggagttggccccggttgaacgttacgcggattctgtcaccgatttggtggagcatcccatccaactgaaaccaccggacgaaccattgcaaccgcaatacattaaggcttctctaaccaaaaaggagaggaaaaaattgcgacgccaaaaccgtcgcgaggcattgaaagaaagagcggagaaaattcggcttggattggaaaaaccgccggatccaaaattgaaaatcagcaatttgatgcgcgtgttaggcaccgatgcaattcaagacccaaccaaaatggaagcgaaagtacgaaagcaaatggctgaacgggcgcaaaagcacgtggaggacaacagaagcagaaaactgaccagggaagagaaggccgccaaggccatccggaagattggggaggacacaactttggcagtgcacgtcaccgtttttaagatcaaatcgttggcaaaccctgcgaagaaattcaaagtgatgatgaacgccaaacagttgcaaatgaccggtgttgtcattgtgttggaagacataaatgttgttgtgatggagggaggtcccaagcagcaaaagttcttcaaaaacttgatgctcaacagaattcgatggtctgctgaaattgccggtcaaaagcacgaccgaagggcgacgcataacagagcgaatgaaatgggagaagggacggaggatggaccagcggaagagaagaggaacgagtgcgttttgatttgggagggcgtcgtgcaaaagcgagcattcactggtgagccacgcttcactcctgtgaccaatcataagcaggcccgtgaactgctcgaaaagtacggagtgccacactactgggacctgtgttactctacgactgtccttctgaatgacgagacctgatgagagtgaacggctaaatgagactacaaattgactcaaattcattcagtttttagtgattttgagtttaatcgtgtaaatctgctgaagtgatgagatttatcggtttttatatttgagttgttcttaactgtcgacagaaaaatgtatcacagaaattggaccaaag

SEQ ID NO: 49031 - DNA, 623 bp, Heterodera glycines
  unsure (1)..(623): unsure at all n locations
caagtttgagctactctattcaaatcaaagtgtaaagcgtattcaaaatgcttatgccacaaggtgatcggaagaaaatttacgagcatttgtttgaggatggagtttgcatcgcgaagaaggactactgcttgaagtcgcatcccgaaattaagggagtgaagaacctttacgtcatcaaggcattgaagagtcttgcatctcgtggacttgtcaaggagcagtatgcctggcaccactattatttctaccttcaacccgaagggattgtccatttgcgtgcttaccttggacttcctgacgatgtgttgccgaacacgcacaagcaaaggaccgacgctattcaaaaggcttttgcagacaaaggaggccgaggtccgattcgcgccgacaccgatcgtgggggttatcgcgctgccgcagataaacaagcggaggctgggcctggtgctgctccgattagtcatcgtcagggcttcggacgtggaggaggtgcccctgctccccaataagaacttcgggaatgcttgatctttgatttctggagattttttttgttgattttttggttataaagtgttgatcagttgacatgaanaanaaaaaaaaaaaaaaaaaaaaaa

SEQ ID NO: 49032 - DNA, 843 bp, Heterodera glycines
acttgatttattccccactttaaattgaaggattagttaaattatattggcagtaaaatgggaattaagtttctcgagtttgtcaagcccttttgtgggttcgttcccgaggtttcaaagccagaacgaaaaatacagtttcgggaaaagatgctgtggacagcgattacgttgtttgtttttcttgtgtgctgccaaattcctctctttgggataatgtccacggacagtgctgaccccctctattggctccgtgtgatcatggcttccaacagaggcacactgatggagttgggcatttcgcccattgtcacttccggtctcataatgcaacttctcgctggtgcgaagattatcgaagtgggcgacacgccaaaggaacgggcattgttcaacggggcgcaaaaactgttcggaatggtcatcactattggacaggcaattgtctacgtggcttccggaatgtacggaaacccacacgaaatcggcgccggaatttgcttgcttatcgtaattcaactcgtcgtggctggtctcattgtccttctgctggacgaattgcttcagaaagggtatggacttggctcgggaatttcgctgtttatcgccacaaacatttgcgagaccatcgtttggaaggccttttcaccggcgacgatgaacacgggccgtggcacggaatttgagggggcgatcatcgcacttttccatctgttggccactcggaatgacaaagtccgtgcacttcgtgaagctttctaccgacaaaatttgccaaatttgatgaatctgctggccactgttctagtttttgccgtcgtcatttatttccaaggttttcgt

SEQ ID NO: 49033 - DNA, 468 bp, Heterodera glycines
  unsure (1)..(468): unsure at all n locations
ggacacttatcaaaatgaccaaggtcaagactttcgaactccgcaccaagtcgaaggctgagctttccaagcagctcgacgacctccgtcgtgagctcctttcgctccgcatcaagcagcaatctggccagtccaaccagaagccgctcgagatccgcaacgtccgccgctcgatcgctcgcgttctcaccatcatcaaccagtccaccaaggctgaggtgctcaaggagtacgccggcaagaagtacatccccattgacctccgcgccaagaagacgcgtgccatccgtcgcgccctcacccccgccgagcgcaagatcaagacgacccgcgccctcaagaaggccaagcacttcccccagcgccaattcgccgttcttgcgtaagttttggatgttggaatcttgtgttacacggaatcaatgcatggttgactgctgctgaacnaaagactgaaaagaatggaca

SEQ ID NO: 49034 - DNA, 543 bp, Heterodera glycines
gtaggatacaagtattaaaataatatgccgccaaaaacctcgaagaaaactgacccaaaagggggaaaagcggcaccagcgaagaagaaagagggcggaggaggagggaaggccaagaagaagaagtggtcgaagggaaaggtgcgcgacaaactcgccaacatggtcttatttgaccaagccacctatgacaaattgtacaaggaaatcatctccgtcaaactgatcactcccagcgttgtctccgaacggctcaaagtgcgcgcttcgctggccaaggcgggcctggaagagttgcaccagaaggggctgatcaaatgcgtggtgaagcacggttcccaattggtgtacacacgggccaccaaagcggaggaagcctaagaaaagggggaaacggggcgatttggtttttccttttttttagattgttgatttgttgaatgaatatgtttttttaatttttaaaaacatttgttaacctgtcactatatgaagcatatgcaacatattaattcatattcgtttttaaaatattagcggtat

SEQ ID NO: 49035 - DNA, 620 bp, Heterodera glycines
gagattatacacattttctaccgatcaaaaatgccaccaaagtttgacccaactgagatcaagatcgtttacctgcgttgtgtcggtggtgaaattggtgcaacttctgcgcttgcacccaaagttgggcccctcggattgtcgcccaaaaaaatcggcgaagacattgcaaaagccacccaggattggaaaggactgaaggtgacgtgcaagctgacgattcagaatcgtgtcgccaaaatagacgtggttccatcggccgcttctctgatcatcaaagaactgcgtgaaccgccaagggaccgcaagaaagtcaagaacgtgaagcacagcggcaacctgaccattgaacaagtgatcaacatcgctcgtcagatgcgcccccgttcaatcgcacgaaaattgcaaggcaccgtcaaggaaattttgggcaccgctcaatcggttggctgtaccgtcgatggacaacaccctcacgacattgtggacatgatcagggcgggagagattgaagtgccagaagaatgaacggaccggtgatacgctgagaaagtttggagaaagaatcaaatttgttgttgtgttttggacttttccgttaaatttgatttattttaaaa

SEQ ID NO: 49036 - DNA, 694 bp, Heterodera glycines
gttttgagatttgacatccctaaaataagcatttgataatgagcaatcttcgtctgcaaaagcgcttggctgcttcggtgttgaaatgtggtaaaggaaagatttggctcgacccaaatgaagtcaacgagatttcgaatgctaattctcgtcaaaatgttcgacgtcttgtcaaagacggtctcattatccgcaagccggggaaagtccattcacgttatcgcgctcgtgaacgtttggaagcacgcagaaagggccgtcacatggggttcggcaagcgtcatggtactcgcaatgcgcgtatgccagagaaagtgatttggatgcgtcgaatgcgtgtgcttcgtcatttattgaagcgttatcgtgatgctaaaaaaatcgacaaacacctttaccatgagctctacctcaaagcaaaaggaaatgcgttcaagaacaagcgcaacctcatggaatacatctttaagaaaaaaaccgaaaaccaacgttctaaacagcttgcagaacaggccgaggcacgtcgcaacaagaacaaggaaacccgcaaacgtcgcgaggagcgtttggttcagaagcgaaaggaacttttgcacaaaatttcggagagcgagaaagagaagacgcctcagcccctagtgacaaagccagccgagaaagagcaaccgaagccacaacctgtcgctgcacggac

SEQ ID NO: 49037 - DNA, 692 bp, Heterodera glycines
gtttgagactaaccatcctttcattgactctgtctttttcatcttaatacgaaatggactctcccgctggtgctcagccgtcgaacccaaacgctcaacaacaaggtggagcccgaccatcgaacaaacgactccagcaaacgcaggcacaagtggatgaagttgtcggcataatgaaggtgaacgttgagaaagtgttggagcgtgaccagaagctgtcccaattggatgatcgtgctgatgctcttcaagaaggtgcgtcgcaattcgagaaatctgccgcgacgctgaagcgcaaatattggtggaagaacataaagatgatcgtgatcatgtgcgcaattgtcatcctgctgatcatcatcatcgtcatttgggctggaaaatgaacgacgtgtgctgcggtcggatgctcgagaatttccaagtcttcgtgaattgaaaagatccatttacaaacaaaacccgcgaatctaatttgaccagagttcttgaccaacaattcctaagtctgtttctcatctcctgtttgtgtaccacccaaaaatccgagtacatacgacacttacttcggtcccttcccacattcctaattttcaaaactgtagagtacgcttggaatgcgatggattgacacattttatgtgatgtggataaactgaatatgtaaaaaaaaatataaaaaaaaaaaa

SEQ ID NO: 49038 - DNA, 791 bp, Heterodera glycines
atttttggctggcaatgacaacgaaaagtgagggggatgaaaataattctgtggatgagaatggcgagccctctggcaatcacgcggagaattgcagcaccgggccctcttcgcctgccccgtcagtgtcctgcgaggcgtgcggtaccaatttctcacaacttgagaaggatgcttttgccgcagtacgcgaaatggcgccgtacgtcaaaaccatcgccatttccgaaatactatcccgcactcccgagctcatattcctcaacattgtcactttggaaaatgagagttattgcgtggaactcactcaacgaggctggcgggtgagttccgaccgtctcgactgtatgaacggagacattcaaaagttggaaatgcacgtcacttactacgacgccattgagcagctgttggacagcttaagcgagcagtaccgcgagaattttggcgccgcactctcttcaaaactggccgctctgcagacggaacagaagcaaagacagcaagacggagaatcagagggaaacggcggaggggcggcagagagaagcgacgcggggcaaaggacggacgacgagccgaactgacaatgagcggagcaaagaaaagcacagaatgtttgtccattttgattgtcccacccttcgttggtctgttactcatttacacttctccgaggcgagtgtcccatttctcttccattcccttcagtttcattttgaccgtaatcatatttaaaaattttttgtaaaataaaaattattttgtcaaaaaaaaaaaaaaaaaaaaaa

SEQ ID NO: 49039 - DNA, 698 bp, Heterodera glycines
caaataagtgccaaatttaatgccaaatgttgtctcaaattgaggaccatctcttcctcagtttttggattgaatatgctcaaaagtatttgattgatgctaagattggccgtgttctcactgttgcacttgaccatattccccaaattcggcaccttcaaaatgtggagtaccgacacattcgaatggctgatgtcgagtcggaggagctgttggcgagtcagaagctgcaaaatgcattggattacgtcgaagactcagtgaacagaggaatcaacattgttgttcattgtcaatgtggcataagccgatcggcaacagttgtgatggcttatctgatgaggaaatacaaatggaatgttaacgattcgttttcttttgtgaaagcgcgacgttcatgcgttcagccaaatccgtctttcttacgacaattggaagttttccagaagttggactatcgttgtgacttgctaactctgcgcaactcgaagctgttcaaggaattcgaatgcatttccgaaaatccatccgaaggtcaacttgtgacatttactcattaaatgaatcggcaaaactttctgttgggaggcgattttcgtgcaaaaaatgtcgctgcgatctcttctatgatttcaatattttatcacacaattttgttgttgccagcggccaaaatgaaagcgtaaagttggcaaaaa

SEQ ID NO: 49040 - DNA, 658 bp, Heterodera glycines
tttgagtgcgattaacccccttttttgaactgtttgaattttctgatcagtttgtttttacatcattcaatggacatcgttgacgaccctttgtccgagccttgccatgtttgtggtgacaaatccaccggcacacattacggcacggtttcctgcaacggatgcaagggcttttttcgccgtactattttacgaagtcagaagttcacttgtcgtttcaacaagcaatgcgtcatcgacaaaaactatcgctgtgcgtgtcgcttttgccgcttccaaaagtgtctgagtgccggcatgaaaaaagaagcaattcaatttgagcgcgatgcgattggttcgccgcttccgttgaaaaggcggcgcgtcgccgacgacggccgggccgaccattccccgtcaccgaccggtggacggacagcgaccgatggcattgggacggcggtgggccgacccgtaatggcacaaggggacggaaagggtcagatggaaagtcctcccgagatttacgttgacatcatcggcacattggtggagatggagcaacgcgtcaattacgaaatgagtcttcgctatcgttctctgtgcggcgccgtctttccctcctccgtcggcactgacaacgcatcgtttgccggcgacgcttcgtccgttttca

SEQ ID NO: 49041 - DNA, 659 bp, Heterodera glycines
tgagaatgcggccacccgttgacgaggattatcgcccgatccgcgtacttggccaaggcgcgtacggcgaagtttggttggtgaccagcaaagaaaatgagagagagcagttcgccatgaaaaaaattcccgttaaagcgacggaggagggaattccgcagagtgtcgtcagagaggtcgcttctctcgtcgcactcaaacagatgaaacacccaaatattctcaggctccacgacgcattcattcgccgaaagggcggcaccatcagtttgaacatcgtctgcgaaaagtgcgactgggacttgtgcgactttttgcgaaaaattccgaaaaatatgtgcgacgcgcagtgcaaatattttgcacgtcaaataatgacgggcattgatttccttcatgccaacagtattattcaccgtgaccttaagcctcaaaacattttggtgaacaaagaccacactttgcggatcgccgatttcggactgtctcggaactacggtctgcatgccaccttcaccaccgaggtggtcaccctgtggtaccgtagccctgagctgctgctccagtgcaagtacggtactgcggtcgatctttggtccgccggttgcattttggcggagctgtacacgcgcgacgcgctcttcagaggggatacggag

SEQ ID NO: 49042 - DNA, 858 bp, Heterodera glycines
gcaaaaataacgatttaatattttcacagtgaccagaaactttaatttggtgtgcttccaaatgtcatattcctatttgttcaaatacatcattatcggggacacaggggtcggcaagtcatgtttgttgctgcagtttacggacaagagatttcagccagttcacgacctgaccattggcgttgagtttggagcacggatgatcacaattgacggaaaacaaatcaaattgcaaatttgggacactgcaggccaggaatcctttcgctccatcacccgttcctattaccggggcgcggctggcgctttgctcgtttacgacatcactcgacgcgacacgttcaaccatttgacctcgtggctggaagacgctcgtcaacactccaattccaacatggtgataatgctgattggcaacaaaagtgatctcgaagcgaggcgtgaggtcaaaaaggaggagggggagcagttcgctcgcgagaatggacttgtctttatggaaacgtcggcgaaaacggctgccaatgtggaggaggcattcattgatacggccaaggaaatttacaggaagatccaggagggcgtgtttgacattaacaatgaggccaacggcatcaaactcggtcctcaacacccgcccagttcgccaagctctcccggtggtgcgccgttaggacgtgcgagcaactgttgctgaatttgaccaacggaatgcgaaagtgaaaaagaccgcaccgtcagaaactcacgccctcccccccccccttcccctccctctgtggataaatcaaagatttctcacaaatctgtatctttgacaaatttgtcgatcaagtcagcatcataaatacctattaa

SEQ ID NO: 49043 - DNA, 645 bp, Heterodera glycines
tttgagatttgtttttgtgctttggtattccacgggttgttctccactcaatttgtgaagaaactgcacagcaacagcagtgaaaatggcctccggcgtgaaagtggacggcgagtgtaagcaggcatacgacgagctgcacaacaagcaccagttctcctttctgatcttccgtatttcggacgacgacacgacgatcattgtggagaacaaaggcgagaagaacgcgccgtactccgattttgttgaggagatgaagaaagtggtgggcgacggcaaacagtgccggtacgcggcggtggacgtgcacgtggaaattcagagacagggcaccgaagggtcgtccaacctgtccaaagtggtgttcgtccaatactgtcctgatgaagctccggtgcgtcgtcggatgctttacgcctcttccgtgcgggcactgaaggcgactttggggctggagagtctgctccaaatccaagcggccgaactgtcggacattgacgaaaaagtggtcaaacacgaagtgatgggtcgtcaacgaacctaaaattgccccgccgttactttcaacaaaaatgcgtctgattttctcttttcgcgcataatgaaggaaagttcgttaaaattctctgctgatcgatgataatc

SEQ ID NO: 49044 - DNA, 1087 bp, Heterodera glycines
cattggccactaatggaggaccaacaaggccaattgagatcacgaagggcacaaacacaacagacagaaacaacggtggaaggaccaactgacaacagaaatgggaggactgggggagaagaaacgacggcgaggactcatcgaaatgggggaccgaatgaggcgagttttcatggatatgtgaccagttttagaatttatgtccagaatttcaaaattcgcttttttgagtattattaaaaattaaaggagaattgaggaccgaaagaatgtaggcattgaccaagtaagaaaataaagttatgggccaaagaaactgaacattggatgcctaaaattagctgtccaaaactccaactttagggatataaatttttatcgtttttaatgaaaattaggaattttaaaggaaattgtgaaacggaaataggccactttaactgaatccgcctagccctgttaacgaggctgcccgtttagcttggctttcttcactggattctcgtcttctgtctcgtgggcactctctacggaatgatggtttggcaggaccagcgcatgcccttcggctgtctcttcgtctgaaaagggtaatttttcggaagagcgtgcccgagttgtgctcaatgcgctgacagatcttggacctcggcctagtgggtccgacaattgtgaaattcgcgcattccgaattttgacctcgaaaatcgagcagctcataacggcgattgagcgatttggcgtcaatcgattggaattggacgtccaaaggccaagcggctgtttcgacttacaatttctgtctgtgtttactctttgctaccacaaagtgaccaatttggttgttcgcattggaccgccaggccaacgggccactgatcattccattctgatcaattgccattatgacacgctgcccgacacgcccggcgctactgacgacgcggtgtcctgtgcgattatggtccacattttggaagtgtttgtacactcggaaaagcctttggaaaatgacattctgttcctcttcaatgctgctgaaaaaaatttcctgcaggcgtcgcatggttttataacggaccacccc

SEQ ID NO: 49045 - DNA, 680 bp, Heterodera glycines
gaggtatatatcaacatacctaattatctgacctgcagttttagcagaatgggcattttaactgcttcgaaagtatgcactttgccacggctttcttccgctcgctctatgacttggtggtggggcccggagaaaaacaatgggcgcgaagttgttggccccactttccacggggatgaattttaccaagatcgtcttgaccgttggtacccgtccattcgatttcgcaaaaatgacgaagtgatcacgcccattcgccacaaggaattgggagattggaagaagttgagcattgaggagaagaagcttatctaccgctactccttccgtcaaactttggccgagtttgaggcactgacgccttatggctatctcacagtcactttgttcttttctatgcttgggcttactattctgtacgcttcgtttgttaggacttacgtgacaaaattcaatgaccgattgcctgacactttcgatgatgaatataaagaaagtcaggccgagcgccgtgtggtactggaaaggggcaatccttatggaccggcctactactacgattacgagaaaaatcgttggaaggactgaagtggacggaaaagtcctactcgaaattcgttggagtgttttttaattttaggggatttttaatggacatttcaaatttgcacattttttcg

SEQ ID NO: 49046 - DNA, 585 bp, Heterodera glycines
gcattttccattaaaaaaataaaatggtgcgcacattgaaattccatgagaaaaagttgctgaagaaagtggacttcatcaattggccggccgagttggacaacagtcttcatgagaacaaaatcatgcgccgttaccatgtggagaagcgcgagcactacacactgtacaacaaactgtccagagagatccgagaaatggccaaacgcatccgcgagttggacgacaaaaacccgaacaagttggtgttggcacggatgctgctcggcaagctgttcgacatgggcgtgattccgaccgcggacacactcgagcgatgtgacaaagtgacggcatcgtccttttgccgccgtcgcctccctgtcgtttgccacaaaatgcaaatggcaccgacggttaggaagtccagccaactggtggagcagggccatgtccgtgttggtgtcgaaatggtcaccgatccggcctttttggtcacgcgaaaccaatcggatcacatcacatggacgcgggaatcgaaggtccgaagacatctcagcacttacaacaacgaattggatgactttgaggggtgttgatttgaag

SEQ ID NO: 49047 - DNA, 614 bp, Heterodera glycines
atgtgtttttggctgttggaagagttgggtccacctctgagaacatcggtcaaaaagttgtttgggttgaagagcacaacaaacgccatttcctgatggatttgctcgatgccagtgagcccgaggcactaacactgattttcgttgaaaccaaacgcggctgtggagatctgagttacatgctccagcaagaaggctaccattgcgtagcaatccatggcgatttgaagcaaatggaacgcgagcgtcatttggagaacttccgcaacggaacggcacccattttggtggcaacagcagttgccgcccgtgggttggacattccgaatgtcaagcacgtgatcaattatgacctaccgaatgacatcgatgaatacgtgcaccgaattggcagaaccggccgtgtgggcaacattggaatggccactagctttttcaacgacaaaaaccggaacatttctcatgaactcactagtctgattgtggaagcaaaccaggaattgcccgattggctcgaagaaatggcacgcgattcaggccgacacggaggcggtgggggacggtcgcaccttggcgccgggtcgaaacgtggaggtggcgggaatcgtttcggg

SEQ ID NO: 49048 - DNA, 714 bp, Heterodera glycines
gatcgaatgtggagctgtacacttgcacttcttcagagtgctcttccatcgactttctctttctcgtgattacatgggtggtgtatttctccattccaatcgcgcttccgcgtccccatcctaagctgatggcacgtgggcttcccccttcgacacagatccttatatgatcgtggagtgcccatcgtccgtatcttaaactctccacaaatttcgaaccgtcaaacaaataaaacttcggcactatcaatgccccggggcacgaccaaaacggcggcacagcgaaggggcgggcggagaccgcgagaagcggaagatcaccagctaacggatgaggacaaagaccgacgggcgaagcgacgcgagcgcaacaaacaagcagcggcacggtgccgacggaggcgggaggagaaaatgcaaagtttgcaggaacaggtggacgaattgcggaagcaaaatgaacgccgggagaatgaaatccgaaaaatgcgagaaaaagagcagcgacttttggaaatgttgcgactgagaaacggcggaattgtgcagcagcagttgcaccaccatttgcaagcagttcacgtccaacaacagcaccaatccgtcgctgatcatccgactgtcagtcggcccacttctcttcttcagccttttctggtcggactgaataacaaaagagattctgtgaagccccggcagtgccatcctcgtcct

SEQ ID NO: 49049 - DNA, 671 bp, Heterodera glycines
gttttcatagtgacttttttccgtgctcctcagctgctcatgtttgaatacatcgaccaacttgacagtgagaacaaacacgaggaggccaattgcctgttggccaagcagagcctgaacaccggcttaaatcagcaggaaattctgtggcgacttgctcggtcatgtgttcagatggcgtacccgctcgacatgaaaaacccgaagaagaagaaactgcttgacgaaggccataagtacgcctgctccgcctacgagctgtgcagcgacgacttcaacgtgttgaaatggactgctgccgcggttggctcacggacggactttctcggcacgaaggagcgcatcgaacagggcaatttcttcagggatgttctcgacaaggcattggccatcaacccggaggagtacactctgcttcacatgcgcggcaggctcgtcctctcggtggcttctctgtcgtggattgaacggaaggcggccaccgtccttttcggcccgccgcccgaagtttcactcaacgaggcgatcagagacttcacggcggtgttggagttggcgccggattggctggagaacactctcttcctggccaaggcgtatttggccaacagcgacagggaaagtgcggtgcaccatttgaaacagctgatcgattcctaccagcagaacga

SEQ ID NO: 49050 - DNA, 445 bp, Heterodera glycines
gccgtttctccctctttcaactttttgcgtcgtccgttgcctttgttggtctttcgtcgttccctttttaaaccgccattggactcaccgttctgtggcatttaccggacaaatggcgaaatttgccggacggatgacattttggtgtgccaacgcaagatgaactatcaccctggagcaaatgtccgccatcaacgggaccggaaccagcacttgttgaaagcggtctgcgacgggacggttgtgatcacacgcgagcactgcgaagtgaacccgaagaacgagtggatgtacgcgcagtacgcgtaccgcgactttgagaacatttacaagctgaccttcaacgtgataccacgacggatgtccaacacatttaaactgatcagcgaagaatgaatgaccgacccgaaattttgtgtattttcgttgttttttatgaatgaat

SEQ ID NO: 49051 - DNA, 858 bp, Heterodera glycines
aacgagggtttggttttcaacattaaatttttacaatttaaatttacggatggacgcggaaacaaaaaattataaactcacttatttttcgtcgagaggaattgcggaacccatccgtcttatcctccattacaaaggcattccgtttgaagacgtcactttcagctcaactcttgccgatgagtcatcgcgagaaaaatggctgaagcagaaacaaaactatctttacggccaattgcccaacctcgaatgggacgagggaactgagcacaaagttttggcccagtctcaaacaatttgtcgttatttgggcaataaatatggtttggccggaagcgacttttgggaagcggcaaaaactgatgaaattgcggaatggttcaaagacatttgggccgcgtttctgccctttttgaaagtggcggtgggagccgaggcgggcgataaggaagccatgaaaaaggaaattttcgtgccgctgatttatgaccgtttggtgacgacgctggtggaaatgctgaacaaatctggctccggctttttgcttccgtccggcctcacttgggctgactttgtctttgccaatgccttaaccacttttaacaacatggacaaaggccttctgttcgaaagtcacaaagtgttggccgactacgaaaagcgcgtttattcggccaacgaatcgataaaaaaatatgtggaggggcgcgaggccaaagaattttgacggctcgcaattcgatgatgatttgttgatgacaattaatgctttttttaatgtttttgactttaaggacaagtaaaaattttctaagcttaaaaaaaaaaaaaaaaaaaaaagaaaaaaaaaaaaaaaaa

SEQ ID NO: 49052 - DNA, 581 bp, Heterodera glycines
aattaaccgcatatttgccactgacatcaccatggcggacattcaaactgaaaaggctttccaaaagcaagccatcttcttgaacgccaagcaggttggcgccaagaagcgcggtcagcgctggtacaaggatgttggtcttggcttcaagacgcccaaggaggcgatcgagggtcactacgtcgacaagaagtgccccttcaccggcgacgtttctatccgcggccgtatcctcaccggcaccatcgtgtccaacaagatgaagcgtaccgtcatcttgcgtcgcgagtacctccactacgtcaagaagtacaaccgttacgagaagcgccatcgcaaccttgccgctcacttgtcgcccgctttcgttggtgtcgagtccggtgatgttgccaccgttggccagtgccgccctctctccaagactgtgcgcttcaacgtcctcaaggtccagaaggccattgctggctccaagcagttcaagaagttctaaaatcttgagttttggacttgtgctgtgcctcgttgtgtgcttgctgctcaatgcttgtcacccaataaatttggttcctctgaaaaaa

SEQ ID NO: 49053 - DNA, 616 bp, Heterodera glycines
ggaggctttttacgactttaaaaaatacggcgcttcttacatattgcccggtgacgcatcaacgcatacgcctgtcctattccgttatgttgtttttcaaccaatgataaatgaaattcttgagggcaacatactgcgctcgaaccaggaagggatcacaatcagtatgcagtttttcagcgacataacagttgcgccagacaaattgcctgcagtttctaaatttgatgagtctgttcaagtttggagatgggagtatcaaaatgaaaatggtgatatcacgccattctatatggatccaggaaaacgcgtaagatttaaggtgataagcgttaagtatcaaaatgtcgaaccgggcgctcctccagaagccaccaaagctatgacgattgaggcatcgatgttcgatatgggcttgggttgtgtggcatggcgggaaccgcagtgcgcaagtgaattgaaacaggaagcaaatgatccaagcgaagatgaatagtaacaaacgaattgaagattttgttattgttttatttgctccaacggattcttttttaaaaatgttccatggaaatggcgcggaggcgggcagacgagacagggtagacaactcggaggg

SEQ ID NO: 49054 - DNA, 516 bp, Heterodera glycines
ccaagtttgagctgttaataaaagcatagaaaatgccggaacgtttgacttatcgtagaaggctttgctacaacacaaagtccaataaaacgaaagtggtgaagacgcccgggggacggaatgtgttccactaccgcaataagcttggttcaatcccaaaatgtggcgacaccggtgtgccgttgaaggggattaaagccgcgcgtccgcgtcaattggccaaaatgacaaagcgaaagaagacggtcacgcgcgcttacggcggttgtctcagcgctgcggctgtccgtcaacggatcatccgcgcctttttggtggaggaacaacagctggccaacaaaatactgaaggcgaaaagtggcggtgggaagaaataatgcggaagacggacggacgaagacgggcggacagttcggtcattttaaggacggaattatttttgttgcttttttgttacctttgtgagtaaaagcattgctctgttaaaaaaaaaaaaaaaaaaaaaaaaaaaaaaaa

SEQ ID NO: 49055 - DNA, 630 bp, Heterodera glycines
acgagggtttgagaaaaaaatttttgtgatgcgaaagggctaatgagattctcgcccagaatttttccctcatttttgcagcaattaatcaacagaaattttctagccttgcactgtccccttccggcaacttcggcggccaaattctcaaccgacggaaagtcggacgtattttgcgcttcgcttttgcacaacgaactttgcgaaaagctcgataagcgtaaggaagagtggaggaagcaaaggccgggaacgaaggaatatacggcgaccaaagaacagcttaaccaattgcaggaagaaatcatcaaaatcgaaaactccaaatacgaatttttgcatactgaaagggacaaaatgagcattgctaaccttgttttggcgccaactcaagtcacactggaggtgatcagcaacgggaccacccacctgcgcccgtcggtggtgctccgtacgccgctgaatgcctacttgttcaactgccccgagggcatttgccgctttttgcccacctttcggctgaggacaaatgccatcaacgacatgttcttcaccaaggccaattgggacaacacgggcggaattgcgtcagtgcttttgaacaaagaaaacactgacgaaactttgcgg

SEQ ID NO: 49056 - DNA, 734 bp, Heterodera glycines
gagtactctacataaagaaacagaaacagacatttctgttggcaattacggctcttacggacttgttcaatcgtctgagaagcgggaggatgttgtttttgtagaaattgagaaaataaatgctgattttgacggaaaagagatttggcttcgtggccgtctccacgactctcgcggaaaaggcaaaaattgttttgcgaaaattcggcagcggattcacagcgtacaggcggtgttattcgtgggagcagacattagcaaacaattcgttaaatttgtccaaaacattcccaaagaatcaattgtcgatgtttatgggcttgtggcgcgcacccctcagccggtcactgcttgcactcaaagcgatgttgagattaaagtgcacaaatttttcattgtctcgcaagcagagcctcggcttccgcttcaacttgaagacgcggttcggcccgacaacgaccaagaggaattggccgtagtcaaattggacactcgtttggacaacagagtgctcgacttgcgaacgccaacgagtcaggcaattttccgtttgcagggtggagtttgcgacgcctttcgcaagattttgtcctctcgcggtttcatggaaattcacactcccaaaatcatttctgctgccagtgaaggcggtgcaaacgtttttgaggtttcttacttcaaaggccatgcttttctggctcagtcgcctcaactttacaaacaaatggcaattg

SEQ ID NO: 49057 - DNA, 1041 bp, Heterodera glycines
gtaatgtgcggcatcttcgcttacctaaatttcttttcgccgaagaaacgctccgaaatcatcgacattcttttgcaaggactccgtcgcatggaataccgtggctacgattcggcgggcattgccattgactgcagcaacgacgtgaatctgccgcatgccgacgtcgctgtgtatcgcaagacgggcaaagtggacaatttggacgacaccatcaaaaattccgaaggcgtggacatggacttcacctacaacgtccattgcggcatcggacacacccgctgggcaacgcatggaaagccaaaggacgaaaatgcgcacccgcaacggtcgaactttgacaacgattttgccgtggtacacaacggaatcatcaccaactacaaggagatcaaggactatttgctgaccaagggctacaaattcgagtcggagacggacaccgaagtgatcgccaaactcacgcaacacatccaccaacggcacccacactacggcctccggcaactcgtcgaaattgtcgtgcaacaattggagggtgcttttgcgttggcgttcaaaagtcgccgttttcctggccaattggtggccactcgtcgcggcagtcctcttttggttggcattaaaagtcagtccaagctgaccactgaccatttcccggtcttctacagcagaccacgccgtggccccgtttcgctggtgttcgacgaaagttgcaccactgcgatggaaacgccaaacaaactcaacgcttccgacatgttcgcctctttcagcgctccttttaatgacacaataaattctacggcacgtaaaatcgaatgcagcgattcgacgcgaagtgttcggccatgcgacttggcaaactttgaggtggaatatttcgtggcgtcggatgcgagcgccgtcattgagcacacgcgtcaggtgatctttctggaggacgacgacgtcgcatttgtcgaggacggcgctttgtccatccatcgcatcaaacgcagcgacgacaccgctgctttgacagaacagacgcgagaagtg

SEQ ID NO: 49058 - DNA, 467 bp, Heterodera glycines
gtccaattaagttattttccgttaatttcttcattttcgttcgcttgcattttgttcttccgtaattatgggcgacagaaaggcggtgattaaaaacgcggatatgaccgaagagatgcagcaggaggccattgagtgcgctacgcaggctttggagaagtataacattgagaaggacatcgctgcgtacatcaaaaaggagtttgacaagaagttcaacccgacatggcattgcatcgtcggacggaacttcggctcttacgtcacacacgagaccaaacacttcatttacttctacttgggccaagtggccattcttttgtttaagagcggctgatccgactttttgagacgaacggaagccgacgatgcaaaaaacttattatggccgtgctgtaagacagttttgtcatttcatcaccaataaatacttttcaaaaaaaaaaaaaaaaaaaaaaaaaaaaaaa

SEQ ID NO: 49059 - DNA, 457 bp, Heterodera glycines
cagcattccaattaaaaatataattattttcgttatttttacacaaataacaaataaatattcatcatggcaacaccaaaattgtacaaattccatgtcgaaatgacctgcgaaggctgctcaaatgcagtgaaacgtgtacttggcaaattggaagacaaggtaaagctgctcagtgtggacctgaacgccaaagaggtgcaggtggagagcagcagtatgggccaagatgagattctcgaggtgctgaagaagacgggcaaagcagtgagtccgatcgaatgaggaacgcattcgatgtgatcaggattattccacctcctttttttttggccgatgcgatcagttccctgttgtaccctttaaacattccattccctcctctccatactgatcagtgatcgatggtcatttattaaaaaaagaatttaatcaaaaaaaaaaaaaaaaaaaaaaa

SEQ ID NO: 49060 - DNA, 642 bp, Heterodera glycines
gtccaaataagattgaccaatcaaaaaaaaataataatgttgagccgtttctctaaaattattgtccgtggatatgcaaaagatctcaacctgaaggaagtgttggcaaacaaaattcctgaacacaacaaaaaggtggtcgaatttcgtaaggcccatggctctacagttgtgcagaacatcaccgtcgacatgatttacggcggaatgcgttccatgaagggcatggtcactgaaacttcggtgttggacccggaagagggcattcgcttccgtggctactcaatcccggagtgccaacagaagttgccaaaggcagagggtggtgaagagccattgcccgaaggcatttggtggttgttgtgcaccggcgaaattcctgaccagaaacaagtgaacgcgatcagcaaggaatgggcatcgcgtgccgatctgccagcccatgtggcccaactgttggagaatttcccgcccaatttgcatccgatgtcccaattcgtggccgccattgccgcgctgcaaagcgagtccaaatttgccgaagcctactcaaaaggtgtgccgaaaagtacctactgggagtatgcgtacgaagactcgatgaacctgctcgccaaactacccaccattgcggcaatgatt

SEQ ID NO: 49061 - DNA, 750 bp, Heterodera glycines
cgaaccgccgatgaggcgatcgttgccactgtgagtaaagttggcgagaatattcaactcgcccgagcatctgtcatttcttcttcaccagcgaacaaactttttggccaaacccatccaaaagaggaatttaacggcgttcaattggggcgttttatttcgttggtgtctttgggtcacaaatcggatgagagtgtttctgactttccaacagcacaacttggccaagtgatttgtcagcacatcattggaatggcgccggaaagtttgggtgaaccaaggaaaaagggagctaaacgggcaactcaaatggaaatcgttgacaatggggagggaacggagaaggaacgctcagctaatgcggaaaatgaaagtgacaccggagaagaggaggatttgaacgcttcacaagttgaccaatccgagctgacgagaatggacggagaagaaactcagctgttgcaccagccattcatgctcaatcctgaacagactgtcaacgaatatttggaagcacatggggcaaatattgcggatttcttgcgcattgagatgggccaagaacacaccaagacaaatgacctcgtcacacggtcgaaaggatttagttttctcggctattaaattacgccaattccctggcaatctcgttaatgagcacacgtcggcgttccccagttagaatcactcaagaaatggcgtaattttaatcaagaaaagacagtataaaaaaaaaaaaaaaaaaaaaaa

SEQ ID NO: 49062 - DNA, 503 bp, Heterodera glycines
ttacagagacgagggtccatttaagctttacatcccgctgatcactttcggccctttttcatctgtccatcgccaaattggccccaatttggccatcatttttctccggcactttgtgccaatgttcgccgtgttcgcttttgtgctcctttggcacggactctcccccaattacttctggtgggatactctcagggcaaccgcacttatcgctgaacgcataggacactcactgcccaaatggcacacaagtaggccaaatttgttcagaggcgactttcgtccgacttaaagccgcttctatgcttttcactgtgataccaggcatttttggcattttctttttcctcggcctcaacggcgtcggcgccttcgttttccgttctctccttttggacggtctctcgcaaattttgtccctccgaattttctcttcaaattcggctggctttgtgctgctccatttttttctgctcggcttttgctttaacaacgtttgctta

SEQ ID NO: 49063 - DNA, 565 bp, Heterodera glycines
tttggaaaaagtaaatttaaaaatggtcgcactccgtgcccaatttgaggcgagcaatgatgtcggagttttctgtaaactcaccaatgcttattgtctggtgggcattgcttcttccgaaaatttttacagtattgtggaggctgagttggccgacgtcatcccggtcatccattgcacagttgcgggctgtcggattgttggccgtgtgacggccggtaatcggcacggactgttggtgccgaacgcgaccacggaccaggaattgcagcacatccgcaacagtttgcctgactcggtccaaattcgaagggttgacgaacggttgtcagcgctgggcaatgtaattgcatgcaatgaccacatcgctgttgtccacgcggacataagcaaggaaacggaggcggcgctggccgaagtgctcaaagtggaagtgttccggctcagtctcggcgaaaatgcattggtgggctcttacgcaacgatgacctcaaacggtgcgttggtggcggcaaaaacaccgccggaggtgcagcgcgaattcacctcgctcgcccaagtgccg

SEQ ID NO: 49064 - DNA, 684 bp, Heterodera glycines
gcccatacacctcgtcgctgctctctccgcacttctcaaccccacctcctccatacacacttcaccatggctgaccaacttaccgaggaacaaattgccgagttcaaggaagcgttctccctcttcgataaggacggcgatggcaccatcaccaccaaggagctcggtaccgtgatgcgctcgctcggccaaaacccgaccgaggccgagctgcaagagatgatcaacgaggtggacgccgacggcaacggcaccatcgacttccccgagttcttgaccatgatggcccgcaagatgaaggattccgactctgaggaggagattaaggaggccttcaaggtgttcgacaaggacggcaacggctacatctctgccgccgagttgcgccacgtcatgaccaacttgggcgagaagctctccgaggacgaggtcgatgagatgattcgcgaggccgatgttgatggtgatggtcagatcaactacgaagagttcgtcaagatgatgatgtccaagtaaactcgtacaccactgtccctttgaccagatcccgccaagtccccctttgtcttcggcaccacatctttccccttgtttttttccgtcccgcatcctaactatgtcttcttgtctgtcattataatttgaaacgttttcgtgggtacaacaccctgtcccatttgtttt

SEQ ID NO: 49065 - DNA, 868 bp, Heterodera glycines
  unsure (1)..(868): unsure at all n locations
attttaattaaaaaatggtccaacaatacaaattgtattattttgacctgcgtggtttgggtgaacccatccgccttttgcttcactatgttggccaaccatttgaggacatccggtttaaagacatggaagaatgggagaaaacgtacaaacccaaatttttctacggaaaggccccagttttggaggttgacggaaagccattggcacaaagttcggcaattttgcgctaccttgccgaaaaatttgacttggccggcaaagatgaatgggaaaaggcgaaggctaacgaaatcattgactttctgaaggatgctaccactgatttgctcccgtatttgatggtcaaaatgggacgccaagaaggcgatttggacaaattgcgtggcgaagtgttcgagccgggagtcaagcgcatttttccactttttgagaaacttttgaaggagtccgggtcagggtacatgctcaagtccggcctctcaatggtggactttcaagtggccaactttctgtacagctttaccatgttggagccggacaccatcaatgcgtacccggagctgatcaaatacgttgaccgtgtccatgcgctgccccaactgcagcagtatttgaagcagcgcccgcaggaccgctgatcagtgatcagaaaagtcgagattgaatgagaaaagaaaatcaatcataattaccgattttttaatgagaaaaatcaataattgagaataattatccgatcagctttttgatgagacaaaatgcttattttgattgttgcttcttactgtttatcaacatttagtttgaccattattttatgataaaaatcagtttgaactanaaaaaaaaaaaaaaaaaaaaaaaa

SEQ ID NO: 49066 - DNA, 495 bp, Heterodera glycines
  unsure (1)..(495): unsure at all n locations
tggccaggacacattcttcgaccagggctgtgtccgtgccacgtgtctttcgtgcagtccttcgggccaattcatcgcctgcggttctaacacgggaattgtcaatgtttacgacctgacaaaactctctccgagtttggccaagtcgaatgcaccaagaccagtacggatgttcgaccagctgaccactttggtgtcattcgttcgctttaacaacgactcgcaaatgttggcatttggttctgcagtgaagcgtatgtccggtcgcgtggccaattgttcttccggaagcgtatttcaaaatttccctgctaaacaagagcacttcgccagcgacaaattcacaacttgcgatttttccccgaatagtgcctttttttcctttggcacaaaacaaggaaagatgagactttaccagttacaccattctgatgtttactaaattttgatgttattaatttgataaattttaacaacttagncaatcatttaaca

SEQ ID NO: 49067 - DNA, 685 bp, Heterodera glycines
cctcgtgccgaattcggcacgagggtttgagaaaggattttttctttttttattattccggcggcacatcatttctagacaattgcctcaaaatgagcgtttctccgccgattgctttcccttcgccttctcattgccatttttcttccattgaaagaaatttctctccgttttctgtcaattctcagcccgggcttcgctatttgcgccacgccagcggagttgtggtgctgacgttggacaaaagccatgtgttgatgcgggatcagtgcaaaaacattgcccaagtgttgtgggacatgtcgttggcaaagacttcgtcggccaaaagcaatgaaagcaaagggcgaaagagaggcgtggaccgtagcaaattggagccgactggaaagggaaaaaagggtggtcttccgatgtcgccgcagacacgcatttgtatcattcgcgacagtgatggggtggactatgtgattcgtgcaggcattcgcgcaactctgctggaagtgaacgacgaatggttgacaaaggagcccaatttattgcgtacagcagcggataaccaaggattcatcgcaattttgatgccaccaatcagcggaaatggattgcgcaatatgaaaataccaaaggaatttgacgggacagaagggggagaacgacgggacagagaaacggtgtggggcgg

SEQ ID NO: 49068 - DNA, 1249 bp, Heterodera glycines
tgacaaagacgacagaacggcgatcaatcggatgaccagcgaagagaaaaaggctttggacagcagttacgaagagatttacaacgattttcgacgtgctgcagaatcgcacagacaaacgcgaaagtacgtgaagtcatggattaagcccgggatgaagctgatcgacatttgtgagcgacttgaagcgcacagtcgtcgaatgatcaacgagtcgggactggaggctggcctggccttcccgaccgggtgctccattaatcattgcgccgctcactacacgcccaacgccggtgatgagacagtgcttggaccctccgacgttgtgaagattgactatggaacgcacgtgaacggtcgcatcatcgactgtgccttcactttgacattcgacccaaagttcgacactctcttaaacgccgtgagagaggccaccgaaacgggcattcgcgaggcgggcatcgatgttcgtctttgtgacattggcgaggcaattgaagaggtgatgacttcatacgaacttgaactcgacggaaaaaccttcccaataaaaccaatacggaatttgaacggacattccattgggccttatcgaatccatgcaggaaaaacggttccaattgtgaagaatggcgagcaagtgaaaatggaggagaatgaattctttgcaattgagacattcggaagtacgggtaaaggacatgtgcacgacgacatggaaaccagtcattacatgaagaactacgacctccatgaggagcacattcctctcaggtgaagtgttaatccaatgcgtaaaaaaagggtttttatttgtataagctaaatcgtttcagactcacgcgtagcaaaaaacttcttgccacaatcaacaagaacttcgggactttggcattttgtcgccggtggttggaccgactgggcgaaaccaaatatttgatgtcactcagagacctttgcggtttgtaatagcttctattgcacactttggcaacaaaaacttttcagagaaggacattgttgcgccttatcctccgctctgtgatcaggtccaaagcccatggcaaattaacgcctttttcacatgtttcacttttctacagaaaggctgttacacggctcaatgggagcacaccattctcttacggccgacatgtaaagaagtggtgagccgtggcgaagattattgatggatgagttggtgaattggcggatggaggcaaagaattggccaaaatggcgtaaaaag

SEQ ID NO: 49069 - DNA, 625 bp, Heterodera glycines
caccatgtcgtccgcttcgcgcttcaacgaataccaggtggtgggccgccaccagccctctgagaccaaccctcagcccacgctctaccgcatgcgcatctttgcgcccaacgcggtggttgccaagtcccgcttctggtacttcctcaagaagttccgcaaggtcaagaaggccactggccagattgttgccgtcaaccaagtgcttgagaagaaccccactcaagtcaagaccttcggcatctggcttcattacaactcgcgctcgggtacccacaacatgtacaaggagtaccgtgagttgacccgcgtgaacgccgtccaggcttgctaccaggacatggctgcccgccaccgtgctcgcttcaggtcggtgcagatcatccgcgtcgccgaggttgccaccaaggacgtgcgccgcccctacattcagcagattctcgagaagaacctcaagttcccgctcccccaccgcgtgtaccgtgccgcctccaagcgccacaactcgctcttcattgcttcccgcccctcgacccacgcttaagcgtttgcgtgtttgcattgaagaattggttggctgccgtgtcggtgatgtgcagtgtgtggtgacgctttgcggatcgag

SEQ ID NO: 49070 - DNA, 394 bp, Heterodera glycines
gtccaattaagcatttctctgcataatttattccaatgctaataaaagtgaaaacgctgaccggaaaagaaattgagttggacattgagccgacagacaaagttgatcggatcaaagaaaaggtggaagaaaaggagggcattccgccgccgcagcaacggctgatttttgcgggcaaacaaatgttggacgagaagacggcgcaagactacaaaatccagggtggctccgtgcttcatcttgttcttgcccttcgcggcggatgaatgttcgccatttggacgcttttgttggataaatgatttgattgtctaatgtctcactgactttttaaaaatatttaaatacaaacataaattgagttccacttaaaaaaaaaaaaaaaaaaaaaaaa

SEQ ID NO: 49071 - DNA, 576 bp, Heterodera glycines
gagtgctgaaatattgtagacattcaaatggtttactacaacaacgcctccagctacattcagtggcaagtcattcgcaaaaacagcgccttcctcaaacgtcagcgtggcatcccgaaacacttcagcaccgagccgttcaacatggcgcgtctgaacagcattcgacacaacggaatgatcaacaaaaaggcggtggacatttctgctgcgaaggacggcaaaggagtggttatgagtgtaaagaagcacaaaaatgtggcgaaaccattgcaggcagttgccagcacagcgttgacaagagacagtcgccgggtgatctccgccgtcggaaatgcggtgaccgcctacaaaccgtcgcacgcgaagctggcgcagcgacgcgcctcgcaaatcctccgctcgcaaaaaaccaaggccaaaccagcgacagtgcgcaaaggaaaggccgaatgaacgaggggattttgtggctgaaagacctttaaatgatcgaaaaatgttgttgtttttgttgaaattaattggaaaagaaccattcccgtgggaaaccaatgtttagctcggaaagaaccg

SEQ ID NO: 49072 - DNA, 732 bp, Heterodera glycines
gcgtgctttcctttcctctcgcgatgaagatttgtccactttttggaccaaagatgtctgctttttgtatgattatttccgtgtggggaatcgtctttctaggccttcttggcgttttcttttatatgcacgctgtgactttgtttccagaccttcaccttgaggaagaagcaaagctagaaagacaaatggtggaagaaaagtacgaggaaaaggcgaaacaatgctggatagctgcaggcatgtatgtggtcactttgattgcagtgttttggcaaaaccgattcaacaccacacaaattttataattcgttttcaatgacaaatttattcgttcattatgttacacacattatttgtaaacaaacatattttaagaccatttgattaaagaaaattttctcctaccccagcagactattgtaaatctcccatttattaagatccgttccaaatctattttttcttctgggtcagtcgcttttgtcccgtttatcttcagtgcaccagctctcatcaaatttattccatcctgttttgtcattgcggcgagatcacccattgtctttatcgaaccacatacaatttcgaaggttgaggccgagccgaacatttctgtgatttcatccgggttgagattttccagttccgaactcgaagcgcctaaacattagacattaaaattcaaatatttaatttgtggtattcaccatcgaataaaattttagagca

SEQ ID NO: 49073 - DNA, 815 bp, Heterodera glycines
gtgatgcgttctccatcaccgaccgataatgacaaagcgcgttccttaaatgtgtacagacgtaaattggccgaatataaagaaattgagaatcggcttaaggaattgcggactaaggaacgcgaaagtcacaaattgttcgacaagtcggaaaatgagattaaatcgcttcaatcggtcggtcagattgttggcgaagtgcttaaacaattgacagaagagaaattcatagtcaaagcgaccaatgggccacgatatgtggtcggatgtcgtcggaccattgacaaggagaaactgaagcagggcacacgtgtggctttggacatgaccacgctgaccataatgcgccaacttccgcgcgaggtggacccgttggtgtacaaaatgagccacgaagaccctggcaacgtgagctatgccgaaattggaggtctctccgagcaaatcagagaactgagagaggttgttgaactgccgctgatcaatccggagttgttcaaacgcgtcggcataacaccgcccaagggctgtcttttgtacggaccgcccggacctcctggcgcgcccggtcagcccggccagcctggaaactctggccagcctggacagcccggagcaccgggacagcccggcaaggacagcggctactgtccgtgcccgccccgctcttccgtgttggcagtcaaaaagaagatggcggcagccaagaaagcataagcgacaagcgcagggagaagagaaccgaaagacaaaggaccgacgcgaaagcgaagctgaagatgatcataattgggtggaagttgttgtcggaattt

SEQ ID NO: 49074 - DNA, 1257 bp, Heterodera glycines
gtccaattaaggccgaccaaattttccactcattttgcgtccaaaacattccatccaaaaatgaccatttctgcgcccgctgacgttgacaagctccaggatgcggccaaccgaatgcgcatttcgtccattgagcagacgtgcgccgccaactcgggccacccgaccagcagttgcagcgcagcggaaattgtggccactctgttctttgccgaaatgcgttatgacgtgaaggacccgcgcagcgcatccgccgaccgtttcattctgtccaagggtcacgcttgcccaattctgtacgccgcttgggaagaggcgggcctgctcagccgtgaccaagtgctctccctgcgcaagattgactccgacattgagggacatccgaccccgcggctcaacttcatcgacgtggccaccggctcgctgggccagggtctgtcatgcgctgccggcatggcgtacactggcaaatatgtggaccattcgtcctaccgcgtgtactgtttgatgggcgacggagagagtgcggaaggctccgtgtgggaggcggcagcatttgcaagtttctacaagttggacaatctggtggccattgtggacgttaaccgacttggacaaagtcaggagacccaactgcagcacgacattgaagcgtatgtgcaacggtttgccgcgttcggttggaatgccatcggattggaggacggacacgacattacggcacttttgaatgcttacgccaatgccaagaacgtgactggcaaacccacggcaatcatcgccaaaacgctcaagggcaagggcattgacggcgttgccgacctgaacaaccagcacgggaagccggtgtcgaaggacaaggcggagcccatccgggcattgctcaaaagtgacaagccggcaaattggaccatcccggcaccgattcgggacgcaccggcggtcgacttaggcatcggtgccatcgcaatgagtgcaccgccgcagtacaaaatgggcgaaaaggtggccactcgacaggcgtacggaaacgccttgctgaagctggcggaggccaacaaacgcgtcattgccttagacggtgacatctccaactccaccttctccaacctggtgcaaaagaagctacccgagcagtttgtccagtgttacattgctgagcagaacatggtcggtgttggagttggcatggcgtgccgtgggcgtgtgcttccgcatgtcagcacttttgccgccttcttcacccgtgccggtgaa

SEQ ID NO: 49075 - DNA, 561 bp, Heterodera glycines
cttgagaaatgttgaaggcaaagcctcatgttctgttcgtccaatgtcggtttttgcgaatgatgaaaagcattcctaaggacagcaaattcactgccaaatttggtgacacttccatgttcgattttggcgaggttcggacgagtctgctgaggaaggggcaagcgccggaagagaagtgcaagcagttgttcccgacggaccccgacgcaccgatccaattgggcttcaacccattccaacgggccgaccgaaagtgtctgttgtgcgagctgggcatccaattggactacaaaaacggacggctgctccaacagttcgtctccaacttcagcgggcgcgtgtacgaccagcacgtgaccgggctgtgcaaaaaacagtaccagactctgttggccaccatcgcgaccagtcgcaaggctggctacatgccggtgctggtgaaggacgccaaatatttgcgagacccgagactgtttgacccactgaaaccgatcagaacccactcatacgattgaatgacgcgcatcaaattttgtttgcaattccaccatcatttta

SEQ ID NO: 49076 - DNA, 675 bp, Heterodera glycines
ccatgcccgtcctgaaaagggagttcgtccgatccgaaccctggaataaatttttggcttttccaaaagattatgactttgcgtttgggttctaaattaaaattttccattttactccaaaatgttggaatcagaaaaaatccttttcgcaattcttataactatccgattacttttgaacacgtggttttcccgccaaataatcagtttaagttgccaacaatgcctcctgagcccatttatgacgagtcattgggagaaacgaagcacaaattgactaagcagtttattgaagcgaggggatttgagccaatccacacggagttgatccacaagcagtacggcttggtggcgatgagcggtggttttatcaaagccgaagactttgcatggattcagcaggaagtgaatgagaaattagtcgataagcaattcgccatttggcgcgttaacgccccgtggcttccgcgggtgcggcgtccgccatcaacaaaaaagggcggtgggaaggggcccatccatcactacgagacaccggtcagaaccggacgggtcattgtggagctcggcgggtaaagcactgaacaggaggctcggtcgatggtgatgcatcgctatgagcatatgccattcccagtggaatgtgtcagccaagaattgatggacaaacgcagg

SEQ ID NO: 49077 - DNA, 559 bp, Heterodera glycines
gtccaattaagatttttctcaatttttatttttggaattccaagagccaacggtcagtaagcgcgatgaagcttgtccgctttttgatgaaattgtcccatgagtctgtgaccatcgagctgaagaacggcacacaagtgagcggtgctattcagggcgtcgacgtggccatgaacattcatttgcgctcggtaaaaatgacagtgcgtggacgagagcaaatcagtttggacacactctccatcagaggaaacaacattcgctatattgttcttccggattctttgccattggacactttgctcatcgatgacgagccgcgcaagaagcccactcaacgccgatttggtggccgtggaggacgcggtgggccgcgcggacgtggacgaggccgcggagggcctccacgcggcggcggcgggggacgacgctgatgatggaccacaatgggagaagggatcagtgtctattgttgttgttcatttcaaaccactggctgaacatctcatttatttttctgatataaaatggggttactcgaaaaaaaaagtcggactac

SEQ ID NO: 49078 - DNA, 879 bp, Heterodera glycines
taagaactccatttattgtgatcaattattgttggctcgtcaacatgacaacaacgggatggccagcggttgtgaacagcactgcccataatgcgctgttgtcccagaagaactacagcaaccttaatcggactatcaatctgtatccgctcactaattatacgtttggtacgaaggaaccccaatcggagcgagaccattccgtacaggcgcgtttccagcgattgcgcgacgaatacgagaagacggggatgcgccgaagtgtggacggagtgctgctggtgcacgagcattcgctgcctcacgtgttgctgcttcaaatcggaacaactttcttcaaattgcctggcggtgaactgaaccatggcgaagatgaggtggacggattgaaaaggattctgaccgagacgctcggtagggatgacacgccgaagacgcaatggatagtggaagacgccatcgcacagtggtggcgtccgaacttcgatccaccgaggtttccgtatgtgccagcacatgtcaccaagccaaaagaacagaccaaattgtttttggtccaattgcctgacaaagcttttttcgctgtccctaaaaattttaaattggtcgctgcgcctctttttgagctatacgacaattccgcaggctatgggccgctgatcgccagccttcctcaaattctgagccgcttcaatttcctctacaactatgcttaagtggctctgccgttctccccgcttcgctttatgatgacgaattcttcatttgtccgatcattttctgttgcaccaattggttgcttgttaaatctcatctcatctattttcggtcctttctcatcgtttcgaattcgattcattgtttgttccattatttggt

SEQ ID NO: 49079 - DNA, 690 bp, Heterodera glycines
ggtctccgcctcgttggacaagccgatgttgttgaagcgcaaggaggccaagacgtacggtaaaaagcagttgatcgaaggccgtttcgaggcgggccaaagcgcactgatcatcgaggacgtggtcacctccggtgccagcgtgttggagacggtggccgccctccgtgcggttgggctgcgctgtgtgcacgtcttttgcgtgttggaccgccagcagggcggtgagcagcgactgggccgggaggcggacattgttttacggagtttgctttccatgggttcactgttggactttttggtagcagtgcgggaccattgacgcgggcaaaaagacgcaaattgttcaccaacttcaaaacccgatctttgacgacagcgccacgcatttgcaggagcaaaaaacggagaaaaatgaagcagaatgcgtgccattggtggtgtcctcctccgtcgtgccgacgacgacatccgtcggttgggcccaacaatttgcggacggcacactgaaccggcggttggcacaaattatggtggccaaacggaccaacgtttgcctggcggtccactgcacacactgggaccaaattttggagattgtttccgccgtcaaagaacatgtctgtgccgtcaaattgcaccacgacattgtggtggactttggcgctgaatttgtggccaaattgcaca

SEQ ID NO: 49080 - DNA, 954 bp, Heterodera glycines
caaagatcggttttctctctttcgaggcgtttttacgtgtcctacgcgcaacctcagcagaaagtgcaaacacataaacgggagaagccgcatttgaacgtcggtacaattggccacgtcgaccatgggaagacgacacttagtgcggccattacgaaagtgctctcacggcagaaaaaagcgcgctttgtcagttacgaggacatcgacaagggcgcggaggaaagggcacgcggagtcaccataaacatagcgcacattgaatacgaatccgacaatcgtcattatgcgcacacggactgtcccgggcacatcgatttcataaagaatatgatcaccggcactgcccaaatggactccgccgttttggtcatcgcagcggacgacggagtgatgccgcagacgcgggaacatttgctgttggccaaacaaatcggactgcgcgagatcatcgtgttcgtcaacaaaaccgacttggtggacacggatgtaatggaattagttgaaatcgaagctcgcgaactgctcaccgcctacggcttcgatggagagaatgccaaaattgtgtttggttctgcccttcgggcactcgctgatgacgacgacaagtgcattttggagttgatcaatgcgctggacggactggaggagcccgtgcgtacagagaacggtccatttctgatgccgattagcagcaaatgcaaaatcaccggccgtggcagtgttttgattggcaccatcgaatcgggcacagtcaaaaagggcgacacgttggaactgttggggcaggaatatgcgcagaagacactcattgcggacattcacgtgttcggcaaaagcacagcgcagagttcggccggtgaacacgtcggtctgctgtgtaagaatctttactatgatccaatttcgcgtggtttttggttgacaaagccgggaacagtgacgccaacgaac

SEQ ID NO: 49081 - DNA, 812 bp, Heterodera glycines
gagcactgtgtcgacaaactaatcttattacattgcgctcgaatatgacaattcactctcgtaaagtggtggcctactattatgatggtgatgtcggcaattactactacggccaaggccatccgatgaaaccccaccgaattcggatgactcacaaccttctgttgaactacggactctatcgcaaaatggaagttttcagaccaaaggctgcgtcactagaagaaatgactaaatatcacagcgatgactatatgtgttttctgaagagcataaaacccgacaatatcgccgattttggtcgtcaaatgcaacgcttcaacgtgggcgaggactgtcccgtgtttgacggtctatttgagttttgccaaatttcaagcggtggctcaatcgcggctgcaactaaaattaataagaaacacgtggacgtcgcaattaattggatgggcggacttcaccacgccaagaaatccgaagcttccggattttgctacacaaatgacattgttttggccattcttgagctgctgaaataccatcaacgagtgctatacgtcgacattgacatccatcacggagacggagtggaggaagcattttacaccacggacagagtcatgacggtctctttccataaatacggtgaatatttcccgggcactggcgacttaaaggatgtcggcgccggaattggtcgttactatgccgtcaattttccattgagagacggaattgacgatgaaacttacgagcgcatttttgcgcctgtcatggagaaaatcattggcgcctatcagccttcggtcattgtg

SEQ ID NO: 49082 - DNA, 783 bp, Heterodera glycines
attgctcacacccagatgaaactgatgaagcaccgcaacaagaaggcacacataatggagatccaaatcaatgggggtaccgttgccgaaaaagtggactgggctcgtgagcactttgagaagcaggttcccgtggagcaagtgtttgagcaggacgagatgatcgactgcatcggtgtcaccagaggaaagggtttcaagggagtgaccagccgatggcactgtaagaagttgccgcgcaagactcacaagggtctccgcaaggtggcttgtatcggtgcatggcatccgtcgcgtgtctcattcacagttgcgcgtgccggtcagaagggctaccaccatcggacggagatcaacaagaagatctaccgcattggcaagtcgtgtttgacggccgacggcaagaaaaacggaatgaccgacttcgacatcactgagaagaacattaacccgatgggcgggttcccccactatggtctggtcaatcaggactttctgatgatccgtggctgttgcattggttgcaagaagcgtccgatcacattgcgcaagactttgatcaagcagaccaaacgttttgctttcgagaagataaacctgaagttcatcgacaccagctccaagtttggccatggacgcttccagacgagtgcggagaagaaaacattcatgggcaaattgaagaaagactttctggcggaatcggcgtaaaattggccaatttcattgtttattattttgttgaaagtaaagaattgttgtgttaaaaaaaaaaaaaaaaag

SEQ ID NO: 49083 - DNA, 1767 bp, Heterodera glycines
caaaaagttaaacttttcctcaacccgcgacaaaaaatgccaccgacgacaagagaacacattaaggaatcccaatatggctttgtttacggcgtttcgggaccggtggtaactgctgagaaaatgtccggtgctgcaatgtacgaactcgtcagagtcggccattctgaattggtgggcgaaatcatccgattggaaggcgactacgccacgattcaagtctacgaggagacttcgtccgtcacaatctgtgaccccgtgctgcggacggggcagcctttgtctgttgagcttggcccgggcattatgggctccatttttgacggaatacaacggccattgcacgacatttcagaaatgaccaaatccatttacattccgaagggggtcaatgtgaaggcattaaaccgtgcaaaacgatgggaatttatgccgaggaaagatttgcgagttggggaccacgtgacgggcggagatatcatcggaatggtgcacgaaagtgcgttggtcaagcacaaaattatggtggagccgaaggcgtgcggaacggtcaaattcatcgccccgcaaggccaatacaccgtcgaagacaccattttggaagtcgaattcgctggacacacccaaaagcttacgatgatgcacatttggccagtcagaaacccccgcccgtccgccgaaaaattagcggccaatttccctctcctctgtgggcagcgcgtgttggacgcgctcttcccgtgtgtccagggcggcacaacggcaattcctggtgcctttggctgtggtaaaactgtcatttcgcagtcgttgtccaaatattccaactccgatgccattatttacgtgggctgtggcgagcgtggcaacgaaatgtcggaagtgttgcgcgactttcccgaactgacgatggaagtggatggagtgaccacgtccatcatggagaggacggcgctggtggccaacacttcgaatatgcccgtggcggcgcgtgaagcgtccatttacacgggaattactctggccgaatacttccgcgacatgggtctgaacgtggccatgatggccgactcgacctcccgatgggccgaggcgctccgtgagatttcgggccgtctcggggaaatgccggctgactcgggttaccccgcctatttggccgcacggctcgcttccttctacgaaagggcgggaaaagtgaaatgttttgggtcgcctgaacgcgaagggtccgtcactattgtcggcgcagtgtcgccgcccggcggagacttcgccgaccccgtcacatcggcaaccctcggcattgtccaagtgttttggggactcgacaaaaaattggcccaacgaaagcacttcccttcaatcaattggctcatttcttacagcaaatatatgcgtgcgttggacgattattacgagaagaattttgccgaatttgttccactgagaacgaaatgcaaagaaattttgcaggaagaggaagatttgtcagaaattgtccaattggtcggcaaagcatcgcttgccgaggccgacaaaatcactttggaggtggccaaactgatcaaggacgatttccttcagcaaaatggctattccagctatgatcgcttctgtcccttctacaaaactgttgggatgctcaaaaatatgattggcttttacgactttgcccggcactcggtggaaacgactgcacaatcggacaacaaaatcacgtggaatcagatcagagatcacctcggggacatcattcacgaactt

SEQ ID NO: 49084 - DNA, 569 bp, Heterodera glycines
gattaattcatcccagcaggaatctctttttttgtttatttccttcatttaatatacataattgtttcattccaaatggagggaatattcggcactcagcgggggggaggggacattctaccgaataacgacaacaacggcaatcacaacgacaggcaaccgctgctactcgaagaaaatgaaaaagccagctacggggcgctggggcctacagaggactcatttaggcaagacaaacattggtggaaaaggagcggaaaactaaaggcctcgaaacgacaacttggcatatttgcttattcctcctccgttgattatgcgctgattgcttttggtacggtcgcttctgtgctccacggggccggcttccccttactttcgattgttctcggtgggatgacctcagggccgaaaattccgattttgttcatggccaaacgccgcgtcaaaatgctactaattcctctgccatttcgccaatttcaaaagaggaattccaatcggaagtggccgctttctccgtgtactatttggtcttgggtttcgtcatggtcgtcacttcttacatc

SEQ ID NO: 49085 - DNA, 854 bp, Heterodera glycines
aaaaaacaaattacgtgctctcgtcacattgcttggttcatatcagagaagtcttcaatattgctatgccaaaaagaaacgcatctgaagcagcgaatgccaccaaatttgaaaaggggccatcggcgaagaatgcacgaattcagacgaagaaagtgtcagaagaattattaaacggaaagaatagattgaatgaagccaaggaggacgatgtgcccgtttggtgcttgaagaaggcacaggaagagaagccaagtcgacagtgtccttacctggatacaattgataggggtgtgctggactttgattttgagaagctgtgttcagtgtcactttctcacatcaatgtgtatgcctgcatggtctgcggtaaatacttccagggccgtggaaccaatacgcatgcctacactcattccctggactcggaccatcgcatttacttgaacttgggcacactgaagttctactgtctgcctgaaaattatgaagtgattgacccttccctggacgacatcaaatatgtgcttaagcccacttatactcccgaacaaatcaagcttattggtagaaatgtgaagatggcccgtgcatggaatgacacgctttattacccggggatcatcggtctgaataacatcaaagcgaacgactacaccaatgttgtgttccacgctctttcccatgttccgcccttacgcgattatttccttcgtgagcaaaattacatgcacattaagcgaccgcccggtgacaaattgacactgatgccacaacgttttggtgaattgttgcgcaagttgtggaacccaaaggcgttcaaagcgcacgtgtcgccccatgagatgctgcaa

SEQ ID NO: 49086 - DNA, 1061 bp, Heterodera glycines
attaattctgcgattaacaacggcgaaaatgcacattatgacgagagttgctcctccactttggcctcgaccttttccaacggtggtcgaaacccggagagtggcgtggccaccaccgacctttacggccgttgcactcgttctcattccggcacttcggccgccgcgcccgaagctgccggcgtttttgcgctgactttggaagcgaatccgaagctgacatggcgcgacctgcagcacctcaccgttttgacgtcatctcgcaattctctcttcgatggtcgctgtcgggaattgccgcctctcgaattggaagacatcaaacggcagttggtctcgcggcaggcgagctgctcgcacttcgagtggcaaacgaacggagtcggtctcgagtacaatcatttgttcggttttggtgtgctcgacgccgcagaaatggttctgatggcaaaggtgtataaaacggcaccgccgcgctttcattgtgaggcgggcacaattgaaatgccaagggaaatccccgcaagcggcgaaatggtgctgacgctgaggacggacgcatgtacgggttcaacaacggaagtgaactttttggagcatgtgcaggccatcgtgtcgctgaacagctcgcgtcggggagacacgacgctgtacctcatctcgcccgccggcactccttcgatgattctctcgagaaggcctaaggacgacgatgccaaagacggattcaccaattggccatttatgacaactcacacgtggggagagaaccctcgcgggcgttggcgtttggtggtgcgcttccaaccaggcaaatcgacgccgaagggccataaataccgagggacgctgaaaaagttcacgctgatgctgcacggcacaaaggagccgccttatcgcggcattgagcccctgcagggacacgccaattccaagctgagtgtggtggaaagtgcgcacaaacggatggcaaacaggcgatgatggcacgacagacgaatggccccacgatgggccctccaaggggcacattttaccccattctctccccccccccccct

SEQ ID NO: 49087 - DNA, 706 bp, Heterodera glycines
agacgtcttctgattggcaaattcagacatcctataaaattgttcttcaacttccgtcattggtccagcaacaactgtatgtttgagccaagttttaaacaatgccaatcaaagcatccggagaaactttaagaaagtacatcgttgttggacgtaaactcccaactgcaaatgacccaaatccgacactgcatgaaatggttatttttgccagcaaccacgtcgttgctaagtctcgcttctggtacttcactagcatgttgcgtcgtgttaaaaaaacacacggagaaattatttcatgtcaagaggtcttcgagaaaaagcctggctccgtgaagaactttggcatttggctccgctacgattctcgtactggacaccacaacatgtaccgcgagtatcgcgatgtttgtgaagcgggtgctgttacgcagtgctatcgcgacatgggcgctcgtcaccgcgctcaagcggatcgcattcagatcatcaaagtgcaaaccatcagtgtggcggactgcaagcgagccggggtgaagcaatttcagaactccaagatcaaatttccgcttcctcaccgtgtgaattccaagcgacgcaatatgactcctttcacgacacagcgtccgagaactcattttgtgtagagaaagaaatgagacgacttgtatttccgatttgttgattaaagttgttgtgttaaaaa

SEQ ID NO: 49088 - DNA, 627 bp, Heterodera glycines
gtctcatacatggaatggccgctcaaaacccgatgcgcgagctcaagctcgaaagagctcgtcctcaacatttgtgtcggcgagagtggtgataagctcacccgtgccgccaaggtgctggagcagctcactggccagacccccgtttactccaaggccaagtacactgtgcgctcgttcggtatccgtcgtaacgaaaagattgccgtccacgtgactgtgcgcggtgccaaggctgaggagattctcgagcgtggcctcaaggtcaaggagtacgaactccgtgccgccaacttctcgcaaaccggccacttcggtttcggtatcaccgagcacattgatctcgacatcaagtacgaccccaccatcggtatttacggtatggacttctactgcgtcatgggtcgtgccggtttccgtgtgtcgcgtcgccgccgcgccgtcgccaaggttggtgccccccaccgcatcaacaaggacgaaaccattgagtggttcaagaagaactacgatggtgtcatcctcaacaagtaagttggccgcgtcccaccgccttgttgatgtgtgtcgttgtgcatttcggccagtcgtgttgagagattcgcgtcgctcgtcttgtcttggtca

SEQ ID NO: 49089 - DNA, 701 bp, Heterodera glycines
tcccttaacggtgtttatctcttaaaattaccgcagaaaaattcttaaaacaaaaattcaagggccggatctaaacagaacaaaactgttgcatacatttacatgcacttttcggtttgatgttgcatcccatttaaaaagaacggtgaacaaagggcaatcgatacgcataaaaatcgatcgtttttcggagtggacggagcaggaccagacggacttctgcaaacaccttctgcagcgcatgtgtcaccaccaacacggccaaattgaccaatttttgggcccaatgcttcagcgggacttcattgcgttgttaccaaccggtttggcggagaatgtgctccatttgttggacgccaagtcgttgtgcgcctcggagtttgtcagccgccggtggagtcgtgtcattgtcaacggattgctgtggcgcaagcacatcgagcgccaagtgcgcaacgacgcgctgtgggccggactcgccatccgacgcggatggaagaagtacttcttctgctccaaggaccaggcgacacgcgcaatttctcagtcgtggagacagccgaagaacggggaggacgcgttggagttccagcacaaattctaccgcgaactttacccaaaaatcactgctgacattcggcaaattgagcagaattggcgcgagggacgacaccgattggagcgcatcaattgccaatcgg

SEQ ID NO: 49090 - DNA, 785 bp, Heterodera glycines
tcatctaaacgattgaaatgagttttggcaaggaatgcgttgatttatttgggacgaaggatctgtaccaaattttgaaattggacaggagcaaaagcaacttgagcagtgcacaaatcaaaaaggcctattatcgccagtcaattctgtggcatcccgacagatttgcatcggcacagcatgacgaaacgacgcgcgagttggccaagcagaaattccaagtgatcggcagagcatatgtaattttgggggatagtgagaagcgcaaagcgtacgacgaaacgggttcgctcgacgatgagaacgaattttacgaaggcaaagattggtcggccgtgtggcgaggcgttttcaaaaaagtcactccggaagagatcgaagcgtacctggccaaattcagaggttcacaggaggaaattgacgaggttaaggaggcgtatcagaagcacaaaggcaacatggacaagatcatgcaaagtgtggtcggcgccgagcatccggacgaggaccgaatccgcgagatcgtccgccatggcatcgagcggggcgaactgcgtgcatatgctcgcttcgtcaacgagcccgcctccgctccgactcggcgtgccgcgcgcgcacaacgcgaggagggggaaacgcagcacgcgctggaagagttgcgccagagggaagacgtcagcaaagggacggacggcgacgactctttgggcgcattgaaaagggcaaagcagcgcaaacgcgcccaaaagatggacgatttcttggacaaactcgcacaaaagtat

SEQ ID NO: 49091 - DNA, 752 bp, Heterodera glycines
gttcatcgcggttaatgaactcaattggttgcccttcctcctccaatggtccttcctccgctatgccttcttcttccgctgattgttctgctgatcgctctcttccgtcttcctcttccgttatcttccaacaattcacgatcgatcagcgacactttgtggacgaggattacttcagtctcgagagtattttcgccaccaatacgaatatttgctgcactttcgagtctaaaacgccccccgcgctttttcctctgctcggccggaaagcgcctgaggtcatttctgagaagggataccgtgccaatgttcccgcttggctcgtccccgccgtcgaccacatttgctcgtttgccgtgcccaccgtttacaattccgtcaatcgcgacgtaatccacgcgggtgcccaatcggtcaacttggaacagttgcaacgccactactacacattgggcacgttcatttgcagattggtccccggcgaacaggcgcaacacatcgccttggcattgctttccgcgttcacccaacgcatcggtcgaattgtgcgcgactgcaccaacacgggggcaaagccgacgcggctggacgagacggagaagcggattttctggacaatgcaaaggacggagcatcggaagggactttggatgggcaaccgaagggaggacgaaggacggcaccgaagggccgccaaaaggaaacattgcggcggcatttcgacacttctctctgtgaaaaactgctgatca

SEQ ID NO: 49092 - DNA, 573 bp, Heterodera glycines
cctcgttccgaattcggcacgagggtccaattaagatagaaatggcaacgcggaagttgagttttcctgagaaaattgccaatattcttggagttatttatcgctatcatgaaccgcgacttccacgttacaaagacattctgaagaaagtgtgtgtccgagaattggctcctccaactccaaaggattggcctcagatcaaagcggattatgccaaattggacacagtgatgagaacgcaggcctacagacagtttaagttgaaggaatttctcgtttattcggctgttttcgtggaagtgctctgttggtttttcgtcggagagatcattggacggggcagtctcaccggatacatcgtccgcagttctttcgttgacccgaaggccgcaaagaaaatggcgcactttaaatgggacgatcatcatgaactcaaagtggagaacgacgaagagcaaagcgggcactgatcggcgttcgatagatgatgcatatttctgtattgtaatgcttaggaactcgactcgaaagaaaattgttaattagacaataaaaacgatgctttcaaaaaaa

SEQ ID NO: 49093 - DNA, 762 bp, Heterodera glycines
cttctattctcttgcattttccgtggaccttcaacacataacccacaaaaacaaatgaaccgaattcgaaaagcagtgacagtactcagcggcaatgaatcaaacattccggagaagatcgcaaaggccgagcctcaacaccatgacattgagaagccggtgtcctccttgaaattcggtggtggcgcaacattgttccccgctgaatacgccgacgacgtggacctctacttgcgacaactcgaaagacgcaccccgctggacttcgactttctgtccgtgcacaaaaccgttgacggacgaatgcggcaaattctcgtcgactggcttgtccatgtccaagtccgcttcaagctgaccattgaaactctcagcctatccgtgcacattctcgaccgcgttctattggcactcccggggattaacaagacaaatttgcaactgttgggcgtcacgagcattttcatcgcagccaaattcgaggaagtggtcatgccgaatgttgacgactttgtctatgtggcagcaaacatgttcaagagggaggacatcatgcggatggaaccgcgggtgctgtccgggctcaagttcaacctcagcgtgccatacgccgtgcagtttctgcgtagctatcgcttctacgcttcgccgtcaaagagtgtgtgggaatttgcgaagttcgtcagcgaagttgccatggtctgttacgcgttggcccacttccctccctccgttgtggccgccgtgtcgctccatttggct

SEQ ID NO: 49094 - DNA, 724 bp, Heterodera glycines
ggttcgtttaaattgtctgattgaatggcaaaaaagcagtacgaccttttgttcaaacttctgttgatcggcgacagcggagtgggcaaaacttgcattttgtacagattcagcgacgatgcctttaacacgtcttttatttcgaccattggaattgacttcaaaatcaagacgattgagctgagagggaagaaaataaagctgcagatttgggacactgcgggtcaagagcgttttcacacgattaccacctcatattaccggggcgccatgggcattatgatggtttacgacataaccaacgcgaagagcttcgacaacatcgccaaatggctgagatacatcgacgagcatgcctctgaagatgtcgtaaaaatgttacttggcaacaaatgcgacatgtccgaccgaagagttgtgccgaaggaacgtggggaaaaaattgcgattgaccatggcattcgtttcctggagacatcggccaaggcaaacataaacatcgaaaaggcgttttacgacttggccgaagccattttggacaaggtgccggacagaaactcgatgggccccggtccgaatataaagccgctgacagatggcgcggacaggagtaccaagtccaattgttgttacccgtgactgccatttctgtctgaatattctggcattgattttcttctattttcaggactaaaattgtaatcaataaacaagcggcttttta

SEQ ID NO: 49095 - DNA, 559 bp, Heterodera glycines
  unsure (1)..(559): unsure at all n locations
gttctacatgataattaattaattatgagcagcagcgatttgttggcccacaacagcagcaccagtggctccagcagtggcgcaaccgacaaattggcggtgttcggcggctgcgagggccccgacgcgtgctatgtgatgctggtgagcagtgacggacatgaatttgtcatccgcaaagagcatgccctgatttcgaagaccatccgagcaatgctttccggccccggccaatacgcggagagcgaaaccaacgaagtgcatttccgcgaaattccctcccacgtgctgcagaaggtgtgccattactttgcgtacaaggcgcgctacacgaacagcgcgacggaaatccccgaatttttcgtggcacccgaagtggcgctggaactgctgatggcggccaacttcctcgactgttgaccaaacaaacaaacaaaatttgatgcaaaaatggtagcaacgacagacagacgaaccgatggccagacaaaacactgactgattgtgattggcaccgatttggaatttttgtgccaaagataaagccaattattantta

SEQ ID NO: 49096 - DNA, 581 bp, Heterodera glycines
  unsure (1)..(581): unsure at all n locations
gctctttgatataagcgttgctattgaattgcgatttctatcgtctcttttaattgttttacgccacaacaaacgacaaaaacaacatggcttttccttataaggatgacaaaccgcaagaggcagcgcccgttgaggaccgaattcgcattaccctaacatcacagaatgtgaaatcgctcgaaaaagtctgtgagcagcttattcgcggcgcaaaggacgagaatttggtggtcaaaggcccagtgagaatgcccacaaaaattctgcgcattaccacacgcaaaacgccgtgcggagaggggtcgaagacttgggaccgtttccagatgcgcatccacaaacgcatcatcaatctgaacagctccagcgacgtgctgaagaaaatcacgggcatttccattgagccgggcgtggacgtggaggtgacaattgcggagtcgcccagcaattaaacagcgcgtgccgaggggcggacggagagatttcccttttttgtcgttgcgttcgttctattgttgctttatgccacaaaattgaaaaaaaaattgttgtttatcaaanaaaaaaaaaaaaaaaaa

SEQ ID NO: 49097 - DNA, 682 bp, Heterodera glycines
cacagtaaaacaatttctattcggctctttccacaattaatcaacaacgtttttatcattatcacataaaaatgcgtttttgagccaaaatggaagtcgaagaaacgaaagcgacaaaattggagcaaatgtttgccaatgtatggcaaaattggagtcattttgtgctattaatggaagtcggcctttggaagcaaaggcagagtttcggccgatcaattcgatggactttcattccgacgtcggccgaatgctgtacaccatcgccattctgctgatgttttccttcgtcattttcgcccttatggtccgttccattagtcgttcgcgttcatccgccgaattggagacgcttttggatgccatgcgtttccgagaggaattggacattcagctgaggcaaaagcatcggctgaggaaggcgaagcgaaaagtgaccgcttggctgtgccgaggaaacggggcgaaactttggcaatcgtcgccacacattctgatcccaaacaacgccgtttcagtgcgtaaccactctttacagtccaccgggtcttacattccggaaattgtgatcagcacagaaaacacaaaccccgccactgtcgaaggcattcttcgaaacatcgaacggcaaaactctttcacgccaagtctctcactcatttacgacttttcgtatgattcg

SEQ ID NO: 49098 - DNA, 840 bp, Heterodera glycines
ccaagctttagagagtaaaccaaacatggaaaatccgagtgattttaccctaggaggtgcattgcccacatcaagcacagacgattatttgaagctaaaacgtttggagaataaactagcaaacttggacgttatggaggagtatctgaagatggacatgcgaaatttggagaaggaattggtgcacgcacaggaagaagtgaagcgcattcaatcagttccgctaatcatcggccaattcctcgaagccgtcgattacgaccacgccatcgttggttccactactggctcgaattactacgtgcgtgtgctgtccattttggaccgtgaactgctgaaggccggctgcagcgtgtccttgcacaagtacagcaacgcgctggtcgacgtccttccgcccgagtccgactcgtccattcaaatgctgcgagcggacgaaaagccggacgttgtctactcagacatcggcgggctcgacacgcagaagcaggaagtgcgcgaggcggtggaattgccattgaccaatggcgagctttacgagcagatcggcattgaaccgccccggggagtgcttctctatgggccgccgggttgtgggaaaacgatgttggcgaaggcagtcgcaaagcacacaaaggcatcattcatccgagtggtgggcagcgaattcgtgcagaaatatcttggcgaagggcctcgaatggttcgcgacgtgtttcggctagcaaaggagaacagtccatgtatcattttcatcgacgaaattgacgccattgcgacgaaacgatttgacgcgcaaacgggcgcggaccgggaagtccagcgcattttgttggagtt

SEQ ID NO: 49099 - DNA, 910 bp, Heterodera glycines
tgttgctcccgcacctaatgcaaacgcagcctcggctcaggcaacccaaccgcaggttatggcaccatcctatccgttggcttctctctatgtcggcgatcttcatccggatgtcactgaggcaatgctctttgagcggatcagcaatgctggtcctgtgctctccattcgtgtttgtcgtgacgcgatcactcgtcgttcgcttggctatgcctatgtgaattttccgcagccggcggatgccgaacgcgctttggacaccctgaactttgatatgatcctgaacaaaccgattcgcatcatgcggacgcaacgtgacccaagcattcgtcgctcgggtgctgggaacattttcatcaaaaacttgggcaaggaaatcgacacaaaggccatctacgacaccttttccatgtttggaagcattctgagttgcaagatttccactgacattgatggaggaagcaaaggatatgggttcatccattttgagactgaggaagcagtgaacagtgcaattgcaaaagtgaacgggatgcttttggatgggaagaaagtgtttgttggaaaatttttgccacgttccgctcgtgacaagcaaattggtgatccgtccagtcgtttcaccaatgtttatgtgaagaattttggtgatgcaatgaattcggagaagctgagcgaagtgttttcacagtttggcgaaatcatcagtgcaaaggtgatggaggatgacagcggcaagtccaaggggttcggcttcgttgcctacaaggaccatgaaagtgctgcgagggcggtggagaagatgaacgacgtttcggtgcccggcagtgagaaggtcgagcaaaagtttacggtgtgccgtgcgcaaaagaagagcgagcgccaggctgagctgaagcgtcgttacgag

SEQ ID NO: 49100 - DNA, 715 bp, Heterodera glycines
cctcaccctatcttgcaaacattctgtttacatacagatacgttttttcctgctcgatgaggccgattctttgcttggtggccaaagcgactcggcccaaattgtgcacgaattgcactcgcgaattcccaaatattccgaattcggtgagcgtctccaaatgatcgttagttccgcaacacttcacaacatggcagtacaacggctggcgactcaggatatgtacttcccccaatggattgatctgaaagggcaggattcggatacggaaactgtacaccaggttgtctgtatggtcgatccatgtgaggacaaaagttggattcggcttcgttcaaagactggccaatcagttcataccgattctgtccacgcacgtgatcagcttcagaccggaagcgacaacccagaaacactgtcggaggcggtcaaagtgttaaaaggggaatatttggtgaaagcaatcgaagagcacaaaatggaccaagcgatcattttctgtcgaaccaaattggactgtgacaacatggagaagtttttggcgccacgcgggtacaaatgcgtttgtttgcacggcgaccgaagcgcggacgaacggacgcggaatttgctttcgattaaagaaaacatagtgcgctttctcatctgcacggacgtggcggcacgaagactcgacatcctaggcgtgccctatgtggacaatgtgacattgcct

SEQ ID NO: 49101 - DNA, 813 bp, Heterodera glycines
atttcccatcattaattagccgataaaaatgtgcgacgaagaagtccctgctctcgtggtggacaatgggtccggaatgtgcaaggccggtttcgcgggcgatgacgcgccccgcgcggtgtttccgtccattgtgggccgcccccgtcatcagggcgtcatggtcggcatgggacagaaggactcgtacgtgggagacgaggcgcagtccaagcgtggtattctgacgctgaagtacccgattgagcacggcatcgtcaccaactgggacgacatggagaagatctggcaccacaccttctacaacgagctgtgagtggtggtgccatcgtcagcattggcattggcactcgccgtcggtcacttggccaatccgtccctttaaggcgtgtcgcccccgaggagcacccggtgctgctcacagaggccccgctgaacccgaaggccaacagagaaaagatgacccaaatcatgttcgagacgttcaacacgccggccatgtacgtggccatccaggccgtgctgtccctgtacgcctccggccgtaccaccggtctcgtgttggactccggcgatggtgtcacccacaccgtgcccatctacgagggttacgccctgccccacgccatcctccgtttggacttggccggccgtgacctcactgactacctgatgaagatcctcactgagcgtggttactccttcgtgaccacggccgagcgtgagatcgtccgtgacatcaaggagaagttgtgctacgtggcactcgacttcgagcaggaaatggccactgccgcctcctcctcctcgctg

SEQ ID NO: 49102 - DNA, 1146 bp, Heterodera glycines
cttaatatgttacgtgagaagtgcaaagaggtcaaagcgcaggctcgtttcgcacttaaagcattgaaagagcacagcgaacgcatcagtcgcaaggcgcttttccttgaggaggattctgcccttttcatctccgttaagtacaaaaaggtccccctcgcccgaggcaattccatgcggaaattaattgggttgccctgcaccgatcagaatgcatcaaatacgtccatttgtttgattcttcccgatttcgaccggtcaaacgctgctgcgagggatccggatgtggacggacaagctaggagatgggcggaactgttgcgggaaaagtacggactgacgggtgaacacatcgccaaaatattcacaatcactcagcttaaacgggagtacggaaaacaagcggacagagcgaagttggcgaacacttacgacattttcatggtcgacaaaaagttgatgaaaatcgctgtaaattttcttggcggcactttcagaaaagctacaaaaatgcctttgcccattgattcttccgtcgacattagcaaaaaactgaaagaggccttctcattggtccaattacattttgcgcctttgaaggactcagtcgcagtgagaattggcaatttgagtcagtcattggctgaattggattcgaattttgacgtaataatcgaagccgtttttgcccatttgcctggtggtccgtcaaacattcgcagttgctacctccaaacttcagcaaccaaaacttcccttccaattttcgtcgattttggcccatctgatgaagtgcttgtggagcaacccaaaaacgaacaatttgcggtggaattgggcgagtgcagcactttgccggagggattaatggtcaaagtgagggcggacggaaaagtgaccgtggtaaagggaaacgcgggggaagaggtgctttatccgacggcacaggacgaatgggagcagggcgacgatattcggccattgaacgacgacaccgtgcagaaagtgttaaggaagaaagccattgggatgagcaaagggcaaagaaagcgaaaagacaaagcaaaatgaaaccactcatttgtgttgtgttcgttgtgttttgtttgttaattttgttcgaaattcattaaatttgctacttta

SEQ ID NO: 49103 - DNA, 829 bp, Heterodera glycines
aattttcctataaatttattaattggactgcttttgctgttgctcaatctcgatggcagaggaaccagtgaaactgattcttgtcaccggcggagtgatgagcggcgttggcaaaggcattgtgtcgtcgagcatcggtgtcctattgaagggttgcggttaccgagtgactgtgatcaaaatcgacccgtacatcaatgtcgatgctggcactttctctccattcgaacatggcgaagtttttgtgttggatgatggtggcgaagttgacttggatcttggaaattacgaacgttttttggacattcgactgacacgggacaacaatatcacaacgggtaaaatcttccaccaggtcatccaacgggagaggaacggcgactatttggggaagacggtcaaaacggtgccgcacataaccgacgcgatcattgaatgggtggagagagtttcaaagatttctgttgatggcagcggaaagacaccgcaaatttgcattgtcgagctcggtggcacaattggtgacattgagggcatgccgtacacaatggctttcagcatggcatttcgccgcaaaacataccgtaatcgttttctgactgtgcacgtgaccaaattgttgcacgagtcgggcgaaataaaaacgaaaccggcgcagaatgcgctgcgcagtcttcgcgagacgggcctttaccccgaccttttgctctgtcgttctcaaaaaccgttgacccaagcgctgcgctccaaaattgccagctttgcccaattggacatcaacgaaatcatcgacgtgtacgactgtcacgacattcacagtgtgccgttg

SEQ ID NO: 49104 - DNA, 973 bp, Heterodera glycines
  unsure (1)..(973): unsure at all n locations
gntttttggttgttgttgccgcctctaaaggttttgntgtttctcatcacttttgtacagattgctgtttttccgtcaaagttgcatggcacagatgaacgcagccaagctgcaacaacagttgaccgccagtgggagcagcagcaaatgccgcagcagcagcaccagttgtgcgtgacaattccgtaccgcgaccgatggacggaattgcagcaaatgttgccacttttgcacaatttcttggtcaccatccaggccatcgccccaccgccccggtacattgtggtcaaccaatcggaggaggacgcgctgcgcttcaaccgcgccgcgttgataaacattggagcgttggaggcggaacgcgtcggttgcgattacatggcaatccacgacgtggacattgttccgcttaatccgaacttgagctaccattacccggaggatgggcacataatgcacgttgcagctggtcaataccatcccatccgaaggtatgactacaaaaatttcatcggcagtgtgctggtgatcactttggccgattttaaaaaggtggacggaatgtccaacgaattttggggctggggcctggaggacgacgacttttacctcagattgaaggcggcgggaatggccaacaaaatcaggcggccgtccaatttgaccaccgatcggtccaacacatttttgcatttgcacacgcggagccgacggagggatttctcagtggacgaatacagaaaaaagaggaagcgcagacggaacactttgagcgggttgcgcactctcaactacaaactgaacgggaggcacaccatcgaactgacggaagacattcaaatttgggtgttggatgtgcgtttgtattgtacaccaacaatttttggaacggaatgccatcaaaatgttgcataaaaagccatttgatatttcttggcatttagaccatcaaataaatgaagatggatgaaaa

SEQ ID NO: 49105 - DNA, 876 bp, Heterodera glycines
tatcccttcaattctcatatttttcattgtctacagtctgatcttacgcgtcttcgtcgaaactttacaccgatggaaattcagcgtgatagccatttacgaagtatgaaagagcttctcagcacgatggacccgcaagtcgaccccaattcacacattgaattcaagcagaagacacacattctttgtgcccgctttttgggtggtgcttggaagaccgtctcattggaggacatgaagattcacagaattaaaggcggaatgagcaacatgcttttcttttgccgtctgactgaaaatcacccaccactaaaaggggagccggacaaagtccttctgcgcgtgtattttaacccagaaacggaaagtcatttggtggcagagtctgttattttcacccttctctctgaacgacacctggggccgaaactctatggaatattcagcgggggccgtcttgaagaatacattccgtcacggccacttacttgccatgaaattgcattgcccaccatggccaacaaaatagccaagaggttggctcgagtccatcaacttgaagtgccaatttggaaagaaccggaatatatttgtgacgcgcttgaaaggtggcttattcaattgaaacaaatgcccagtggttctcgtgatttcgatttgccggctgaaagtcacgaatgggctcctccgagcataaattgcgaagatttacagaaagaaattgagcacctgaggagattgattgtaaagagtcggagtctggttactttctgtcataatgatcttcaagaagggaacattctcttgcccaaagcacattctggcaatatccgaatcggctccgaatcggacgaaattttatctggcattgacggg

SEQ ID NO: 49106 - DNA, 983 bp, Heterodera glycines
gtttgcccaattcggatatttagatacaatctaaagcttcgtttgcatggatttagtttaccacgaaaagcaagttggacgtatgtgtgctcaacatgcactgaacatgcttctgcaaggcgattacttcacgcccgattctctcgcttcaattgctcaagaattggaccaaagagaacgtgcgatgctaagggacgaatctgagtttcaaagtcaaaattacgacgattcgggatacttctcaattcaggtgaaactgaagctttgcgtcgtcaagcgaatttgagtctggagcctatcataagcccaaatgctatgaaggttttgcaaaatccgagtttggcacatgcttacatttgtcacctggaggaccattggttcacaattcgcaaaattgggacgacttggtttatcctcaattcgctgttcaaagcaccgcgcattgtatctgaaacgtttctcgaattgtacgtccatcagcttaataccgaaggttggtccctttatgttgtcgaaggcgaattgcccgcttgtgcagcggaaactgtgccaagagaattttggaatgagacgcgacggacaaaaaagtttgaaaatgacatggaaagggcaatcgcattgagcctaaatgaagcacggccgtttcttgttacaaagactgccgatgaagaattgtttggagcggcgacaccggtgatcagccaagccgaggagttggacatccagcgtgctttggaggacagtcttcgtgaggcgaatagggccacttcggtaagcactgccgaatcgtttctcgtcggagaagcgatccgcaacagtgtgttggacttggacgcctcttctagtcacacttcgacaaattcgcaaacgagcagcagaaatgaggaggaggatgacccgcacaaccgacagtcatgttcaagtggataccaaagatagaggaaccattattcgtcccttagatgcgtcattctcacaacccg

SEQ ID NO: 49107 - DNA, 813 bp, Heterodera glycines
  unsure (1)..(813): unsure at all n locations
ctccatgnacatacaatatttgcttagatggatttgttaaaatcttacgacggctcttcatcatcggacaatgaacaagaattggcagatataccttcttcgtccaatcacaacaaattgctcgctttgaaaatcccatccatcaacttaacacccaacgtgattgaacaacgcgccattcaacaggttgcggttgtggatccaaaaaccaaagagttgtatcacaatccgcgcttcgacgaattgtttaaaccagagagcggcccacaaaatccgtttaaaagtgaacatcaacgagcagaaaagaacacactgaccggctatgtggagccagcgcatttcaacgccttccattttgagcgttcacttcgctcctacgatacgcttggctatgcggataatccaacggcagacacaaccagcgcaaagttcgttggtgacgttggacaagcgcaagaaaaggccggcgagtcgctttttgaatcagtaaaaactggcggacagaagcgaaagagagtgataaattacgacgcatcaaacgttgacggatatacgggaccgtgggcaaggtttgaggacgagaagacaattgctcgaccggacccagaattgcagaaggaaatggacgaaattgtgcggaaacggaaactgaaaagtcgtgctggccgaaaagcggccatcgcggaattgcatttggcagaagagagcaccaaattgcacataaaagatgacactgactatttgggccgttcctttatggaaccgccgaaatacacgggcaccaatctgcgcgaggactttgtgcccgaccgc

SEQ ID NO: 49108 - DNA, 795 bp, Heterodera glycines
atcattactctaccacaatttgatctgcctgaatgtgtgtcgaaccccaacggatggggtccggggtctgtaagtgacagtcaagtactctcagagtttgtgggccttccgtatcaacatttcaacaaatgcgatcggattgggcgtatcgtcgattggttgggcgtcgatcgctttttcaaaaaaggcgaaacgcgagatcggtacaatgagcgtgtgtatggctcctcagcgactgcgggcgttcaattcgattacatccacgacaacgaggaatcgaacttccaattggtcgactcgagtcgaccacaaaagccgcagaggcctttccgtcgtcaaattccatttcgtaaattggctcaacgtgagcaggaacgccgagaatatgagaagtacaatgtttcgacgaagatgaagcggagtatactcaaggagcaacaaaaagcgtacaaagtgtttttgcgtcggggcggtggaactcgcggcacagcgcagcgaccgaccgggcggcgcttcaatgaccgacaggcgggcaaagggcgacagccttcggttcaagttcgacccgattgggcggttctgaaggagttggactttgtccagctgaacaaactttacctgccaaacattgaacctggaaaggatatacccggcgaaacgtacggcacccttcacttttatgataaagcattaatggacaaactgagcgtcaaaaacccgctgcatttggagaaattccacgcgtctttttattcgctgaccaccactgaagacccggtgttcagaaagctgtcc

SEQ ID NO: 49109 - DNA, 527 bp, Heterodera glycines
  unsure (1)..(527): unsure at all n locations
ctctgctaaccgcctttttcaatgtgcgaccgtttgacccaaacccttgaccttgtcaacgatttggctaaccacatgtgtaattcggttggtgttctgcacgcgagtgccgggccgtgcgaatttgggacagctccggaggaactgaagaatgaacccaactgtcgcctcttcgctcagcaaattgcacggaccgccaaagacatcgaaattctgatcgattctttgcccgccgacgaacaatcgttgtccgtggaagagcatgagaaggcgttgttggagttggacgacgaacgcgcacgggcggccaaagagcttgaacaagcagtggaaaaggcggagaaactgacggatcagttgggcgaacttttgtcacgcattgcgcgccttcaaatggaatcgcgcccgatggcattttccacctgaaaacaaccttttcaacccacattttttttgtcgaatttatttgaatattaatacgcataaattaattttattannnaaaaaaaaaaaaaaaaaaaaaaaaa

SEQ ID NO: 49110 - DNA, 746 bp, Heterodera glycines
  unsure (1)..(746): unsure at all n locations
gtccgtgtgattcctttgttacatttggccaattgcgatttttccttttattctgtggccccataaatgccatacactgatgccgtaacgatgggcaactcttcagcgtctggtactgtctctgttccgaagaacccggcgcggctcggcactttcctttggggcgtttccgctgcaacggggcgtcgcgtacttttggctgagttgggccccgccagcgcatccaccgtcgtagcaaagaaacgggccaaaatcgtcgcccatttgtccatgtcccacgagtctctgctccttttctgcgacccctttgtccatgccgaacgcaccttcctccgctgctccttccgtgccgatcttggccattgtgcccatttgctcagtgcattttattccgagggtttgcccgagtcggcgcttcgtatcattctcagggcgacgctaaacgcactcgaacacctccactcgcgcggggtcattcacaggagcgtttgtgccgagaacatttggctcgactcggatggtcaaattcgtcttgcgctcactcgccatgccacccgaatttccgactgtcccaaatggatcggtgtggaggacagagtgcacgaattcacgtcggatttgagtgaaatggtcgcttggttggccccggaagtgctaatgcagcgntgggatatgcctttgcgaattggccaatggcgtcgtgcccttccaagaaatggaaccccttcgcattttgtacgaaaagc

SEQ ID NO: 49111 - DNA, 607 bp, Heterodera glycines
gtgcattctctgcctctctgctgttctttgtgcttcattcacacaaacattttcgctctcttcaaaatgtctggacgtggaaagggtggcaaagcgaagaccggaggaaaggccaagtcgcgctcttcccgtgcggggctccaattccccgttgggcgtcttcatcgtctgctgcgcaaaggtcactacgccgagcgtgtgggggctggcgcgcccgtctatctggcagcggtgcttgagtacctcgcggcggaggtgctcgaattggccggcaacgcctccagggacaacaagaagacacggatcaacccgcgccatctgcagttggcggtgcgcaacgatgaggagttgaacaagcttctctcgggcgtcaccattgcccagggcggtgtgctgccgaacatccaagcagttctcctgcccaagaagacccatggcgaaagtcagtgagcgcaggacggtggtggaacggcattgaagaaaaaactatcccaaacggccctctttagggccacaatcatgcaattgaacggattggctaattttcgatttttaacatttaaataaatttgctcctttcaaaaaaaaaaaaaaaaaaacccaaaaa

SEQ ID NO: 49112 - DNA, 818 bp, Heterodera glycines
gtcttattaagcaattcgagtgctacaaatagttcgaaatggtaactgcggaagataccgttaaaacaaaggaagaagaccccaaaaaaacgacaacggacgacggatcgagttcagaggaagaagtgcccgagctcgaagagggcgacgttactgaagagcagaaaaaagttgctgaggcggccggactcagtgagcaggttgccgaaaagggctccaaacaatcgcgttctgaaaagaaggctcgtaaactattcagcaaacttggcctcaagcaagtgcacggcgtttcgcgcgtatgcatccgtaaatcgaagagcattttgttcgtcatcaacaagccggacgtgtacaaaagtccgggctccgacacatacgtcgtttttggcgaggcaaaaattgaagatttggcacaacacgctcaaatcactgacgtggagaatttgaaaccgccctcaatcattcgcgatgttcgcaaccgaatcacaccggcggaggaggaaagcgatggcgaagaggctgatgctactggaattgaagaaaaggatattgagttggtgatgtcgcaagcaaatgtttctcgaaacaaagctatcaaagcattgaaaaaggctgacaatgatttggtgaacgctattatggcattgacaatgtaggaggaagccagaggaattcagagaaaacattgttgaccttcgaatttttgcttcaatatttttcctacgggaatcagttcttttaccattgctgattatgttactttacgaattttgcttataaaaattaaaaagcgtaaaaaaaaaaaaaaaaaaaaaaaa

SEQ ID NO: 49113 - DNA, 811 bp, Heterodera glycines
tcatcaaagggcctttgctcactttccgactcttcgcacaatcaatcgaagtgtcttctctcctcccaattgttctttgtttcgtttggcttttttcctcgtcttttgtttgcttagtgccaatgccatgaaatttgctgtcaaaggcgatgacaacaaatattgcatccttctcgactctccacaaatcactggcgcaattcgttacgaagaaaaaaatggttccttcaacacgaccactttttcgctttcaaacagctcggcttcggttgacaaaaatgccagcagttgtgatgcttccattcagcgaatttccatccaatttgcgcctctcattgagggaattgccaccgaaatgagcaaaaaatggaacatcactttggaattcaccaaaaaggacgggaaaaactacgctttgtccgactattcgctgggtgtcgttttctttccggcacaaaaggcatcgcaaaaatcccatgtctacgagaagaacggaaccgcggaatgggtcgcacagctcgaaagtgaccagtccaaacaccccaacgggttcacctgctccgagaacaaattggcgctgtccgacgcgtccacgattaattttgaatttctgaagttggttgcctttgacgacaatgaaaaggacgaattcagagacgggcaaatcttcgagaactgtcctttggatgcgcgtacttcggatttggtgccgattgtcgtcggtgctctgttggccggccttgttgtcattgttctgatcgcttatttgatcggccgcgctcgtgcaaagcgacagggatacacttcggtt

SEQ ID NO: 49114 - DNA, 797 bp, Heterodera glycines
cttcctgcaccggcttgtgcccttccgaaattcgttatttcctttcttttcgacctctgtttcgtcatttccgtcgtttctcttctgcccaaagtgcaggaacgaatgcccaattcggggctcatccaggccagtatgatgtcactgtacgtttgttacctgacttggagtgcgctcatcaataacccggacaaggagtgcaacccgtcgcttattcctcggcacaattccaccggcgacgcgggagggaatgtccaagtgatcaccacttcgctgcccgtcaattcgctcgtctctttggtcatttggttttgttgccttctctacgcttccattcgcacttcttcatacacggcactgggcaaaattggtggggcgatcagtgaaggaaatgccgaaggtcaggacatccctctgagcgaagcttcaatgtccgtcgaggagggcgaccgtgggacgacggggcgcaatgtttacgacaacgaaaaggggtccgtggcctattcctactcgttcttccacttcatttttgcgcttgcttctctctatgtgatgatgaccctcacttcgtggtacaccccgagcgatgatttgcgctatttgaacgacaacatggcatctctttgggtgcgcgtcatctcttcttggctttgcgctgcgctttacctttggactttgctggcgcccgtccttttccccgacagggatttcaattgatcaccaaacaaatgaaaatcggattcgaattctccaccttgtatcaaatataactttattataaatcacatttacaaaaa

SEQ ID NO: 49115 - DNA, 723 bp, Heterodera glycines
attcctcatgagtccaagccccactacacacctgagcccgacatccttcacgaactgttgggccattgtccactgtttgcggaccccgattttgcccagttttcccaagaatttggactcgcatcgcttggcgcctccgatgaaatggtggagaaattggctacgctctattggttcaccgtggagttcggcatttgcattcaaaatggggcaaaaaaggcgtacggtgcgggactgttgagctcatttggcgaattggaatatgcgctcagcggacagcccgaattggctgcgttcaacccgccggagacgtgccaaaccaaatacccgatcactagctaccaacccaaatattttgtggccgaatcgttcgcggatgccaaaaacaaactcgcgtactgtatttgtcgcgctcgcgttttgagcatttttaaccctccccgctcccgcagtacatggtcaacgagcataccaagacagttccaagtcaactacaacccatacacacaacgcatcgaaatgttggacaatgagagtgcagcaaacaagcttgtccgggatgtgaaaagccaagtttcaaagctcgaagaagcactaaggaagctggacaaagagaaggcaaaggcaaaatgaagaaaattgacttgccaaaaagcagagaaaatgtgaatttcttttcaacggcgtgttggagttgtgaaataaatcagatactgtaaaaaa

SEQ ID NO: 49116 - DNA, 932 bp, Heterodera glycines
ctccataaaggcttgtcaattaattgcttgcaaatttgccgatggctgctatagacccgaaggatttcttcaacaagtttgccaaaccgagcaaaggtgccggagtcggcgctggcttgatgactgcagctgcggtggccggttatgcgctgtacaagtcgatgtatacgattgaggctggccatcgtgcgataatgttcaaccgaatcggtgggctcggcgacgaggtgtaccgggaaggactgcactttcgcattccatggttccaatatccgattgtctacgacattcgtgcacgtcccaaccaaattcggtcgccgaccggcagcaaggatttgcaaatggttaacatcgggcttcgtgtgctgtcccgaccggacccggggcagctgcagacgatctgccggatgctcggcaccaattgggaggagcgagtgcttccgtcaatttgtaacgaggtgctgaagggcgtcgtggccaagttcaacgcctcccagctgatcacccaacgtcagcaagtgtctctgctcgtccgaaagggtctgattgagcgtgcgttggacttcaacatcattctcgacgatgtggccatcaccgagttggccttctcgccccaatacagtgccgccgttgaggcaaaacaagtggcggcacaggaggcgcagcgggccagtttcatggtggagaaggccatccaacagcgccaggagaaaattgtccaagccgagggagaggcgcaagcggccaaattgttgggcgagtcgatgaagaatgaccccggcttcctcaaactgcgaaaaatccgtgcggctcagaaaattgcgcgtttcattgccaactcgtcaaaccgcgtctatttgccttcggacggacttttcttgaacttggccgacgaagactatttgagtttggcgaccaacaaagggcgccgt

SEQ ID NO: 49117 - DNA, 824 bp, Heterodera glycines
cagttcattctcctgctgtccattgtctggtccttcaatggcgcttggaattgcaccattcattgtttgggccgactgaggacggcaccgactgtgcttcttccaccaaatcgtatgctttgcgcagtgacggggcttcctgctcgacaacaacagatgcgaagcccgactttgcttcaacgtatgagcattgcattgacttgacctccactgttggcacgtctcaatctgcaaatttgttggatttagtgaccgaatccaccagtccattggaagtgccgatgtgtaagaaatgtgccaatgcagtgactgcggagctgaacaagcaattgggtcatttggagaaggaatgcatccaatacaaaaagtcgttggaccatttgttgcaacggcgtgcggactgtccatttgacatggaggcatcgcgcatcaaattggacgctttaaaatcagaagagcgcgacctattggaacaactgacgctgttggaagacgaggaacggacactgcttcatgaattggatacaaaacaggaggagcgcaagaaaattggtgaacgagacgagcaactttatcgacagttgcgaaacaaccacagtatactcattgaacaatcggatgaacagcggtcatttaaattgcaaatcaatcaggccaatgaacaaattcgacgtctgtcccgcatgaatgtgctggatcgtgagttccacatttggggggatgcagagtacggcacaaaaaggggcttcagggtgggtcgactggagcatgaaccaagggaatggagtgaaatccatgccgccctgggaaagacggcccttttg

SEQ ID NO: 49118 - DNA, 484 bp, Heterodera glycines
catccataaaataatatgccgccaaaaacctcgaagaaaactgacccaaaagggggaaaagcggcaccagcgaagaagaaagagggcggaggaggagggaaggccaagaagaagaagtggtcgaagggaaaggtgcgcgacaaactcgccaacatggtcttatttgaccaagccacctatgacaaattgtacaaggaaatcatctccgtcaaactgatcactcccagcgttgtctccgaacggctcaaagtgcgcgcttcgctggccaaggcgggcctggaagagttgcaccagaaggggctgatcaaatgcgtggtgaagcacggttcccaattggtgtacacacgggccaccaaagcggaggaagcctaagaaaagggggaaacggggcgatttggtttttccttttttttagattgttgatttgttgaatgaatatgtttttttaaaaaaaaaaaaaaaaaaaaaaaaaaaaaaaaaaaaa

SEQ ID NO: 49119 - DNA, 403 bp, Heterodera glycines
  unsure (1)..(403): unsure at all n locations
gtccataaaagttttcaacgaaatgttcttcactcgaatcttacccttggagaaggcgaaatacaggacatccaaaccgcgtgttctgttccgtcgtttcaaccgccccttctatcaatacacaatgcggccgttggtgcagtgtccccgttgcagcgcttcgcatgagccatgggtgctgtgcatggactgctaccgcgtgttgcgcgacgccacggagccaatcaaacgacggatggtgtcgcataacgcatacattggccagcgacagcagccgatgccgcgatggactgacgaaaatggcattaatgccaaccccgtaataattgttttttccatttgattgtattggccatttttatttcttaaatagttattgagcnnnaaaaaaaaaaaaaaaaaa

SEQ ID NO: 49120 - DNA, 607 bp, Heterodera glycines
tctttgataagtggactcctcaaacggttggaagaggattgtattgggtcagccccagcagcaatggacaaggacgacgccaaacaatttgaagaatatcgggcgaggaaagtcgcaatgataactggcatttctggtcaggatgggtcgtaccttgccgaatttctcctcgccaaggggtaccaagtgcacggggtcatccgtcgttcctcctccttcaacactggtcgaattgagcatttgtactccaatccgatgacacacgctgtcggttccagcttcaacttgcactacggcgacatgaccgactcgtcctgtttgatcaaactgatcagcaccattcgtcccaccgaactgtaccatttggccgcacagagtcacgtcaaggtgtctttcgacttgcccgagtacaccgccgaagtggacgccgtcggcactttgcgcctcctcgacgcgatccacgcgtgcggactcacccgattggtccgcttctaccaagcatcaacatcggaactgtacgggaaggtgcaggaagtgccgcagcgggaaaccacgccattctacccgcgttctccttacgcggttgccaagttgtattcctattgga

SEQ ID NO: 49121 - DNA, 654 bp, Heterodera glycines
gtccgtgctgtggaaaatgcttgctctgaagtcgcttttgggtaggagccctctggtcaatcctttggttttgtctttgcggaacagatccatcaaaaaagtgaagaaaaaacttgctgcaggggaaacactcggcggtccggaggattatgcgtataattatgttgaaaaaaagagaggatttatcaaaccgatccacacacttgaggaacagatagaatacatgaacagcgaagtttttgccgaaacttacaaaggacgtccaatttgttttatgtggaaacgtaatatgaaaggccagtggaaattgcaaccgccgcctcgacttttttgcattgaccgcaatggtcgtttcaacgttggaaatgcgtgtacggtgtgtcgtgatgagtatttgttcttcgattatagaaatcccaaattgcttgagcatttcctttaccccggcactgatcagcccctgcccataattcaaaccggactttgtcaagaacagtacgtcaatttgcaagcccaacttctcaaggccaaagagcacggtacgtttattttcaacgtgcccttccgtcacttcaattatggtcaatggtatccaaaagatgcgaatgcattaataagcagtgatttggaggaggaccaaccgagcagagactt

SEQ ID NO: 49122 - DNA, 801 bp, Heterodera glycines
  unsure (1)..(801): unsure at all n locations
gttcgtgatttaggcttttatctattgattggatgaattgttgacttaggtagtttacctattaatttttccacattttttgccatggcttcaattgacttgtcacaagaagttcgcctttatgacaacaatgcggagcgcgatcgaattgacaacatggctgaactgtacgcgatggtcaacgcgttggagtgcctggagaaggtgttcagccgggattatatccacaccaaggagtacacggcggaatgctcaaaactgcttgtccaaatcaaggtggctttgcgattggttcccggcatgacaattgacgagtttttccgctcatattacattcaatgcccggccgcgttggagcgtattcgtgaggaccgacccattacggtgcgcgacgacaaaggaaatgctctcaaatgcattgcggacattgtggagctgttcatcacattcctggaccaattgaagctgaacattcgcgcggtggacgaactgttccccaatctgaacgacctttacgcctccatcaacacaatgagtactttgccggacgatttcgacgccaaactcagggtgaaatcgtggcatgacaagctgcagggaatggctgctcatgaggagattacagacgaagttgcacgacagatgatttttgaacttgaaactgcttacaacgcattccaacggtttttgcggagcggttgaaacgatctaagcctaaaattggtgatatttgacatccaaattcattctgtaattacgaacccatgtctgcttttataaataataaactanaccctacca

SEQ ID NO: 49123 - DNA, 777 bp, Heterodera glycines
cctcgctccgtccaaataagttttatttctgaaatgaaaacttcacctaagattaaaagcagaaaaactgcttcaacaaatgaagtgaaaaaggaatgcccagaaggcacagagaaccgcgaaaatgttgggacgtcgagcaggttaattgtgaagaatttgccgtgtggcaaaaagacgcgatgggacgaggccaaagttcgagcgcacttctccaaatttggcactttgacggacgttcggctgaaactcagcgaaaagaccggagcttgcaaatttgcctttgtcggcttttcatctgccgaacattgccaaaatgccatcaaagcgttggacggcgcgtacattggcggctcaaaacttacggtcgaagagtgtaaagcattgacaactgaccgaacggcgatcaccaaacaactttcgttgaacaaacgcaaaaaactgaggcaaaaaggcaaatgcgaagttgatgaggaggaggacaaagaagaagctgccgaagaggcggacgtcgactcactaattgaaaagcaaattttggacaccggacgacttttccttcgaaatttgccctttgtgtgctcggaagagcaaatacggcaacttttcgagccgtttggaccactcgccgagttggaatgtgtcgtggacaatgcgggcaaatgcaaagggtacgccctgtgcaccttcatcttcccggaacatgcggttgccgcgtggaaagcgttggacggcaccgtttttatgggccgaatgctgcacataatcgccggcgaa

SEQ ID NO: 49124 - DNA, 578 bp, Heterodera glycines
cctcttgccgaattcggcacgagggaaattcagcagtccaaaaacaaatttcaccagcaatgatttaccaccgatttgttgagattggccgtgtcgtttacattgccaaggggaaggaccaaggcaaattggcagtcattgtgaatgtcatcgacggtaacaaggttttattggacggcccctcctcgggtgtgcctcgcggtgtttggaatttcaaagacttgcagttgacaaaattcaccctcccattgcgtatcggccaacgtacgaaaggagtgcgcgaggcttatgaaactgccaaaatcaacgagttatggcaaggcactgagtgggcaaagcgcattgatcggaaacagaagcgtgccgggctcaacgacttcgagcgcttcaaagtgttcaaagccaaacagcaccgaaaccgtttggtccgcgttgagatggctaaactgaaaaagatttcgaagccgacagcgaagtaaatgactgaatttggcctgatcatattttgaacacacaaatgccgtcttttttgttgatgaaattatttgttggagttaaattgttttttaattcaaaaa

SEQ ID NO: 49125 - DNA, 645 bp, Heterodera glycines
cttccatacacataagcattttgttgccgcattgtaaagtccaacttggcatccgaaattggcatgatcgttctcaggtgcctcgcatttttgatgatcggagaaaggcaacaaacaaaatcaaagacgtgggatattactttcgttatcatcgacctggaatcgacgcattgccgcggatccccgactgcaaagagcagctctaccggccgaaatacaaaattcgtgagccttggcgcgaaagtcaggcgagatttggcgagaacgactacatcgacctgctcggagacggctctctccatccggcccaacttcagtaccacgtcccccgttggctgcgcgggtttcccgggcaaaacagagcgattgagccggtcaagctgatccactacagaaacctgtacaagtcaaagttggagcagaattcgcctcacaaatggcaccagctgaacaagcgcatcaaatatttgctgcaatatcacaactacgacaaatcggacgaattgagggccgaacggtcgctgggactgtgggaggaggagccggactatttctacaaggacaaatcacgccgatcataccaagaccttgtgtagtttattgtttcgtcattcagttagtgaaaaatgcattggcaaaattgaa

SEQ ID NO: 49126 - DNA, 667 bp, Heterodera glycines
agccctttaaatgtgcatatcatcatcctttgtatcacttcattttttactaatttctgaacgaatttaattcccaaaaatggcctccggtttttgggcatttgttggcagagcttgggaatggctgaaaacgttgattctgccacagagtatcaatgggacttgtctcaaccaaacgttcatcaacgacacgccatcggcgggagaatttttggccgatttggagccctttcaaattgtgcttctctctgttggcagtgtgctcactttcaccgtttttctgctcgcctttctccagtggaggtacattttcaattacgtctcctcggagcagcggcgcaacaaactttacttgctcatctcattggtccccgtttgcactttttgctgtctcctcagaatggtctggcctcgcaccgctctgctcgtctcctccttcggccttctccatttccgcctcggactttttgttcttgtttcactgatgcgccatttgtccggtggtcgtgccactttggccctttctctcaccgacaaaggcaaattgatcgatttccgtggtcctccattttgctgtcttctttactgtcttccaagggcaaatccgacagaggtcaatttgacacgacttgaatggatcgtcctccaggcgcccatcatccgagtt

SEQ ID NO: 49127 - DNA, 807 bp, Heterodera glycines
tttttgttgacccaccagcaacggaaaatgggcaacgaacacagccgtggtcgctttggtggcaacggcacaaacaaagaaaagggggacgacgatggcggtcaaacatctccgagcacttccactggaattcccgcctcattttcttttctcgctaagaaacgaaattcgacaaaaagtgcgctgatgggcagcattgtcgtggtcaacgagggggccagctgttcgtcgtccgctgaccctggcaaagacgtggaccttcggaggataaaggaaattcctcgttttttgcctttactccgcggagttttgcccggtcacagagacatccccgaagcgcagcagaaaatcgacagcaaaagcattcttagttttatgcatcgccttcagcaacattttaaaagctgtgctcaaacggtggcgactgagcagggccgaatgttcgcccgaattgtcgaaattgaccaattaatttcgtcgctgttcaaaaagacttcgacggccacaaaaagattggacgcactgaacaacgaattgagaaaggtcggcactttttccagccaattggaggaaattcaggcttctcttctcgatttgtcctcctccgccaattcgctaaaccaacttttgtccttcgacgaccgtttgccgcctcttcaattcgcatttactccaattttaacgcgaaaaaagttgtcagaaagtgccgggacaatgttgcctcaaaacagtgacaatattaattcgggtgacagaacggcgattgaaagggatttgaggaaagtgagcgaattgcgagtggtggac

SEQ ID NO: 49128 - DNA, 889 bp, Heterodera glycines
ctcgctaaactacccaccattgcggcaatgatttacagaaatctctaccgtgatggttcttccgtgggtgtgctcgacccgaacaaggattggtccgctaacttttgccatatgcttggctacaccgaacgcgaattcgtggaactgatgcgtctctatttggtcatccattcggaccacgagggtggcaatgtgtccgcgcacacgtgccatttggtcggctccgcgctgtccgacccgtacctgtcatttgccgcttcgatggccggccttgctggtccattgcatggactggccaaccaggaagtgcttgttttcttgacaaaaatggttgccgacattggacacgagtactcggagcagcaactcaaggaatgggtgtggaaccatctgaagagtggacaggtggtgcccggctatggacacgcggtgctgcgcaaaacggacccccgctacacgtgccaacgcgagtttgcgctcaagcatttgccggacgacccgatgttcaagctggtgtccacactgtacaaggtcacgcccgacattctgctggagcaaggcaaagcgaagaacccgtggccaaatgtggacgcacactctggcgttttgctacaacactacggcatgcatgagatgagctactacacggtgctgttcggtgtcagtcgggcactcggctgtctctcccagctgatctgggcgcgtggcatgggccctccgttggagcggcccaaatcgcacagcacggacggactgataaaattggcggcggcggcgacagcagcgaaataaatattttagaccaaaacaaaaagagaatagaaccaaaccccaattattattattattagatgtattatggttgttaaagtgtgtgtaacttgtgaac

SEQ ID NO: 49129 - DNA, 596 bp, Heterodera glycines
ctctgttgccgaattcggcacgaggatttaagcattttctaatttaattaacggtttgccaacctctgcacattcttcgttacaacttccgagattaatggcgtcgcacaccgccggcatccaacaacttcttgcagccgaaaaacgagctgctgaaaagattaatgacgcccggaagcgaaaagcacagcggctcaaacaagccaaacaagaagcacaggcggagatcgaccaataccgacatgaaagggagcagcgttttcgcgagtttgagcaaaactatttgggcacacgcgacgacattgaggcgcagataaagcaggagacggaagcgaatctgaaagccatggacagtaatgttgcaaaaaacaaacagcaggtcattgtgcgtctgctgcaattggtgtgcgacatcaatccggaactgcacacgaaccttcaactccaagtcaaactgttcggcaaagcggcataaactgaacggacggaggagggagttgggaaagaatgttttttgatgtgatcgtttatttaaaagacaacaattagttttatattccatcaaatataagaggttattaaaagtatcgtaaaaa

SEQ ID NO: 49130 - DNA, 666 bp, Heterodera glycines
gttcgtgttcccaggcaaaatgcgacccctcaccgatgaagagacggaaatgcttaacaataaattgtccaattacatcggccgtgacaacattcggctgttgttggaacgcgaggacggcgcctacgcgttcagagtgcacaaagaccgagtttactattgcagcgaacagttggcacggcaggcggcctgcgtgacgcgcaagaaactgttcagtgtcggcacctgtctgggcaagttcacccattccggcaagcgcttcttcctgcacatcactgcgcttgactatttggcaccgtacgcgggcggacgcgtgtggctgaagccgcaggcggagcagcagttcctctacggcaacaacgtggtcaagtcgggcgtcagccgcatgagcgacggggtggaggcgaacaagggtgtcatcgtctacaacatgtcggacattccgctcggcttcggcattgtggccaaaaacacatcggactgtcgacgggcggaccccaccgcgttggtgctgctccatcagtccgatttgggcgagtacatccgcaacgaggcgatgctcacataaacgcgcggcgacattcccccccccccaatttttgcttaaatttgtgttgaaaacatcaaatttttcagtacttgttctcaaataaatcctgggcattc

SEQ ID NO: 49131 - DNA, 1081 bp, Heterodera glycines
atctttccagggagagtgccatttgctgccatcacaagtcgctccccaaacttcgtccctccgcctcacttattccgctttccatggcgtcggctccaaattcgtccgccgaatgttcgctgagtttggctttccctcggagaacatttcgtacgttaaggaacaagacaagcccgaccccgactttggcactgttccattccccaaccccgaggaagggcaccgggtcctcaaactgtgcattgagactgcaaatgccaatgactcgactttgctcctcgtcaatgacccggacgccgaccgactccaattggcggagaaagaggcaaacggagagtggcgcgtgttcagcggaaatgagatgggcattctgctgacgtggtgggcgtggaccaattggcgtgccgccaacccaacggcggactcttcgcgggtgttcgtcctccattcggccgtctcttcccaaatggtcgccacaatggccaaaaaggagggcttcaaagcggcgcattcgttgacgggcttcaaatacataggcaatttggcacacaaattgcggtcggaaggcaacaccgttattgccgcctgggaggagtccattgggtttactcccggcacaacgctggacaaagacggcgtttcttccgccgcggtctttgctgaaatggccaattggctgcgcacccaaaagggcgtttcgctgcgtgaacagctcttccgcctcttctccatctacggctttcacctccaacgcaattcgtattggggggtcaaatcgacggaagtgacgaagaaattatttgcggaccttcgctccgattatcccgaaacgattgggcagaatttcgatgtgaaatttgtgcgcgacttgacgacaggttatgacaacgctcaaccggatgacagggccattctgccgctgagcacctcctccgaaatggtgacgttcactttggtcgacggaagggcggggacactgcgggcgagcggaacggagccgaaagtgaaatattacatcgaactgcgcaccgaaccgggcaaagaagaaaaggatctgagttcggtgcttgagcagctcgac

SEQ ID NO: 49132 - DNA, 1079 bp, Heterodera glycines
acaattattttcattcttttctgttctaccgtacattttgtttgtcaaatggttgcacttttcttctccaaatttgttgttgtcccttcctcctcttccctcggtgtctcttcgtcctctgccatcctttccctcgtctctcttctgtcccccgtcgccctcccccaccggcgttcatttgccgtggtgaataacgtcaaaatcgtcgacccgatggatgtgcgcaaggacaatgtgtctacgaagaaaaaggatgatggcgttgcggctgaagtacgccgcaagaagaaggtgtacgcgctggccgaattcttagaccgtcccgaaaattggggaaagttcggcgcattagacccgtccgatcggcccgggcgttcgtggaccgttgaggagcttcgcctgaagagcaactccgacctgcacaagctgtggtacgtgctgctcaaggagcgcaacatgctgctgagcatggaccacgcgtacaaagtgcgcctccgcaacatgccgaaccccgagcgaattgaccgtgtggccgagagcatggaacgacttgaggcggtggtgcacgaacggaacgacgcctttttgcacttggagacgggcgacagcgcgtcgcccccgaaacggacggtcacttccttcatgggcttcacctacgatgagtacgcaactgaacattatctgccggccgaggccaccggggagaagcagtacgagcagccaatgctggacgaccaggcccatctgatgcaagtgctgtggcgagagaaggagcagctgaagaaggaggtggcactgatggacgagtatttgtacatggacccggagcgggacggacgcaacgatatgattttgacacgtccaaagcgtcgctactacgaccgggtggaggacttgccgcagaatgttgttgcccggtggcgcaaggagcgcgagcagttccaaccaccgaccgacccatatgctggaaaagaggacgaagaatgagcacggagcggataggatgatgattaatgatcatgaagatggtgttgaacaacatataattaatgaatgcaaatgataaaaataaatatgcc

SEQ ID NO: 49133 - DNA, 670 bp, Heterodera glycines
  unsure (1)..(670): unsure at all n locations
ctccgtgaagaattcggcacgagagtttttgatttgctttcaaaatgaagctgaaccctttcgtctcctcctcagcgcgcaaatcgcgcaaacgccatttcaacgcgccctcgcacatccgtcgtcgcattatgtccgcgccgctgtcgaaggatttgcgcaataaacacggagtgcgttctacgcccattcgcattgatgacgaggtgactgtcacccgaggccactacaaaggcaatgccggccgtataatgcgtgtgtatcggaagaaatatgtagtgcacgttgacaaaatcactcgggagaaggccaacggaacaactgtccacgttggaattcatccttcaaatgtgcagatcacaaagttgaagatggacaaggaccgacgttcattgctcgaaaggaaagcggccggcagagcgcgagtgacgggcattttgaagggaaagcacacggaagagaccattgaagagtgagagagcggcaggggaggagagggacagagaaaacgaattgttacgccgaaattggacatcatttgttgttatttgttgtttgcaaatacaaaaagcaggcagttaaaaaacaaaagagcaggaggngnggagcccccctccgggggggggccccgtgcccaagttcccccagaaatggggccgtttacacaacc

SEQ ID NO: 49134 - DNA, 769 bp, Heterodera glycines
gtcctattaagcagtttttgtttccttacctcattgacaattttttcttcattttgtgctgttttcatcatgagtgacgacaactgctgcggctctgttggtgcccgttctccgactggctccatctcatcaagcggttccgctgattatgacgttgccctttcgccaacccaattgcttgcaatggcaatcaagaaacgtcgtcacttgctcgaggacaagcagcgcgactaccaacgggagctgctccactcgcacctcatccagaacttgtgtaagttcctcggtgaaggtcgagcgcgagtgaggcgacaccgccgcagttcatcgcggcgtaagttggtgagacatcgtcgttgggacgacgacacgagtggaaacggtgacgagaggggccagcaagtggtccctgacgatagccgatcgccttcctcttcccccaatccatcggggattgtgtttgagtcgacggttcagagcgatgccaattttggtggtgatggtggaggccggggcccacggtggctcaacaaacgctcttctcactctgacgacgatggacctccgatgaaacgaaaccgggcggactcttccgaggatgggctcacgttcattgatctcaaccaaccttgtgaggttgggaagttcgatggagaatttgcagatggtggacggatattctgatcggaatggcatggtcgtcatgatatgattacagtttctttccttttttctacgtgtatttttttttaccgcagataaataattt

SEQ ID NO: 49135 - DNA, 752 bp, Heterodera glycines
ccgtttgaggttaaatggcaaggtcaccgctgtttttactttccatttttatttgcactgaatttgtcctttgtgcagtaaaatcgaagaatcttttgaatctaaatgaggaaaattggcgaaacattctcagcggcgaatggatgatggaatttcacgcgccgtggtgccctgcctgcaaagacctccaaaaatcatggaattcattcgctgattggtcaagggatttgaacataaatgttgcggaaatagacgtgaccacgaatccagggctttctggacgatttcttgtcactgctctgcccaccatttatcacgtgaaggatggcgtatttcgactttacgcgggaccacgcgacaaaaatgatttcatctctttcatcgaagacaaacgatggaccagcatcgaccccctcccgtcctacaaacatccggacagctctcaaatgggcgtagtcgccgtcttcttcaaactgtccatggcagtcagagacttacacggacattttgtcgaaaatgtcggtgttcccgcttgggcttcgtatgcattctttgccacagtgactctcgcgttgggctgtgtcctcggatttatcatcgtgtgcattattgactatgtgttcccaactggggcgcttaagaagaaggaagccgagcgaaggaaggagcaaacaagtgccaagaaaaatgcaaaagaaagcgctgagaaagcaaatgggcaaaaggaagttttatcggacgaaaagaaatcg

SEQ ID NO: 49136 - DNA, 543 bp, Heterodera glycines
ataccgtttcttttattcaaatttgataatggcagatgatgaagactatgatgggggagaaatggacggcgatgagtttatggaggaagagcccatagaagaccttgatgcggaacaccaagcgggagaagaagaggaaggcgcggagaatgtccaagttattaatgtttctgacaaagttgcatcatccaaccgagtgacaactccttttatgactaagtacgaacgtgcaagagttcttgggacgagggcgctgcagatagctatgggtgcaccagttatggtcgaaattgaaggcgaatcggaccctttggaaattgcgcgtaaggagctcaaggaccagaagattcccataatcattcgtcgttacttacctgatggttcattcgaagactggggcattgatgaattgcacattacggattggtgaaaatgattaaccgcgtaattggcattttttctatttatgtttaatgaatttttgattcactaatattttctgcttattttgaccgatttttaattgacgttaataccttattt

SEQ ID NO: 49137 - DNA, 786 bp, Heterodera glycines
ggctttggacccgtccacattcccaaccagggcttccgattttatgtggaatgcgtgcgcgggacggacggacagtgtcagcaaagtgcggcccgacggaagacgctccactgcgcggtgcaggcgaaccccgcggcgaactctttccgctggctgaagaacggcggaccgatcagcggcggaaatgggcccgagtttatgatcggcacggacatgatcggacactcgctgcagtgtgccgccaataatggcctttacggtgaagagctccaatcgcccgccgtttacatcgattcgtacaccgccgcccggctaattcaggacaattttcagcaagtgcagagcagcgcgcccttccaacagggaaaccgcgtcgaaatgggccagcgagttcagatgagttgcgtcgtcgaaggcaatcctcgtccggcggtgttttggaagttgcgaaggagcaatggccaagtggtcgacgcgccttgtccccagggtctgaacggtcagtaccgggaagtgcctccgacccaattgccgacgggcgcagccgccgtcgcaaattcattggcggcacaacagtctaattcgttgatccgtctgcaagccatttgcgacctgcaagtggccaactattccttctccggacagtattggtgttctgcctgttcctacgtgtcccagggactgcccgagtgttctccgggacaagacgcgccgggagatcgccttctgaatatccaagtgcagggaccgccgcaacagtccgagacggaaccaagcgtggagcag

SEQ ID NO: 49138 - DNA, 734 bp, Heterodera glycines
gaaccaatgcacaaccaattccttccgcttgcgactgcgttgtcgtccatccgtcagtaccattcgccttccgtttatggcaaatcggatgaactgttgcagctgcgcattgagctgaacatgaccaccgaaaaagcgaccaaattcgtgtcagattcgcgtcaattggttgtccttccgcatccttttcaacactctgaaaagcgtaccattttggcatttgccggcaccaaagaagcgcaacaggaagtgatgctaaacggagcggacattgcaattgggccggaaatggtcaaaaagattctcaagggtcagttcaacatggacgactacgacttttgcattgcccacacggacatggccaagcacattctgccacttcgcggtgttatcaaaacgcgatttccgactaaaatcaacggaggaattggcgatgatctcaacgaaattttggaaagctttttgtccggaataaatttgaccgtaagaagggacccgaccaacaaggaatggggcctaagtgagcctttgatcggaagattgagcatgtccgatgagcaaattgaggagaacgtggcggtcattgttgacactctgtgcaaaatgcgcaaagccgtgcttggcccgttcatcaaccgcgcctctctgatcacagcctctaccggccctcaacagtcgtttttccctgtcgacgtgagcccttgggaagcgttgccgacggaagaggaaattga

SEQ ID NO: 49139 - DNA, 742 bp, Heterodera glycines
gtctttaagtaattatttgtaggcctttgcgatgaaagtcatcaacgagtttggctatcgtcaagatgcccgaacacccagccaaatccgcaacattgtctatcaaatgggagtttactcacatgcggacggctccgcttacattgagcagggcgagacgaaggtcctttgtgcggtttacggtccgcacgaatgtcgcttccgatcacgagccaaagaagacgaggccattgtcatttgccagtacagtcaggcaactttttcggttcctgacagaagaaacaggccgcgtggcgatcgtcgaggcaattccttttcccaccttttggagagggctttcgaatcagtcattttcacaaatttatatcctcgaagtcaaattgatatattcttcgaactccttgaggctgacggtgccaatttggccgcctgtgttaatgtcgccagtttggcactggctgatgccggcattcccctgcggggactgctgtccgccgtcgaatgtggtagtgctgatgggttgccttgtgcggatttgagttctcgtgaacatagtgaattggtaccacgcctcacaatggccaccgttggaggtaaagacgaaattgttcttatggacatgaaaaacctactccacaaaaatcatttgccgtctttgttacaaatgggcgtcaatgcgtgtgcccaagtacacatttgtctggagacagctgtttttaaacatgtcgaagcatcgcatccg

SEQ ID NO: 49140 - DNA, 848 bp, Heterodera glycines
gtcctttagaggacaactgaactcctatttcttctcgccggaagactttcgtcgtccgtttgtgctcagcccgtgctgatggagaaggaggaggagggtgaaaagtcgatgaacgacctggtgaccgcttcgtccccaacagaagttcgtcctgcttctcctcccgcttcttcctccgtctccgttccgccatcagcagctggtgttcccccgtctctctatgtgcgtcttcctcagcccgacgaccctttctatttttgcgccctcgccgttggcctcgccgcagttccgcccattacttttggcatttccgggccgcctcttcacgtttttgtgcaggctgacggcgtaactgatgcaccgaaggtggagttggaagacaaacagttgtgggaggaatttcacaaatttggcaacgaaatgatcatcacgacgagcggaaggcgaattttcccctcaatgagtgtcaagctgagcgggttggacgagaaggcaaattactacgtggtgatggacattgtgccgagggatcccaatgtgtgggagtttagcgactcgcgctgggccgtcgcgcgaccgataaacccgccatcagcggaggaactgctgacgccgttgcacatccatcccaactctcccgcgagcggggagcattggatgcgcgtaggggcgagcttccatcgagtgaaaatcgccaccagcaacgagacgaaccgtgccgaatttgtgcgttggttggcacaagcgacgggagggggcggggaaaacggttgtcattagagactgtacaggccctgagggcatttaccgagccgttttgtttctgtcccgttttttggacaaaccac

SEQ ID NO: 49141 - DNA, 719 bp, Heterodera glycines
ccccctagagtactctttttgaacgacggcctcgcaatttttcaattggacaggacattcaaccgaaacgggacctaactcgctttgttcgttggccaaaatacattttgctccagcgacagcgtgccgttcttgaaaagcgtctgaaaattcctccaccaatcaaccagttcaaatttgctcttgacaaaccaaataccaaccagctcttcaaattgcttaacaaataccgtcctgaaactcgccaggcgaagaaagaacgtcttcgtcaacgagctcaggatcgagcagatggaaagcaagagaaactgacgaaacgtcctcctgttgtccacttcggcattaaggatgttgtcaaagccgtggagaacaaaaaggccagcttagttgtcattgcacacgacgttgacccaatagaaattgtgatttgcctgccggcaatttgccgcaaatttggagtgccgtatgccattgtgaagggaaaagcatttctcggtcaagttgtctaccgcaagactacttctgccgtgtgtctttgcgacgttaatccggaggacagaaacgcgcttaaaaatttggctgatgttgcggtcaccaatttcaatgaacgcggtgatgaacttcggaagaattggggaggtgcgatcatgtcccagcgttcgcaagcacgacaggctaagattgaaaaggctcggcagagggatgttgggcagaaagtt

SEQ ID NO: 49142 - DNA, 821 bp, Heterodera glycines
gaaagcatgcaacgaaaaaccagaattttgaaaaacgactgttaactttcttccatccctgatccgcagtcgtggatttaagtcgctgatcgcggttgcgcgccaccaaaaatttcctccaacgccacaaccacactttggcacaaatgttgtcgtcacaaccgacgctgatcatggacaacggcgcgtacagcataaaggcgggctatgccaccgaccaaagtgccagaattttccccaacactgtgttcaaatcgaagggcgagcggaagcgcattttcgtcgccgacgaattggaccagtgcaccgaccgatcggcactgtttttcgtcttgccattcgaacggggatatcttgtgaactgggacacgcagctgcagatttggaaccgcgtgttcggcacggagggcgccggcctcggcgtggactgccaacagtgccgcctggtgctcactgaccccaacgaagtggcatttgcatttgcggacaacacggatgagattgtgttcgagaattaccgcttcaacgctttcctccgaacgtccgcgtccgcctgcaccgcccaggcgcactgctcggccaacaatccgtgctgtgttgtcgtcgactcggggcactcgttcactcacattgtgccatttgttgggggacaaattgtgcgcgagggcattgtccgaattgacatcggtggcaaagcattgaccaatcagttgaaggattggatctcctaccgccaactgcacatgatggacgagacgtatttggtcaattgttgcaaggaggactgctgcttcgtctccaccgactttcagcgggacatg

SEQ ID NO: 49143 - DNA, 526 bp, Heterodera glycines
cgctcttttgtctctttcagtttagctcattatctttatcactttgttacttcattaattgaatcgatttggcatggccactgcagtgaaaccgcgaagcgaaatgagcgccgaggaattggcggccaaagagcaggaggagttcaacttgggccctctctcagtgctcactcattccgtgcgaaaccatgcgcaggtgctcattaattgtcgaaacaacaaaaaactgttgggccgtgtgaaggcattcgaccgtcactgcaacatggtgctagaagatgtgaaggaaatgtggacggaactgccgaagaaaggaaagggcaaaaagaagtcgaaacccgtggcgcgcgaccgtttcatccccaaactttttttgcgcggcgacagtgttattctcgtgctgaaaaacccgttggccaacccggacgcttgaagacggaagtgtcgggggatggaaaagtcgtcgttgttcttttcgcatgctttttaatcttttatttaaataaactttgcctttgcaaaaaac

SEQ ID NO: 49144 - DNA, 518 bp, Heterodera glycines
  unsure (1)..(518): unsure at all n locations
caaccctttgagattcacctcaactcgccattcaacatccggaccatctacaacttccgcctgatcaacacgggctcaaagcgcattgggttcgccttcaagacgacgaagccgaagcgcatcttcctgaacccgccgtgcggcaccgtgggcgtcggcgacaccgtgaacgtgatcatcaccgtggcacccttcgacccgaacaacgaggacatcaagaacgatcgcgtgatcgtggaatggtgcaacgcgcccggcccgtctgacgccgtgttcaacttggactggttcaccgaaaatgcggttcgaaatgtgcgcctcaacgtcgtctacaacttgtagcggatgcaatatgatgatctgtatcgatccatttcatgaaatgtatttcaatgatcactgttatcttgagactgtcctgtattatgtgttccgttttttcatcatcatgaaatgtatttcaatgatcacggaacgataaatcggcgctagtgtaaaaannnaaaaaaaaaaaaaaa

SEQ ID NO: 49145 - DNA, 1410 bp, Heterodera glycines
  unsure (1)..(1410): unsure at all n locations
gtcctattaagcgacaaaagaaaatggtcaaagacaaaaaatattactacatcctcgaagtaaacaccagtgcaacagaccatgacttgaaaaaggcctatcgaaaattagcgcttaaatatcatcctgacaaaaatccgaatgaaggcgaacgttttaaactcatttctcaggcttacgaagtgttgagcaaccccgaaaagcgtaaagtatacgacgaatatggagaagaagggcttaagggtggcggagaaggcggcggaatgcacaatccaatggacatattcgaaatgtttttcggcggtggtggttttcgtggcggtggtgaaaaaccgaccaaggtcagagatactgttcatcagcttaccgtttcgttagacaaactgtacaacggatgcaccaaacacttgcgcatcacaaggcatatcctttgtccgaaatgtaatggtgtcggcggcgctaaggaaggggtcaaacaatgcgaaaattgtcgtggacgcggactggagattcacaacatgcaaattggtccgggaatgattcagcgaattcaaagagcttgttctgaatgtggcggtgagggggaaataaatcgcaacccgtgcaaacactgtggcggcaaaaaacggatcaaatcagaagagacaatcgaagtgcatattgagaaagggatgcgcgacgggcagcgactgatgttctacggaaagggcgaccaacagccggggctggagcctggcaacgtgatcattgtgctggacgaggaggagcatcccgtgttcacgcgaagaggcaccaacctcaccctgaacatgaaactgacgttgacagaggcattgtgtggctgcactaaacatgtggtgacgttggacaaacgcattctcagctttactcagttgcctggcgaggttatcaatcaccgcgacttctatgtaatccaaggcgaagggatgccgacccatcgtcacccggaccaaaaaggcgacctgattatccaattcttcgtggatttcccagacaaacttcctcttcaaatgaaaaacatggacttgctgcgagaattgctgaaagatcacgagattgagcctgagccggaaacaatcggagcgaacgcgcagaacgctatcaaattggtgcccatctctgaagaaatgttacgccggcgagcgcacgacgaagaggcaagcaacggagaaccgcaagcggtgcgatgtgccactcagtgaacgtgaccgtgaccaatgaaaggatgattttgatggtcaattacggcgtctgacttttacatattaattgctgaagagaatattataaaccgctgtttgtttgttctttctgtattccaatcgcattgtttgatcttttacttggattcttcatgtatttgattagacctggaacagcntggncgtc

SEQ ID NO: 49146 - DNA, 853 bp, Heterodera glycines
cctccttccaaattcggcacgaggctttttttaaaaaatggctaacaaaatgaagaaaaagaagaaaaatgctgttgctactacaactgctggaccccaaaaggatggaggcaaattcaagcagaaagggatcaaattcaacacggaaaagggccaacacattctgaagaatcccggcgtggtccatgccatcgttgagaagtccgctgtcaagggcactgacactgtgctcgaggttggcccaggcaccggtaatttgtccatgaaattgttggaccgtgccggccgtctgattgcctacgaattggaccctaaaatggtggcagagctgcagaaacgtgtggtcggaacacccgtccaatacaaattgcgtatcattgctggcgatgtgatcaaagcagccgagtggcctccgtttgatgtgtgcgtctccaatttgccctaccaaatttcatcaccgtttatttttcgactattgctccaacggccattgcccaggtacgccgtgctgatgctgcagaaggaattcgccgatcgactgttggccaagccgggcagtaaggtgtattgtcgcctgtccgtttctgtccaattattggccaccgttgagcatctgatgcgtgtgaagcgttccgaatttgtgccacctccaaaggtggactcggccgtcattcgcattcagccgcgcaatccgccgccggccatcaattacaaggaatgggatggaatgttgcgcattgcgtttatgcgcaaaaacaaaacactgtcggcgctgttcaagcagaagcaggtggtcgatgtgttgcgcaaaaattacgcagtcgtttgcggcacgaagggaaaggaagtgcca

SEQ ID NO: 49147 - DNA, 854 bp, Heterodera glycines
  unsure (1)..(854): unsure at all n locations
gtctcatcgacgaaatgattcagtccggtctctgccgactcaccccctacgaattgtgggccgtctgtcagccggaggttggcttaggcagggaaaagatcactctgcgcaaaggcgacggactcaacctgtacatgaacagagatttggcttccatttatgcgcgacatcgtctttacaacgcggacaaatattactatttggtggactatggccagaccaatcactttaaccaattgcgacttttgctgcgcatccgtggcgacgacgacttggcggaccgaatggaacacgtctctttcggtcgcatcatcggcctgtccacgcgcaatggcaaaaacgactcggtggactttctgattgaccagggcgcgcgcgaggcggatgcgtatgtgcacgcgtcgccgacgatgcgcgcggagccggccgaattgggcacaatttgccgacggttggccgagtcgacgctgctctttgagattgtcttccgtcatcgaaacagtcacttcactttctcttttcgcaactcttttcgtccgggtggcaccaacgctttgctgctccatgagaagttcagtcggctccgttcgctggagcacgcccaacacgagcacatggaacgcatccgcgcattgaacgcggacggagaatggaaactgaacatggaaatgcgggagccgggacagaagttggctcggcgcattcaggagttcgacacggtggtgctgaccgcgatgaagaagatggacccgaatccggtggccatttacttgcttanactgtgcaacgaaattggcacagcgatggccgcccttcgggtgcaggacgaaacaattgcggtggcactgccgcgt

SEQ ID NO: 49148 - DNA, 883 bp, Heterodera glycines
tttctcgcctaacgaagtgcgcgaaaaagcgagccaaatgatcggctaccatttggtcaccaaacagacgacggccgagggccgactgtgccaggccgtgttggtctccaagcgactgttcacgcgcaaggagtactacttcagcatcactttggaccgttccaccgccggtcccattttgatcggctcctccaagggcggagtcaacattgaggaggttgccgccactgatccggatgcgatcatcaccattccgatcaatattaacacgggcgttacactgcagatcgccgaagacatggccactcggatgggcttccatgacgaatgccgtgcacaggcggccgacaccattcagcgattgtacgacctgttcatcaaaagtgacggtaacttggtcgaaatcaaccccatggtggaggacgcggaaggcaatgtggtgtgcatggactgcaaattcgttgtcgacccgaacgccgagtttcgccaaaaggagctgttcaaactgaaggacagcagccaggaggacgagctggaggtgcgcgcccaaaaggccaacctgaactacattcgactggacggcaacatcggatgcatggtgaatggtgccggtttggcgatggccaccatggacatcatcaaattgcacggcggcgaacccgcaaattttttggacgttggtggcggcgcaacagttgaacaggtgtacgaggcgttcaaaatcatcactgcggacgagaagaaggtcaatgccattctggtgaacattttcggtggcattatgcgctgcgatgtgatcgcccaaggcattatcaaagcggcggtcgtccgagttggacttgaagattccgattgtgtgccgtctgcaggggacgcgcgtgga

SEQ ID NO: 49149 - DNA, 621 bp, Heterodera glycines
tgctatttatgagtctgcatttaactaaaacttaacgtttgagaaaaaatgttcgtaaaaacattttcgaataaaaccgttgttttcaatgtggacccgactgaactgtccgtcgagcaactgaaggcactgatcgctgaggaggaggaaattgctgtgccggaccaaagacttgtctttgctggttgccagcttgtggatggaactctgctcaggacttatggagttgatgctgattcaaccatccaccttgacctcagattgcttggtggtgggaagaagcgtaagaagaagcaatacactggcccgaagaagcagaagcatgttcgcaagaaggtcaaactcgccgtgttgaaactttacaagattgatgacaatggaaagattcatcgacagcgtttggaatgcaattcggccagctgtggagccggaattttcatggcgaagcacaaagatgggcgtttctactgcggcaaatgtcatcaaacattgaaggaaaagaaatgagtgcttgttgagaattattgaatggatagccgttgatgctattttggtttttcgttcggttgttgttatcttgttgcttaaaaatatttttgaaaaaaaaaaaaaaaaaaaaaa

SEQ ID NO: 49150 - DNA, 582 bp, Heterodera glycines
tgcatcggtgtcaccagaggaaagggtttcaagggagtgaccagccgatggcactgtaagaagttgccgcgcaagactcacaagggtctccgcaaggtggcttgtatcggtgcatggcatccgtcgcgtgtctcattcacagttgcgcgtgccggtcagaagggctaccaccatcggacggagatcaacaagaagatctaccgcattggcaagtcgtgtttgacggccgacggcaagaaaaacggaatgaccgacttcgacatcactgagaagaacattaacccgatggtttgtttattatttgattgttgcctgccaaattcctttacaagcagatcacaatcttttaattttaaattgccaattgcgcctaactcttgccttacgattttagggcgggttcccccactatggtctggtcaatcaggactttctgatgatccgtggctgttgcattggttgcaagaagcgtccgatcacattgcgcaagactttgatcaagcagaccaaacgttttgctttcgagaagataaacctgaagttcatcgacaccagctccaagtttggccatggacgcttcca

SEQ ID NO: 49151 - DNA, 553 bp, Heterodera glycines
agccgaagacaaattcatcgtggatgaagtcaaatcaaatgaatgggtcaaggtcaactccaacttctcttcgttttttcgcgtccaatactcaccgaacatgctgcagtctttgctggatggtgtgaaaaaccgcgaactcggagtgttggaccgttaccaactcgccagtgacctctacgcccttgtaaaatcttctcgcgtatccgtttcacactttctcgcgttgctcactgtttgccaggaggaggaggattactttgtgtggtctgcaattgactcgggcattggcagcatcgctcattcactgaaacatttggacgacgaacgcaagctgttggaccgtttcgagcgttttgtgtgcaaaatgattgaatccgtcgctgccaaattgggctgggaacccaaagagggagaaactatacacgttggacgtcttcgtgccctgctcctcagccgtttgtcacattttcgccatcaaccgactattcaaatggcactttccaaattcaatgccctcatcgagaaaggcgtcgatgttgtcccggacttg

SEQ ID NO: 49152 - DNA, 339 bp, Heterodera glycines
cggtcgcgtccgactcgaagaacgacccggcaaaggaaaccaagagcttcacagctcaagtcatcatcatgaaccacccgggtcagatcgctgctggttacactcccgtgttggactgtcacaccgctcacatcgcgtgcaaattcgccgaacttaaggagaaggttgaccgacggtctggaaagaaagtggaggacaacccgaaaaacccactccatccctttgttttatcgttattttttgcaattccttccacctccgtctctatccatattgtcgttacgttggataatgttcatttttttgttgttgttctggttggtaaaataaatttggcca

SEQ ID NO: 49153 - DNA, 543 bp, Heterodera glycines
ttttaaaattattttctaatcattaatatttaattcctaattatgttttatcaaacggtgtgccttcttttgctgttgagcgcatcgaatgatgttgcggtttttggacaggaagaaacaaccacaacatcgactagtagtacaagtacgagcacaactagttcaaccagtacatcgaccacaccaactacaacatcttcaaccagtacatcaactacaccgagcacaacaacttcttcaaccagcacatctacatcaactacgccaactacaacttcgtcgactagtacatcaactaccccgacaacaacttcttcaaccagtacatcgacgactcccactacaacatcttcaaccagtacatcaactacaccgagcacaacaacttcttcaaccagcacatctacatcaactacgccaactacaacttcgtcgactagtacatcaactaccccgacaacaacttcttcaaccagtacatcgaccactcccactacaacttcttcaaccagtacatcaaccacacccactacaacttcttca

SEQ ID NO: 49154 - DNA, 238 bp, Heterodera glycines
agatcagagatcacctcggggacatcattcacgaactttcttcgatgaaatttgaggacccatccgaaaaaaacggaagatcagatcaaaaaggattacgaagaactgtatgaacggatgcagaacaaattccgagcgttagaggatgaatgaacaaactgtgatcaatgataacaatttctcaaaattttccctcatttctcttagtgtagtgatggaaaaaacgtctcagtgagta

SEQ ID NO: 49155 - DNA, 1195 bp, Heterodera glycines
atattccgcccattttgggcttttaaaacacattcaatttcaaacggaagtgttaaatgtgcaacgggtggaggaatttgcacagaatggcaaatggacagtcacttatcggaagacggaggacgaggagcaaaaagtgatggacgacactttcgacggcgtcatgctttgcactggccatcactgctccgaacggtggccaaacccccctttccccgggcagtccgtcttccgtggccaagtcattcactcgcgcgcctttcacaccgcaaaaccattcgaagaccaaactgttgtggtggtgggcattggcaattccgggggcgatattgcggtggaactgagcaaagttgccaaaaaggtgtatttgtcgacccggaccggctcgtgggtgatcaacagagtgtgggagaagggccaccccactgacgcggtactgctcaaccgattcgcatttgccctgcgggcgatcactccgcgcagcgtccaaaacagattgatagagcgcaagttgaacctccgccttgaccacgaacggtacggccttcgcccgtcgcatcgctttttggaggcgcacgtcacagtgaacgacgaactgcccaatcgaatcgcgagcggaacggtggtgataaagccgaacattcagaagttggcggagaaggacgtgacttttgacgatggtacgactgtgtacggtgtggatacagtaatcttcgccaccggctacaactttttctttcctcagctggagaatggcagattgatttctgtgcaggacaacaaaacacttttgtacaaattgatgtttccgcacgacttatcgcctaagaacactttggccatcattggcctcatccaacccaccggctccattatgcccatttcggaaatgcaggcgcggctgttttgtgcccaattggtcggtgacatttcactcccgcaaaaggcacagatggaagccgacgcattggcacaagcgcgaagaattagcaaggaatttgtgaacagaccacggcacacaattcaagtgcaatacgtggattacatggacgagttggccaagttggtcggctgcaagccgaaattagtcggacgcattttcactgatccatgcctggccaaagttctcctcttcaacggcctcgtgccgtaccaattccgattggatgggccccaccgatgggaaggggcgcga

SEQ ID NO: 49156 - DNA, 539 bp, Heterodera glycines
tggaagtagaaaacgtaaagcttttcaaccgctggtcttatgaaaccattgaagtcaaggatgtttctttgcaagattatatttcagtaactcaacacccagtttatcttccacacactgctggacgttaccaagttaaaagattccgcaaatctcagtgcccaatcgtagaacgtctcgcatgttcccttatgatgcacggacgtaacaacggtaagaaattgatggctgttcgtattgtcaagcacgctttcgaaattatcaaccttttgactgacttgaacccaatccaagttttggttgacgcagttcaaaacactggacctcgtgaagactccaccagaatcggttcacaaggtaccgtccgtcgtcaagctgttgatgtttctcctctcccccgtgtcaaccaagctggtcacttgttgaccaccggagctaaagaagctgctttccctaacgtcaagaccattgcaaaatgtttagctgatgaattgatcaacgctgccaagggatcatcccactcatatgccatcaagaaa

SEQ ID NO: 49157 - DNA, 714 bp, Heterodera glycines
acttgttggcaccttattcaaaaggaggaaaaattggtctcttcggtggcgctggcgtgggaaagaccgtacttattatggaactgattaacaacgtggcgaaagctcacggcggtttttcggtatttgccggagttggagagcgaacacgcgagggaaacgacctttatcacgaaatgattgagggaggtgttatcgatctcaaagggaagaactcaaaggtgtcgcttgtgtacggacagatgaatgagccaccaggtgctcgtgctcgagtctgtctcactggtttgtccgtcgccgaatacttccgtgacaaggaaggacaggatgtgctgctctttatcgacaacattttccgtttcacccaggccgggtctgaggtgtctgccttgcttggtcgtattccatccgctgtcggctaccagcccaccttggcaacggacatgggcagcatgcaggagcgtatcactaccaccaaaaagggttccatcacttctgtgcaagctatttacgtgcccgccgatgacttgaccgatcctgctcccgcaacaacattcgctcatttggacgccaccactgtgctttctcgaggcattgctgagcttggcatttaccctgctgtcgaccctcttgactcaacttctcgtattatggacccgaacatcgttggaaaccgtcactatgatattgcgcgtggtgtgcaaaaaattctgc

SEQ ID NO: 49158 - DNA, 713 bp, Heterodera glycines
gttattttattatattcgtttatactcctcgaaatttaacgcaattacacagctaaataccgctttaaaccatggcaaatccttcgattaacgctaaggcggcagttttggtggacaatccgcgggttgaatttgtgcaactcgactcattggtggtcatgaaaattgtgaagcacggggacatcgaattctatgccggaatgtccaaaattgctggcgaaacgtgccaaggcattctcaccggactgatctccgtcgaggacaagcggcttgaagtcacgaattgtttctcgatcactcgtccggatgctctgcacgaaagtgaagagagtgccgctggtcccgagacgtccctttcagacgagaacaaacagggcgagattctcgacatgctgaagcgatttcgaatgatgaacatcgattacgagtcggtcggcttttaccaggcgcacccattcggcgcctgtttcagccacgaactgctcggttcattggtggactaccaatcggacatttcagacgccgttgtcattgtttacgacccggtcaaaacccgtcagggatgtctgacccttcgcgcttatcgcctctccaaaaaggcgttggatttggccatcacttgcgacgacagttggtctcctgaacagaccaaattggctggggtcaactttgccaatttcttcgaagaattgccaattgttgtgaagacagcc

SEQ ID NO: 49159 - DNA, 536 bp, Heterodera glycines
tttcgttgtcttcagtttattgagatagatgccggcttttacagagggacctcttcagagcaggacatccgtttcactgacaaggaacgcaaattgttaaggcaaatgaagttcgaaaatgtgcttgaaacaaaggtcgacttggcaaagataaatcttgatgttatcaagccgtggataacgcttaaactgaacgaaattctcgggatggaagacgacgtggtggtggaatatgtgttcacgcagcttgaggagaaggagctgaacccgaagaaaatgcaaatcaacctcaccgggtttctgaatgcgcgcagagctcgcgaatttatggcagaaatgtggcaaatgtttgtcgaagcccaagacagccccgaagggattccaacgagtttagtggagaagaaagtgcaggaacttaaggcatcaaattcgaacaaacagccaatgcagacgtaccacaaagcgacggaagtggactggaaccagcggtaccaaacactgacgggcggacgctatgggaaaatggacccaaaagc

SEQ ID NO: 49160 - DNA, 553 bp, Heterodera glycines
taaactacctaggtatccaacaaaaaaacattttagtccgcttttaaaaaaattaattgaacccctaatcttattagtcacagaaatattgcaagaatggctccaaaagagaaagaggttggaaagggatggagctttgctcattttttttggcatctaattaaaaaggaaacacgcaatgagaaggagagacacattttggcaaacggacgattggcactttcgtttttggcagttgcttttgccggatttgcccttctgtacgactacttttttccatttccaaagtcaaaaattattcttgcggtttgctccattagctatttcgtcatgattatggtcctccaggcgtaccaatggtacgttgagaagctgacattctttcaagcggaggagaaaaccactgacaatggcgaaccacgacattggaaatggtcatcggatatgaaacgctatgatgacaaatatgtgttgatcgctgagtactcccaaggcactcgtactggctcaatgaaaggggcaaatcggtggctgctatatcacggaggatggg

SEQ ID NO: 49161 - DNA, 1446 bp, Heterodera glycines
  unsure (1)..(1446): unsure at all n locations
ccaaaccgatttggactcgcaatcccgatgacatttcaaatgaggagtatgcggagttctacaagagcttgtcaaatgactgggaggaccatcttgctgtcaagcatttcagcgttgaaggccaactcgaattccgtgctctcctcttcgtcccccaacgcgctccgttcgatctctttgagaacaaaaagagcaagaatgccatcaagctttatgtccgtcgggttttcatcatggagaactgcgaggagctgatgccggagtacctgaacttcatcaaaggagttgtcgactctgaggaccttccgctgaacatttctcgtgaaactttgcaacaatcgaagatcttgaaagtcatccgcaaaaaccttgtgaagaagtgcatggaccttttcgaggagatttctgaagacaaggacaacttcaaaaagttctacgagcaattcgcgaagaacattaagcttggtattcatgaggactcggtgaatcgtaagaagctctcagactttctgcggtactacacttcggcctccggcgaggaaccatgcagcttcaaggactatgtttcgcgcatgaaagagaaccaaacatgtatctattacatcaccggcgagtccaaggacgttgtccaaaactcctccttcgtggagcgtgtgaagaagcgcggcttcgaggtcatctacatggtcgacccgattgacgagtactgcgtccagcagctcaaagaatacgacgggaagaagttggtcagtgtgaccaaggaaggccttgagctgccagagagtgaggaggagaagaagaaatttgaagaggacaaggtcaagttcgagaagctgtgcaaagtcattaaggacatcttggacaagaaagtccaaaaggtttctgtctcaaaccgtttggtctcttctccgtgttgcattgtgaccggagagtacggatggtctgccaacatggaacggatcatgaaggcccaggcattgcgtgactcctccacaatgggatacatggcgtccaaaaagaacctggagatcaaccctgaccattcaatcatcaagtctttgcgcgaccgtgttgagaaggagcaggacgacaaaactgcaaaggacctcgttgtgctgctgtacgaaacttctctgctcacctccggcttttcattggaggacccgcaacagcatgcgtcgcgaatttaccgaatggtgaaacttggacttgacatccccgacgaggaggagccggccgagcaacagccgagcacttcgggcgagccgacaattgcggagaaaattgctggtgccgaagaggaggcctcgagaatggaggaagttgactgaatggtgacatcgtctatccattcttggatctcggctattcaatattttgattcattgtttttttgttttcttgtttgacataaatttgaattannaaaaaaaaaaaaaaaaaaaa

SEQ ID NO: 49162 - DNA, 549 bp, Heterodera glycines
ataggcttttgcctaaaaatcgaagccctaatcataatttatttatcttcaaaaaatctgattttttgacgacggttcagtaccgaagccatttggccacttcacgagaccgagaggagtcgaatgatttatcatttgttagatttggtgagaatgggcattttaactgcttcgaaagtgtgcactttgccacggctttcttccgctcgctctatgacttggtggtggggcccggagaaaaacaatgggcgcgaacttgttggccccactttccacggggatgaattttaccaagatcgtcttgaccgttggtacccgtccattcgatttcgcaaaaatgaagaagtgatcacgcccattcgccacaaggaattgggagattggaaaaagttgagcattgaggagaagaagcttatctaccgctactccttccgtcaaactttggccgagtttgaggcattgacgccttatggctatctcacagtcactttgttcttttctatgcttgggcttactattctgtacgcttcgtttgttaggacttacgtg

SEQ ID NO: 49163 - DNA, 1072 bp, Heterodera glycines
gtcccataaattcaattaaactccattaattataaatgtttcaattgtatattttgacgagttcacttgaagtggcgggaagcgaagtgatcggacaacagtgctcaattcggacgaagttgaaaatgcaggaatggcaaaacacgtagccggaaacggtgagaacggtgtcatttttgcggatccgacgacaaattgggcatttgtccacttccatgcaaagagtttgctgttcagtcggtaaattgttgaacggatgcgtcggaattcgaatattccgacgcccttccacaaattgcccgaagcgacggccgagttcatccgagtagaaatactcgagaaattggaccaggaaaagagcgtaagtaaagagacggcccaaagtcgagggaagcgaaaccaacgaacgccaaagacgcgcgaaaacatttgtcctccgcaaatgaaaaggcaattggccctcagcgtcgaattgcgccacgtcggagagagttaacttctcaagacgacatttggccaaaagaagggaaaggctggggacagaagagaaggaaaagacgaaggccaattgtaagagcaacgtgacgaggaagagaagggctttcagagacggataaaagcgaaggaaaagacgacgccatcctttttgccgaattgcatccctttcactttcaatttgttcacttaatctttcgaatttgtcgtgaatgtaaggcaaaacaacaattagaaaaagcgaccgaaagcgatggcccagccgagaaaaggacgacgcattcattcgccacggaacccttttcatcccatagaaattctcggaaaatgaagcggaaaatcgtttgagaaagcgattctccaggaacaaatgaagcagcaaaaacagctcgtcaaaatgagagtcgacgaaagagagacgacggcccgaaaaatgggaaaacagatttaaaacactgcgaatgccctgcttcatcgacccgctcagagattcttgcgccaaatattcgaaaatggacggcaaagtcattgcgcacggattacccgcgtcagtgcgtgcgccgaggacagtagcaaa

SEQ ID NO: 49164 - DNA, 527 bp, Heterodera glycines
gcaaaggaattttcatctcaaggcttgtcgaagggggactggccgaatcgacgggcttactgagtgttggcgacgaagtggttgaagtcaatgggattgaggtgaatggaaaaaagttggaccaagtcgctgatatgatggttgctaatgcacacaatttgattgtcaccataaaaccggctaaccaacgcaattccctgcagcgtaaaggaaaagccgaccaattcgcagttcaaagccaataccatcaatatttcaccggagatggttcttcatcatcagccgttgggaaaattggcactttcggaagcggtggaggaggaaaagtttacccgactgggcacgggtcgtctctgtatcatctgggaacggacagacaccaccaccaccaaatggatgaattttttgatgattacgctgaggatgaagatgaggatgaaatagtggaccacacaaagacagcgttaaaaatccattgaaaattatgcaagtttttctatatataatgacaaataaaaacttaactg

SEQ ID NO: 49165 - DNA, 535 bp, Heterodera glycines
atttcaatcaatttctttactaaatctgacatcgaatctgtaaattttatcaatcatctacccgaaaaactttattttttggaatctgatggacaagtttttcacaatttgaatgatatcgacgacggaaagctcatccaattgcattttcgagcatgtggaggaaaaggagggtttggctcgttgcttcgtagcttccgaattcacaagtcaagcaaccaattgatgtgtcgaaatttgcaagggcgtcgactggccgatgtgagggaagaagaacgattgaagaagtacatagcgaagaaggcagaacgggagaaggaaaagcagaagaaaaaggacgaaaaaattgaacgtcttaaggcgggaagggaaacaaagcaccaatttgaggaccagaaacatttgcggaagcgcgacactctcctggacgaaagtgaggatgcggttgaagcaggcatggatgcgcttgaggtgaaagcggcttcatccgaacacgaagtcagcgaaacaattgccgacactgagccggtcgctg

SEQ ID NO: 49166 - DNA, 558 bp, Heterodera glycines
ttggtcgttttaagatttggcaatcggttcatttcgcgctcgtggagccgtgacgacatcgcttcggtgaccatttcgttcaaggagaacttcggcacccaaggccggggaggctattttgacaaaagtggcatcatccgggacgtcatgcagaaccatctgatgcaaattctcacattggtggtcatggaaaagccggccacactgagcgcagaagacattcgcaacgagaaggtcaaagtgttgaaagtgatcaaaccggtggaattggaccagacggtgctcggccaatacattggcaacccactgggaaaagacgatgactcgcgcaagggctatttggacgacccgacggtgccgcgtggctccaccacgccaacctttgccaccgccgtgctgtttgtgcacaacgaacgctgggagggcgtgccgttctttctccgctgtggcaaggccctcaatgaacggaaggcggaggtgcgcatccaatacaaggacgtgtccggtgacattttcccggaggattcgctgaagcgcaacgaactggtcatccgggta

SEQ ID NO: 49167 - DNA, 495 bp, Heterodera glycines
  unsure (1)..(495): unsure at all n locations
atttaattctccacagtcaaacaaccaatctgcaaaaatgtccggacgcggaaagggaggaaagggacttggaaagggaggcgcgaagcgccatcgtaaagtgctccgtgacaacatccaaggcatcaccaagccggccattcgccgtttggctcgtcgtggaggcgtcaagcgcatctccggcctgatctacgaggagactcgctcagtgctgaaggtgttcttggagaatgtgatccgtgacgcggtgacgtactgcgagcacgcgaagaggaagactgtcaccgccatggacgttgtctacgcgctgaaacgccaaggccgcacgttgtacggatttggcggttgagcgggacgggaagaacggaggaggagaggaatcatcaaacaaaactatcccaaacggccctctttagggccacaaccattcaaatggacggatatgctttatcaacttattttaacgataaatttgatcttttaaaaaaaaccnnn

SEQ ID NO: 49168 - DNA, 517 bp, Heterodera glycines
ttttaaaattattttctaatcattaatatttaattcctaattatgtcttatcaaacggtgtgccttcttttgctgttgagcgcatcgaatgatgttgcggtttttggacaggaagaaacaaccacaacatcgactagtagtacaagtacgagcacaactagttcaaccagtacatcgaccacaccaactacaacatcttcaaccagtacatcaaccacaccgagcacaacaacttcttcaaccagcacatctacatcaactacgccaactacaacttcgtcgactagtacatcaaccaccccgacaacaacttcttcaaccagtacatcgaccactcccactacaacttcttcaaccagtacttcaaccacacccactacaacttcttcaactagtacatcgaccacgcccactactacttcttcaaccagtacatcgaccattcccactactacttcatcaaccagtacatcgaccactcccactactactacttcaaccagtacatcaaccacac

SEQ ID NO: 49169 - DNA, 784 bp, Heterodera glycines
gccattgtgccgttgctgactttttcagtctttttctaattagaattgcttggtcatcttccaattagttttaatggtcagaacatctctggaaaatacccacagattggataaaataccaaccacttggtgcaagcattgagggatcgaggatttttgcattcaaaacaccacttttgcccgagttgcaaacatcaatcccaaaggagtgtcgtttttcaactttaactttattacaacagttggctttctctaatcgttcattgggacttgtgattaactgcaataatactaaaagatatttttgtcgaagagacatcgaagggcttgggatttgctacaaagaaataccatgtccaggccgcggctttctgtatcgtactgatgccgtaaaaactttcataaaaacaatagacgactttttggaacttaacagtgacaatgatttgctaattgcggtttgttgtagcaatggaattaaccgttctggctatttgatttgtaactatctcatcaatcgacttggctggagttctcatgatgcattgaatgcatttgaaagtgccagaggttattccatcgagagaggttcatatgttcaagcattacacaaagtcgacagagaacgtcgttctaaaacgatgccgttcggtttggacagaagtgagcatgaaatgggaaatgacgaagcacttcccgcgaagactgaccaattattgcctggcattagcgacttcaacccacaattgacagcgcaaatgatgcaacaattcttcaacatgga

SEQ ID NO: 49170 - DNA, 701 bp, Heterodera glycines
ggacatattgactgctgctgcaaattgtcgggaatgcccgacctttccatgacattgtccaactctcgcattttggacgatgtgccttttcatccatgcatccgatttcgtcgttgggagaatgaccgaattctttcttttgtcccaccggatgggaattttcgactcctttcctaccacataagccatcaaagcgtcgttgctattcctctttatgttcgtcataacattttgttaaaaaacggcacagctggccgtttcgaactgatggtcagcccgaagcaaagcatgggcaaaatgctggaagacgttgcgctcgaatgtcaaatgcctaagggtgtgcaaaattgtaatttaatggcaagtcacggcaaagtcgcatttgatcccacgacacggcttctacaatggacagttggaaaaattgaaattggcaagccaccgactctcaagggaacggtgtcgacaagtggtaacagtgcaaaagagcaattggaatctccacaaataacggcaaaattcaaaataagtcaactcgctgcttccggattaaaagtgatttgtctagacatatatggcgaagcgtacaagccattcaaaggagtgaaatatgtcaccaaagcaggaaaattccaaatccgaacttagtgttgttttttaaaccaaataaacgatgtacaataaatttcaatccggaaaaa

SEQ ID NO: 49171 - DNA, 358 bp, Heterodera glycines
  unsure (1)..(358): unsure at all n locations
catcactacgagacaccggtcagaaccggacggatcattttggagctcggcgggtacatcactgaacaggaggctcgttctattttgatgcatctctatttgcatatgccattcccagtggaatttgtcagccaagaattgatggacaaacgcaagggattggagatgaaagtgcgtgcaaataacagaaacaaattcgattgggacacacttatcaaatacaacatgcagaattgcaaggcttggctgagtccgtacgatgtctattggaagtgccgatacgaatgaactacggaattgtttttgttctttattaattcaaaataaaagtttgttttacaaataanaaaaaaaaaaa

SEQ ID NO: 49172 - DNA, 554 bp, Heterodera glycines
ttgtttcgttgtcttcagtttattgagatggatgccggcttttacagagggacctcttcagagcaggacatccgtctcactgacaaggaacgcaaattgttaaggcaaatgaagttcgaaaatgtgcttgaaacaaaggtcgacttggcaaagataaatcttgatgttatcaagccgtggataacgcttaaactgaacgaaattctcgggatggaagacgacgtggtggtggaatatgtgttcacgcagcttgaggagaaggagctgaacccgaagaaaatgcaaatcaacctcaccgggtttctgaatgcgcgcagagctcgcgaatttatggtattttttcatctcttggatcaccttttgtcattttaggcagaaatgtggcaaatgtttgtcgaagcccaagacagccccgaagggattccaacgagtttagtggagaagaaagtgcaggaacttaaggcatcaaattcgaacaaacagccaatgcagacgtaccacaaagcgacggaagtggactggaaccagcggtaccaaacactgacgggcggacg

SEQ ID NO: 49173 - DNA, 853 bp, Heterodera glycines
tcaaatggcatctgatcaacttctttcatcccgagatagatttttctcattcagagttttagattcataaataatatatttgtcctggtccatccacaaaaaaataaccacaacatgaggctaaatcttaacatttgggtacactgataattttattgatgaattaatttccatctatttttcatgtcgattaaggcatattttggttaatgtacctatttatgtcgaacctctactgactccccattttcgcgcatctccaaaaataaaatttgaaaaatacgcctccaaaagacgacagatgactgtgacatcgacaaaaaacaattcttttccgagctcatttaaagacattactctacacgacgtatgggccagcaatttggaggccgaatttgccaaactgcgcgacctcatcgacgactatccattcgtggccatggacaccgaataccccggcgtcatcgctacgccggtgggccagttccgcagcaaggaggatttcaattatcaacaactcaggctcaatgtggactgcttgaagctcatccaggtcggcttcactctgatgaatgagaagggtcagctgccgcccgcccgtgacattttccaattcaatttgcacttcgatccgagcaccgattcgttcgcgcacaattcgctggaactgctcaaaacggcgggctttgacttcaacaaacaccagaacggagggcatcaaattgggaggactttgggtgagctgctgaccacttccgggctggtggttgagccgcgcatcacctggctgacctttcacagctgtttcgacttcggctatctcatcagggccattatgctggtcaaactgccc

SEQ ID NO: 49174 - DNA, 1168 bp, Heterodera glycines
tttttaaaatttttaccagattaattctacagataaatgacaagtattcgaggtttgttgttcacgctcgcttctcccttgaaggcattttatgcaaatgtggcagtgaaacaaattgatgttacagggatgtccagcagtgttggaattcttcctacccatgtgcctacaattgcagtcttaaagcccggagttgtcaaagtccacgaacttgatggaaacgtctccaagtttttcgcttcttctggtaccctttcaatgaatattgacggctcgtgtcaagtgctcgctgaggaactttgttctcttagcgaactcaacgaacaggccatcaaaaatttgattgatgtcagccaaaagaaagcttctgacctcaatgcaactgatgtgcagaaggccgaggcgggaatttccattgaagtggccgaagccgcgctcagagccatcagcgaaaaataaagacaattgttgacgtatgaaaaatagatggtattgctgtttattgtcgtaatagttttataaatctaatggaaattcccttttctttcatttctcatttgttttttttttcaacaaattatttttgcttgaaatatttgaactttttttcacaaattaatttcgtagcaatggcattattaaaatgcgctatcatccgggggttgcttcatacattcaatggtcgacatttgttttcaacagtcatcgaacggagaggagaatttgccgaacttactgaagatgatctgcggaattttcgtggaattgtcggcgaccgttgtgttaagacagaagagattgacgaatacaacactgactttatagcaaattagggagcgcttgcgtttaccaaaggctttaccccttcatttatgaaacagtggcctcaacaggcgggagcatttcagcagagcatgggataggactgttgaagcgagaataccatcacaaactaatcgaccaaaaacggcgaatgtttagttctggtattgagcgactgtttgaccctcggctgatattgtctccttacaaaatgatagactaacattagagatggtattaaccttgtattaaccaattatcatgcggaaatatattttttattgttccccacttttctcttgcctaaacatatcaaacttttattgtcatgtaatcatgaacaatt

SEQ ID NO: 49175 - DNA, 695 bp, Heterodera glycines
  unsure (1)..(695): unsure at all n locations
gacagcaacaaaatgggctgggaaaaagcttaaacggagtggtgactaacaaaagcgcaaaaagtttgacggagggcaaaatggcgctactcgaagaaggaaagacggaacagaatggagacgaaccatcgacaaaagtgaaaatggcggaaaatggaggcggaggaggggcagaggtggcccaaaacaaatttggttcctcttcaattcgcccggcttcatctgtgctcagtttcttccgttcctcaaaaccggaggatccgtacgcctcgaaactgttcacttttctgcaggtgctcacagcctgtttttccggatttgcacacggtggaaacgatgtcagcaatgccattgctccgctcgtgtcactgtacaccatttacgatgaaggcagtgtccatcagaagggcgagacttccgtatatttgctgctttacggtgctgccggaatgtgcgttgggctttggctgctcggccaccgagtgatctacacggtcggcgaaaatctgaccaggataactcctcccagcggcttttccatcgaatttggcgccgctctcacagttcttttcgccagcaaattgggtctaccgataagttccactcagtgcaaggttgggagtgtggtggccgtcggactggtccaagcacatccggtggtccattggactgtgttcaggaatatctctctctcn

SEQ ID NO: 49176 - DNA, 467 bp, Heterodera glycines
  unsure (1)..(467): unsure at all n locations
tttattcacacataattcaatgttggaagttgttctggaatatttgccatcgtggattcgcactcttaattcgttcatcgattatgagggtcagcgtaagtctgaacgtttttttccaggttattttgattgtccacggtgtgcttgggttttttgctggttatctcactcaacagctgtcggtgactatgtacagcgtcggagttggatttctgatctcttgtctgattgtgcttcccccttggccgttttaccgtcagaaccctttgaattggcaaccaaatagtccggtagaggaagacaaagctgcgaatccgtcatcatcatccggcaataagaattcaaaaaagactcgttgagtgtgatcataattcgatacggtttccttgtacactttcttattgttgataaaccgcttctgttnnaaaaaaaaaaaaaaaaaaaaaaaaaaaaaaaaaaaaaaaaaa

SEQ ID NO: 49177 - DNA, 705 bp, Heterodera glycines
aagaaggttttgtctgttccaaaagccaaaaaatcaaaaaagcattcgttgacaaaatgggcatttccgacaacgatgtccaaaagcagcttcgccatatgatggcatttattgagcaggaagctaacgaaaaagcagaagaaatcgacgcaaaagcggaggaggagtttaacattgagaaggggaaattggtgcaacagcaaaggcagaaaatcatggaatattacgagaagaaagagaagcaagtggagctgcagcgcaagattcagaggtcgaatatgcaaaatcagagtcggttgaaatgtttgaaggcgcgggacgaccatttgaaaaatgtgttggaggaggcacgcgccaatctcagcaaaatttcggcggacagagagcgctatccggccattctcaaaggacttttgcttcagggccttttccaattgctcgaaagcaaagttgtgttgcgatgccgcaagaaagacgaggaaatggtggcgaggattttgcccgaatgtttggaggaatttcagcggacgtggggcaatcgaagcgaagtgaaaattgacaatgagtactttttgtccccggaaagtgcgggcggcgtcgaattgttggccaaagacggcaaaatccgcgtctcgtccactttggaagcgcgtctcgacctcattgccgacaaaatcactccccaagttcgcactgctctgttcg

SEQ ID NO: 49178 - DNA, 1075 bp, Heterodera glycines
  unsure (1)..(1075): unsure at all n locations
acgaagcaacaaaatatggccatttttgttacgaggacgacaaagaggaagacgaagacccgttcagtttcggcaaaatgatttcggcacaaaagaagggcagcgaggacgacagtgattgacggttgaatatttttgctattgtgctaaaatccatttttgtcagtgcttttacatggtttggtgtttgtttaattaatgcaaatttaaattcgaggcaaaatttcataaatcacattttaattgtttcactgtcttgtccaaaaatttttttgttttgtcttttctgaaaaacaatcacttactctccgccatttcattttcgcaaaacgaacgaataaatcacacatttaaaaaaacttgctcattattttgtttgtaacaatttgtattttcatttgctgattattcaataaaattccatttcattttttcggccttcttgaatatgaatactcctgctgcctatgagccgtttctgttggctgatggagagaaaaaggtggtcattgagaaggacacaaaagtgccgaatgcggcggtgtttacttttaacaaggaggaccacaccctcggaaacctcctcaaacatcagctcctcaaagatccgaaagtgctttttgccggctaccgaaacccccaccccttggaacacaaaattttgctccgtgtccaaacaaatcccgaaacaacgccaatggaagcattgaacaatgccattgaggatttggtggcggagttttcattattggaagagcgatttcgagacgcgataagggaaaaacgagaagaatgagaaattgttcttgtttacggaactgattattttatttcatttttcaataaataaataaaagtaaaaaaaaaaaaaaaaaaaaaaaaaaaaaaaaaaaaaaaaaaaaactcnagaaaagttaccacggcattnataacgatggataagggggtagctctagaggacccacgcttaaggtccacgggtttgctacgccgtaactcttctataatggcccctaaattcgtttccctggccgcctttttacaacgccgtgactgaaaaaaccgaggggtaacc

SEQ ID NO: 49179 - DNA, 544 bp, Heterodera glycines
tttcggtggctatttggcctcgtcctatgcccttgagcatccgtcgcgggtgcgacatttggtgctggtcgacccttggggtttccctgaaaggccacaaattgaacaattgcacatcccaatttggatgcgtgtcttcggcagattgctctctctgttcaaccctttggccactttgcgtgcggctgggccttttggcgctcggctggtgaaaaaattgcgttccgaccttgggattcgctatgctcaccaggacccggacgccatttacgaatacatttaccaatgcaatgcgatggaacccacgggcgaaattgcatttggaacaatgtccaagaattttgggtgggctaagcgaccgatgattaatcgcttccgtgggataagtccatctgtgccggtcactttcatttggggtggaaaatcgcggatggaccccggcccggcctatgaaattcaatacaggagacaagacgcctatgcggatgttcacattgtcacccgcgccggccatcacgtctacgccgatgcgccagcggacttt

SEQ ID NO: 49180 - DNA, 546 bp, Heterodera glycines
ttacgaaatacaaaaaagaggaggatgtgctgtgttacactttgcacctgtatcagcgatcaatgatgtgcgaagcaccacccagctcgacaagcgttgtttaaatgcaaaatggccggtatcgcagcaggaagactgacggaggagcggaaagcctggcgcaaagaccatccattcggtttcatcgcacgacagtgcaaaaaggaggacggcacattggacctgtacaattggatctgtgccattcccgggcccaagtcgaccatttgggaaggtggtctgtacaaattgcgcatgatcttcaaggacgacttcccatccacgccgccaaaatgccgttttgagccgcctctcttccacccgaatgtttatccgtccgggacggtctgcttgagtctgttagacgagaacaaagactggaaaccgtccatcactgtgaagcagttgctgctcggcatccaggaactgctggtgtcgcccaacccggaggacccggcacaggcggaagcgtaccaaatttatgtgcaaaatcggcccgagtatgag

SEQ ID NO: 49181 - DNA, 1273 bp, Heterodera glycines
  unsure (1)..(1273): unsure at all n locations
gtttgggcatcggtttggaggactttgaactgctgacggtgatcggacggggttcatacgcgaaggtggtccaggcggagcacaaaaaaactggtcaaatttacgcaatcaaaatcattaaaaaatcgttagttgtgactgatgaagaggacatcggttggattcaaacggaaaagtccgtttttgagactgcctccaaccacccttttctcgtcggacttcactcatgctttcagactgattcgcgtttgtttttttgtcattgaatttatccctggcggcgatttgatgtttcacatgcaacgtcagcaaaaattgcctgaagagcatgcgaggttttactctgcggaaatcattttggcgcttcattttctccattctcggggcatcatttaccgtgatttgaagttggataatgttctccttgacgccgaaggtcacatcaaactcactgatttcggcatgtgcaaagaaaacattggccctggcgatggcacttcaactttttgtggcactccgaattatatcgctccagaaattttgatgggcgaagagtacggttttagcgtcgatttttgggcccttggtgtgcttatgttcgaaatgatggccggaaggtcgccattccatctcccaacaacggaagaggacgaacaaactgctgaggaccttctctttaaaatgataatggaacatcaaattcgcattccacgccatttaagcgtgagggcagcgaatgtattgaagggatttctaaataaaagtccttctgagcgtttgggctgcaaaaccgacttggaggagggactggcagacattaaaatgaacagtttcttcaagtcgaacatcgactgggaattgcttgaacagcgacagatagcgcctccctataatccaaatgtgtccggagacagagacttacaacgatttgacacgagtttcaccaacggaaatccttncctaacgccggacagtccatcttttttcgcgcggattgatcaatcggagttcgaagggttcgaatatgtgaacccattgatattcaacaaggaggatgccgtttaaatatcaggacagaattattcacttttcgagattatctgccaaaaataattaaattaacgccaaaaggattcataagtattcaaatgcccactgtcaactgaatcacttggtttctttattccaaaatacaaaaatattaattaattaaattttaatttctaaatatttcactgaattgtgtttaattgtgtgcataaattattgttat

SEQ ID NO: 49182 - DNA, 548 bp, Heterodera glycines
ataacgcaaagctgtgggagcagtccgggcattggcaccattatgcggagaatatgttccggttcgaaattgagaaggagcagttcggactgaagccgatgaactgtcctggacactgtctgatgttcgactacaaaccgcacgcctacaacgaattacccatccgttatgccgacttcggtgtactccaccgcaacgaaatgagcggcgctttgtccggtctgacgcgcgtccgtcgctttcagcaggacgacgcccatattttttgccggaaggaccaaatattgtcggagatttcgggctgtttggattttctgaattttgtctacgtggaagtgttcggcttttccttccgtctccatctgagcacgcggcctgaagagggctatttgggcgacttggccacttgggaggcggcagagacacagctgaagcaggcattggacaacagcggactcaaatgggagctgaacccgggcgacggagcattctatgggccaaagattgacattcaaatcaaagatgcgttgggcagacattggcaatgt

SEQ ID NO: 49183 - DNA, 684 bp, Heterodera glycines
  unsure (1)..(684): unsure at all n locations
ggagaattgcgaatgtcgtcgattcttttaattatttttggttttaaaatgctctcaatccctaattaacggatgtgatttgagttatgtatttaaaagccgtaaaaatgttcagaaatttaccgcaaaatcatcagagagagaatgtccgccggtcgtgccaacattggcaaaccggcgccgaatttcagcgccgaagcggtggtggactttgactttaaaacggtgtcgttggacgactataaaggcaaatatgtggtgctgttcttttacccggaggatttttcgttcgtttgtcccactgaaatcatcgctttttcggaccgttcgaatgaatttgccaacataaacacgcagcttttggcctgttcaactgactcaaaattctgtcattttgaatgggtcagcaaaccgcgcaaacaagggggacttggcgaaatgcaaatcccaattttggctgaccgaacccaacggatcagccgcgactacggcgtgctgaaggaggacacgggaaatgcttatcgcggtttgtttatcatcgacacgaagggcattttgcgtcaaattaccattaacgacacgccagttggacgggcaatcgacgagacgctgcgcctggttcaagcgtttcaatttacggatgaacacggcgaagtgtgcccggncaattggaagccgggcgaa

SEQ ID NO: 49184 - DNA, 522 bp, Heterodera glycines
aaccccagcatcttccagaaaatcattcttctcaacaaagagattattatcatggaagagaatttctgttgctttgtgttcggatggattaacatttaccttttcttccacacggcttttcgttataaatttgaaaagtacgtatacaaagttacccgtgaacgatttggcaaaatgaaggcttacattgacaatgaattgaaggaagccatcgagttccgcaagacttcaaaggagcaggccgactcgttgaaagcagtgcatgaaaactttcccacaattttccaagagaatttggcgctgcaacttgaagcgacctaccgaaaaaatgtggactacgcctggcaagagatgaagcgtcggttggattacctgcaggaagtgcaagcaatcaaagaccgattcagcaaggaaatgatggtcaaactgatcactgatggcgtacgaaaacaaattgaaatgaatgagggcggaattcgcgacaaatatttggaccaatgtatcgaacaacttcgcgttctg

SEQ ID NO: 49185 - DNA, 671 bp, Heterodera glycines
tccccctaaacaaaggcaaaagccaaacagatcaacaaataaacacgtcagattagggtcgattcggaatggcacaatatgtgccgtggtattacaaacgctcaccgcccattttttgtggcgtttgtgtgcccgtttatttgggcgtttggtccgttcgtaagttcatcgttgtgcttggctttctgctctttctgatcggcgttctgctactgctcggtcttctgctcatttgcgtggccatcgaatgttccgctgctgccggtgctttacttccgttcgccttagtgcttatcattgctgggctactacttttgcactgcggatgggctgctcatcttttggacgttggcgagggaatgccgtacggtgaatactcgacgacaaaaacggtgagcacttcgaccagaacgaaaaggacggcgccgaagggggaggaggagccggtgttcgaagagatcgaaggcaaacagccgccgcccgagatcaagcagggattttggcaattcgatgagcgcgaggcgtggcaaacggtggccaatccgtacccgataaattacacgctgaagccggtgattgaacgccaaccgtacgtgccataaccatgggaaagcaatgaaaatgccattctctgtgccaattttggacaatcccatcgaatgccactgaat

SEQ ID NO: 49186 - DNA, 424 bp, Heterodera glycines
ttttggaccctaaatttgtgaaataatttgcttattctcaaaattaccatccaaattgcttattgcatttaatacattgtcaaagcgaggccatgaagcgagtgtgtgtcgggatttggaattgttccaagtgtcacaagaaagtggccggcggcgcctacgtgtacgccaccaccaccgcggcaacagtgcgaagcaccatccgccgtctgcgcgagaccaaagagtgatttgccgaatcccaacggcggagaacaatggtggtgacgacgacttttgcaccccactgccactgttttttgttgttatgtgttgtttttgaatgaaaatgggaattgtttttgctttttgacatttcaacatttaaattatataggtagaagcaatatttccctgggctatcaaatttagcttatcttttgaa

SEQ ID NO: 49187 - DNA, 638 bp, Heterodera glycines
cactcgcaaatgccccaaaagggggccttttcgacgcgttcacctcaaatccgttgttcaccggcggtgccggattgatgtgtgtcggtgttttgttcaactatggacgcaaattgtcgacggttggtgcctcggttttgcgtcggaaatatgtgtcaacattggaactgagcaacgaagaccagtgcgttcatagtaggacgataaccattcaatgggggttggacttcatcaacaagcaaagtcaacgcaaaaccaaccaactgtcagtcagttcgacggagctgatcagcgaaagcggcaaagcgtccacgcaattctttttcatgccgggccagggccaccattacatgagttaagggggtcgattagtgcgagtggagcgcgagcgtacagagcaaatgctgcaaagggcggacaaacgacggacaccgctggaaaccgttcgactgaccacaattggcgtcaagcccgaattttggcgacaaatgctagagaaagcggccaaagatgcactgtccgaggtagagacgggccttgctgtgtatactccgttcggtccggaatggcaccattttgggaagccactgaagaagcagccgctggacacaattgtgttggacaacggcatccgcgaa

SEQ ID NO: 49188 - DNA, 374 bp, Heterodera glycines
  unsure (1)..(374): unsure at all n locations
caacggagaatcatcaaagacatggagattctctgggatgaaaaaatggcacgtgaactgggagataaggcacttaaagatacaattcgacaacgaggatgtcgaattcaaacctttgtcagcggactgcaaggttgttcatgagttcataggcggctacatttttctctcaatgcggagtaaagaccaaaaccaaacactggacgaggaagggttccatcgcctgactggaggatggggatagaaaattttatttgtaaaccacaaccgccatttcaatttgtcatagtttctcacatttaaacaaaataaaagcgacaatatgcaaannnnnannaannnnnannnnaaaaaaaaaaaaanaaaanaaaaaa

SEQ ID NO: 49189 - DNA, 608 bp, Heterodera glycines
gcaagcggatcgattcacccagagcgttctcttcagcaaaaccttcacttttctccatattttgttaacaaaatgccaccaaaaccatccggcaagggagcgaagaaggcagtcaagtcgaccaaggcggtgcgcacgggagacaagaagcggagaaaggcccgcaaggagtcttactcggtgtacatctaccgtgtgctcaagcaggtccacccggacaccggcatttcctccaaagcgatgtccatcatgaactcgtttgtcaacgacgttttcgagcgcattgctgcggaagcctcgcgattggcccattacaacaagcggtccaccatctcctcgcgcgaaatccagacggctgtccgactgattctgcccggcgagttggccaaacatgccgtgtccgaggggaccaaggcggtgacgaagtacacctcgtcaaaatgagcaggagacgacgaatgcggtggtgatcggacggaaaaacaaaactatcccaaacggccctctttagggccacaatcactcaaatggacgtgcatgactattttttaattttatttatgtaactgataaaatccgtttcgctttccaaaaaaaaaaaaaaaaaa

SEQ ID NO: 49190 - DNA, 657 bp, Heterodera glycines
tttaatcctccaatccgtccgtctccattcatttccaaattattcaaatcctacaataacaatacataaaaaatggagcattttccttctaaatttgttctctgcttgctcattgcattcatcgccgttccatgctctgttttggcactttctgctggcagccgcgtgtcgatgctcgcgtgccacaacaattaccgctcacaactggcaaaaggcactgcggacaacaaatcgggcaaaatgccggctggcagcaatttgatccaacaaaaatatgattcgaatattgagtcggtggcgcagaagtgggccaacggatgctcaatgtcccactcgggttcatcagggatgggcgagaatttgtacatgactagttcatcgacaatttcggaagctgatgcgctgaaacaagcttgtgacatgtggtgggcggagttgaagcagttcggctttcagtcaagtcttgtgctggacatggctcagttcaacaagggcatcggacattggagccagcaagcatgggcctccactgctcaaattggctgtgccatggcacgttgtccgtcctccacctgcaagacatgcgttgtgtggcacttccaagcagctggcaacctcatgaacgcagccgtctacctaaaaagtgccgcgtgcagc

SEQ ID NO: 49191 - DNA, 541 bp, Heterodera glycines
ttctttccaatttcatcactttttctttcccaatgtaattgtaatatcatccttttaatattataatttagcgattgaattcaataccccttcaatttggctatcatgcaaatcttcgtcaaaactctcaccgggaagaccatcgactcttgaagtcgaggcgagtgacaccatcgagaacgtgaaagcgaagatccaggacaaggagggcatcccgccggaccagcagcgcctcatcttcgctggtacatcaacttttaaaccgttgcagcatcatttttatacataacccttattttcagggaaacaactcgaggacggacgcaccttggccgactacaacatccagaaggagtccactcttcacctcgtcctgcgccttcgtggagggatgcagatcttcgtcaagacgctcaccgggaagaccatcactcttgaagtcgaggcgagtgacaccatcgagaacgtgaaagcgaagatccaggacaaggagggcatcccgccggaccagcagcgcctcatctccgctggtacatcaact

SEQ ID NO: 49192 - DNA, 776 bp, Heterodera glycines
cgttttcgatcgtccttccttttcttccctctttttttttgctcctttaactcattttcttgatccaccaccgttttgtcctcctacccatttcctaaatcaaataacaatccacagatcgctgagaaatggccgagaacatcgaagaaatccttgccgaaatcgacggctcccaaattgaggagtaccaacgcttttttgacatgttcgaccgcggaaagaacggttacataatggccactcaaattgggcaaattatgaacgcgatggagcaggactttgacgagaagaccctcagaaaattgatccgaaaatttgacgcggacggctcgggcaaattggaattcgacgaattctgcgcgttggtgtacactgtggccaacactgtggacaaagacacgttgcgaaaagagctgagagaggcattccgactgtttgacaaggagggcaatggttacatttcgcgccccacgctcaaaggactgctgcatgaaattgcacccgatctcagcgacaaggatttggaggcggcggtggacgaaattgacgaggacggcagcggaaagatcgaatttgaggaattttgggaactgatggcgggcgaaacggactaaacgaacgatcagaaagaggaaagaaagaacgaaagaaagtgatcaattggcggaaacggcggaacgtacaaaaaacgtcctcaaaacaaaaataaaaaaataattcgccaattattatttttgcagcggaatttcccattaaaattcagtggaaaaaaaaaa

SEQ ID NO: 49193 - DNA, 560 bp, Heterodera glycines
aaattaaacaaaatcaaatgcatttgattaacttaatcgccctctttttcatgcttttcggcccatccgtccagcaacacacaaaaaagccgacgaaagaggacaaagaagcggctgtcaattgtcacaacaaattccgatcgcaattggctctgggcaatgccgacaataaatcggggggcaaaaaaatgccaaaggcgggcaacatgcgcaagtttgaatgggacgaaaacttggccaaacttgcggatgaatgggccaacaaatgcacattatcgcactcgtggaacggctgggcaggcgaaaatttggcaatgaaaggcggaacattttcgaacaaggatggcttcgagtacgcttgcggtcgctggtgggacgaactgaaccgttacgggttcaacccgaatctgattatgaccggggaaaacttcagtggcatcggccattggactcagatggcgtgggccgacaccgaccgaattggctgtgccatggcacaaaactgcccaaataccaattggaaaacatatgtggtctgctggtattacacgggtggtaat

SEQ ID NO: 49194 - DNA, 495 bp, Heterodera glycines
catttaattctctacagtcaaacaaccaatctgcaaaaatgtccggacgcggaaagggaggaaagggacttggaaagggaggcgcgaagcgccatcgtaaagtgctccgtgacaacatccaaggcatcaccaagccggccattcgccgtttggctcgtcgtggaggcgtcaagcgcatctccggcctgatctacgaggagactcgctcagtgctgaaggtgttcttggagaatgtgatccgtgacgcggtgacgtactgcgagcacgcgaagaggaagactgtcaccgccatggacgttgtctacgcgctgaaacgccaaggccgcacgttgtacggttttggtggctgagcagaacggtgacggaagagaacttcaaccaaaaacaatcccaaacggccctctttagggccacaagcacccaaatagacggatatgcttttcgaaaaacttgcttttgcattttcttttgtttgaataaatttggaaattatta

SEQ ID NO: 49195 - DNA, 1489 bp, Heterodera glycines
cttctcgctcgacctttccttttcttcattgcccttacaaaaaagaatggcttcatttttacgcagtcggctgcgctgaaaacaaaaaaaaattataaggcaaagaggcggtggatcaccccatttctcaccaccaatcagtccaacgttccatcattaacaaagcagcgttcctaattttgccaatttctaagggtctttttcaagtcgaggatgtcttcgcctccttcctcagtccttccccaggatgttttcattctgtccgctgtgcgcactccgatcgcttcttttcgctcatcctttgccagccttaatgccgttgatttgggcactttcgttgctaccgaagcgatccaaagggccggcttaaggcctgaccaagtggaagagacggtgactggctgtgtgctcagcgctgggtcgggccaaaatgtgtcacgccaaatcgcgattaaatccggtatccccgaggcgaggcaggcgtacactgtgaacaaagtgtgctcttccagtcttaaggcattgattttgggtacccaatctgtgcagttgggacaacgttccatggttttggtggttggcgttgaaagtatgagtcaggcaccattttacttggcgcgtggtgacaacaattacggggatatcaaacttttggattccatccaacgcgatggcatttcggacgcaatgctcggccaaccgatgggtgtttgtgctgagaaaacggttgctgaatttggcttcacgcgtgagcagcaggacgcgtatgcactcgcctcctatgctcgtgcgactcgcgcgtgggcgggcggcgcatttggtgcggaaattgtgccggtgaaagtcaaacagcggaagggcaccgagttaatggtggcagaggacgaagagtatcggcgactaatgcccgacaaagtgacttcgctgcagccggcgtttgtcaaggacggcactggtaccatcacgggcggctaacgccagctcattgaatgacggagcggcatcgcttgtgatcgcatcaggccaagttgaaggggcaaaaccgttggctaaagttatcgcctacgccgaggctggcagagcgcccgtcgacttcacagtggcgcccgttgacgcggtcaaaacgttgttacaatcggtgaacatttcgatcgatcaaattgcgcgttgggaggtcaatgaggcgttctccgtcactgccttggctttcattcgtcagctcgacttggacccggcacgggtaaacgcactcggcggagcggtggcgctgggccatcccattggatgttcgggagcacggattgtggtcactttggtgcatcaactcgagtcacgggaatttggtatcgctgcaatttgcaacggaggcggagaagcgactgccattcttgtgcaaagaatttgattcagaaaactgttcgccgattgttagaatttcttaatttcgaatttgtcctttttaaattataaataatcaattcggtttttc

SEQ ID NO: 49196 - DNA, 544 bp, Heterodera glycines
  unsure (1)..(544): unsure at all n locations
atcgcnnaatcnagcagtagacatggacttctgcctaaatagtttttctttttcaccacaaatggcttcttcaacagcttcctcttcctcggcaaccaatgaacaacaaaaaatagtgaatggctttcaaaagcttcgtgaattgcaacaggcgaccatcaacgaattaaacaaaattcaaactgagcagagggaacacacgactgtgcttaagactgtgcagtctcttgaaccgaatcgcaaatgttttcgacaagtgggagacacacttttcgaatttacggcgtcagaattaattgtgctattggaagaaacaattaaaaggttcaaacaaagagtggacgaattggaaaaccaagtggtcaaagttggcgaggacatcaacgcgtacaaagaaaagcacaacatccgttttctgagcaacaaggacgtgatcgaattgcagaagaagcaagctctgtccaaaatttcccagctcgaccttggcccgggtggaaaatcacaataagacggacggaatcagttgctagcaaagtattttgtt

SEQ ID NO: 49197 - DNA, 452 bp, Heterodera glycines
ctgcgcaagaagcaacatttgctggtgcaggcgcgggagaattggacagcgaaagatctgaaaagagtggtggagggcattctgaaggtgccacccgagaaacagtctctgtacaagccgaccaatgagcagcggacggaatgggaggcaatggacgagaagcaaacgttgcacgaattgggattcacaatgaaaaatgcgcgagcggatggcccggctgtgttggcgttggttttgccagaggatggcaaaagtcccgacatagtgccaatgacagtcgcaccgccggtgcccgaagcaatggcacagaacaaacagtccgaagctgaaatggtcgaggagtgaccacaccacaacattttagagggcagtgattttctcagttgacttcgccaaattttattggaaaataaataataccgaaagcattaaaaaaaaaaaaaaaaaaaaaa

SEQ ID NO: 49198 - DNA, 709 bp, Heterodera glycines
ggaagaaactgagggcaaattattgcaaatccgagaaattttccacgacttgctgatgtccctcgaactgcaagagcacgtgcaatgggccgacatggtacagaaattctgttcccttgccggaatgtttgcgtcgctgcaacaactgatgagaaagccgggccataacaatttcgatgacaatgttaaactgatgaaaatgacacaatttgtgccgaagaatgtttcacttgaactcgacccgaatttgacgcatttaacggagggacgactctcaaactttggccacaatatcgttccgattttgctgagaacgaagctaaagccggacgtggaggaagacgagctgaacatcgaacgcgaccggtcgaagggagacattcccaaacagatcaaaacattgaactcgcacattgacatgctttgtggaaagttggctgatttcacaaaattgcacgtggtggacagacgcgaggcaccaagttattcacaagaagaaactgtaaaattggtcaaagcaatttgtctcggcagaggaatctatccaaaagctccctcttctgctcatcccgggtccgcagatgctggacgaagtacgagcagttctcagaaagcgaaatgattcttagatttttatgtatttttttacattatattgtttttggtggcttaaatttttgatacgaaaaaaaaaaaaaaaaaaaaaaaa

SEQ ID NO: 49199 - DNA, 511 bp, Heterodera glycines
ttgttattgtatttcttttccattctcggacaaaggccgaatcggatgaggaaggcgccgctgaccaaaacatttgggccgttttggtcgcggggtccaacggatggtggaattacaggcaccaggcggatgtttgccatgcgtggcatgtgttagtcgaccacggagtgagcccggacagaataacgcaaacggaatgccataacaaagtgatgcacactttcaacaaaatttgttttaatttctcaaagagtccgtacgttatgaaatatgcaaaaacattggccaatttgtgcgagcgaagggcggacacggcacaaatcgtggccattttgaaggaacaatgtgctcaaatggaaaagatggaagttcattagtcaaattaattaccaattgaagagataattggttcattgaaacggacgatgcgatgacgtcatccattcatttatcatttggataatttgttaaataaaataaaggccaacggaaaaaaaaaaaaaaaaaaaaa

SEQ ID NO: 49200 - DNA, 689 bp, Heterodera glycines
gttgaggcatgctacaatgcaagaccagctgtagtcttgacatattttcatcctgagacggcacctcgaattgacagaccaccgacgtttgatcctttgtatggttttccaaagggtcgcaagccaagagaaatgcaggcttcgtgggaagaattgttcgttttttttacataaacaactgactaaatggctctacacaagtttacgcaaactggtgatggtaattggttggacgcaaaaactgcactagagcccactaaactataaaataaatttatattctttagggagaaaatgaaaatgccgattagtgagcgagattattgtgcccataaaatggttgctttgcgcaaatgcgtttgggatagggcgccatttgcctcgcattattgccatggacgtcgacacgatttgggactgtgtctttatgatgatcatttgatgcgtatgaaagaatttgagcgggagaaaaggctccttatgagaaaggcaagaaaggaaagggcaaaggctgcttaagaaactaatgttgatttgctagacaattgtatctttgtggcctctgattaggaatatttccatgtttatgtgtaaaatcattgcttaattgaaactttggctcgctcatgaacttgggaattaaatccaattagttttttaatgattcaatgatttttaatttctttgag

SEQ ID NO: 49201 - DNA, 825 bp, Heterodera glycines
ttagtgctgcgaaggcgcgcattttccatattttattatctgctgtaaacgcttcacaacagaaaaagcgatgattccgctcaatttgcaaattgcagagtctgctctgaaggtcctccaaacaaaaacgcccgggggagaaattgagcaaagtgcgacggcgggagctcactgtacaaacaatacgtgcaaaaaagtgttcaccggtcccgagagcgatgccgaagagtgcgttttccacccgggcaatgccgtttttcacgaaggactcaaatactggtcgtgttgtgggcgcaaaaccaccgattttaccacatttttggaccaattgggttgcactcggggcaaacactgctggaaaaagaaagaaattgtcacaaatgcgcgcgaggattggtttcaacgaggtggccaagtgcacatcacaatttactgcaagggagcacttccgagcgaaacatccgccaaatcggacggtctgacattggaagtgaccatcaacgggtccaccaaacggtacgaactgttcggggaaattgcgccgtccgaaagtgtggtcattatcagcgaacgcaaagtggaaattgtgttgaagcaagtggccaaaattgggtggacaaacttctaaaggaacaaacgacgggattggcacaatcttcggactgtgagcagcagcaaaagcaaccgcagcagaaaatagacgatgagaaacaacaagaactactcatgtggaacggactgaacgaacctagcgaacgtttcacaacagaaaaagcgatgattccgctcaatttgcaaattgctgagtctgctctgaaggtcctt

SEQ ID NO: 49202 - DNA, 499 bp, Heterodera glycines
aatcaaaaataaggcaacattcacaatggtgcgaatgaatgttttagccgacgctttaaagtcaattaacaatgctgaaaagcgtggcaagagacaggtgatcatccgaccgtcttcaaaggtgatcatccgtttcctcacggtcatgatgaaacacggctacattggcgaattcgaaattgttgatgaccatcgtgccggcaaaattgtggtgaatctcactggacggatcaacaaatgccaagtgatcagtcctcgtttcgacattcgaatggccgacttggagaaatggaccagcaatttacttccatcgcgtcagttcggttttttggtgctcaccacttcggctggcattatggaccacgaggaggcacgtagaaaacacgtgggagggaaaattctcggtttctttttctgatgtgaccgacgtttgttgtttaagaaaatgtctttgttcgttattgctgttgttggtttgataaaaagatgttaaaaaaaa

SEQ ID NO: 49203 - DNA, 583 bp, Heterodera glycines
attttttaaaaatgtcactcactggtgggactgtaattgcgttagcctacaaaggcggagttgcgatggccactgaccgtacagtttttgcatccggtgttcatcgttttcagaacaatacgcgccaatatcggttgaataattattgtctgatttctttctccggagactttgccgaattccaatggttgcaaaatttgctggaacgccgtcagatggaattacagatcgacgcggggatggaccatatgaagccgaaaatggtgcacgcttttctcacctcactcttttaccaaagacggagcaaaatgaacccatttctgaacacaatggttgtctgcggcatgcaaccggtcgagtttcatgccggagaaattaagcctttcatcggcgtcatcgacatgcgtggcaatgcctatgaagttgaccatgtcgcgacagaaattggcaaatatttgcttcgccaaatgttggagacgcgacaaacgcaggcaaatggagcggaacaaatgagcaaagaagaagcacttcgaatggtcgcagcggcgttggaggtgtccgtcagtcgtaacagcagaacggg

SEQ ID NO: 49204 - DNA, 564 bp, Heterodera glycines
  unsure (1)..(564): unsure at all n locations
acccccccccccccccgctgtacaaggaccttgccnagaacagctctcaatgtcagcacccgctgcaaagttaccccgccctccagagcacatgctgcgttatatggctcacatccgggccaagtctcttgttttctgtgcgatgggggtcagtggtctcattggcctttccttttacttcttttacgtcgaagttcgtcgcaaggcatatatggaatttgggaaaaattacaacccataccagagaatgcgtgaaatttgcgagtatcccgtcaagtacatgcattcctgcccttctgagctagccaagcgcctcgaagagaagggagtgctcattggtgaccgcgactattccatcccattggacgacgttgtgcctgaaagccggaagaaggagttcatgatggcgaatgcgttcgaacgttttatgaaccgttaggcaattaagtcaggtgatcggactgttgacattaggatggatttagcacaattaaagatgctttctttcgagttgtaaatcattcgttcttttacacataaactgaaaatccctcaaaaaaaaaa

SEQ ID NO: 49205 - DNA, 589 bp, Heterodera glycines
gctaattatgcccgaaaaattccacatattcatcgtgtgatgaatacaaacattgatggcaaccgtaaagttccttatgcccttacagcgatcaagggagttggtcgtcgttatgctttccttgtttgtcgcaaagccgacattgacattcacaagcgtgctggagaactttctgaggaggacatggaaaagctgactactgttatgttgaacccacagcaatacaaaatcccaagttggtttttgaaccgacagaaggatattcgcgatggtaaaaatcaacaggttttgtccaccaatttggagagcaaataccgtgatgactttgagcgcatgaagaagatccgtttacatcgcggtctgcgccattattggggtcttcgtgtgcgtggtcagcatacgaaaacgaccggacgtaaaggacgcactgtgggagtgtctaagaagaagggaggctaaaacaaccgtttggttaccgatcatgaagtcgatcagttggaattgttgttgacgttattttcgttatttgatgaggtctatgtaaaatgttattgttgccaacggacaaaaaacattccaacttggacaa

SEQ ID NO: 49206 - DNA, 716 bp, Heterodera glycines
ccccccccccccccagagaggaagagaatgggcaacagttccacttcgcttatgctgcaggaagaggaagtcgttggaattgcgaaggaaacgggattttctcgaaatcaaattgtccgtctgtacagtcgcttcctttcgcttgatcgacagggacgtggatatttggaccgggatgattttcaacggatccctgagttggccataaatccgctcggtgatcgcattgtcgacgcttttttctccgaattcggagattccggtgccaaagttgaactcataaacttccgccaattcgtcaaagtccttgctcattttcgtcctctcagcaaatcgaagccgaacaccgtaaacagcagagaggaaaaattgaaattcgctttttccatgtacgacctgaacaagaatgggtacataacgcgagacgaattcaaaatcattttgaatatgatggtggggacgaacatcaccgccgaccaacttgacagcattgctgaccgcacgatcactgaagctgacgccgacaaagacgggaaaatttcgttcgaggaattttgcaaggcaatggagcgcactgatgttgaccagaaaatgtcgatccgatttctaaattgagttcaaaaatgcaaataatgcgagcacattgtgattttgtctagtgactaatttccccaattaagagtcggatttattgtagagtaaatttattgtaactt

SEQ ID NO: 49207 - DNA, 421 bp, Heterodera glycines
ttatcgctgctagaatctatcaaacataaaaaatgattgaaattactgtcaatgatcgtctgggcaaaaaagtgcgaattaaatgcaatccgacggacacaattggcgacctgaagaagctggtgtcagcccaaattggaacaaggtgggacaaactcatcctgaagaaatggtacaccacttacaaggaccacatcactttgcaggactacgaaatccacgacggattcaattttgagctatattatcaatgacttgctgcgcgcgtgttcattacttttgtgatttacattacattttcccaataaattgcgctgtgttaaaaagaattttgagttgttagtttcgaccctaatggttcgaggctaatggcatatttatgcatccttcactaatcaaataaacccaaagaacaaaaaaa

SEQ ID NO: 49208 - DNA, 790 bp, Heterodera glycines
taaaacatggccatgaacaccaattcaattcattgctcctccgcctcctcctccccgtccgttccgatgacgttgtccatgttctgcttcatcttcgccatttttttgcatcccgcttcttcgtccgatttgctgtcctcgtccgacgatgcgaagctgcagcaaatgctgtgcgcccgtttcccgggactcgcggagtgccaaccgaacgacgaagcgtcgcgtggcatcatgacgaagcgcaagtccgcttacatgcgctttgggcgtgcggcggccgctgccgacccatcggaagaacatgaaatggagaagcggaagagcgcctatatgagattcggcaaacgctcgccggcggaagagggggaaacgtaccaaatctgggcagccaatgagccggacgcccaaatggaaaagcggaaaagcgcttacatgcgcttcgggaagaggaagagcgcatacatgagattcggccgtaagtaatcaggcccatgacaaggcgatgaatgaaattttatcttggcaacgacatacgccaatcaatgcgtggccaattacacaccgtaacatccgattgtgtttcgactgcgttaccgtattcttatttcccattgatccaattgatctctcacatttgcttatttagaaagctaattaaacgcggataatgttttaaggaaaaaaatgaccaaaatgaacaacaaatatttgttaattgaccaattataactcccgtcgtatcatttattttatctttttgaaatagtctcgacaaaaatttttaagcctt

SEQ ID NO: 49209 - DNA, 510 bp, Heterodera glycines
atttgtggtggtttgttgctgcgtaagggtgcgtctgctgctccgcctttcgccgtcagaaatgccgtccaaatggcctctccgacgaaggtgatgggtccgcatgccttccattacaaatttgaacgttattacgccgctgcgattgttccgctttttcccctcgcttatttcgtccacgcgcccctcgtggattatgctttaactgctgcgattgttctccactcgcattggggcgtaatggctgttgtccaggactacgcgaggcccctggtcattggcaaaacgttggccaaaatggcgccggctgtcccttacatcgcttccgttgtgcttttggttggcttactgatgttcaattacaacgacgttggactgaccaaagcctttgaaatggtcttcagtttataggtgtcgatcatttgttaccgtagcattttaaatactgtataaaaattttatggaatatcaattaatggtgcaaaatcgtataaagttcattgcagcaaa

SEQ ID NO: 49210 - DNA, 591 bp, Heterodera glycines
  unsure (1)..(591): unsure at all n locations
aaccgaatcgaatggaccaaaagtgcttagaattcttgagattgtaaaaaatgcacaacaaaagcatgggcttagacacgaaaattatcgacgttacaggggttattgttcccgtcggatcgaacggattcgaaaatcactgaagtttatgcattcgtataaatgtgcgcctaaaaggacagcaaaattcattgcgcgaaatgtttctgctgagttaatcggagatttaagatttctccaaattgccgtgttcgaagtcgaacgtaactgggcttacgcaatgcaaatgaaatttgagatgatcgatttgccactttctcgcaaaaaatttcacatgagtacaaaaattgcgtcgggcagtgaaaagtgctcattttttacattcgcttattaatgacaatccgctggtccatgaggtcactcgtgttgaaactgtttcttacgtgtctttcatcttcggcagtttggaactcgaactgaaaaattggannacgaccatcgaaacttngacagaacangaatcggtactcccgactgcttgaacagtccgaaccncgatctccgcgaaacttgatgtccncgtgtcgcgag

SEQ ID NO: 49211 - DNA, 553 bp, Heterodera glycines
cccctcccaaatgtcttctcgcgcgacccccggtggcattggcttccaagtggtggcaaagcaagccagcaaattcaatgaccaagagggcaagctgatcctggactgggtcaaaaagctaagtggtgaaaacttcagcacggatgggagccgtgagaatttctataaattgttgaaggatggcactttgttgtgcaaattggccaacggcattcagcccggatcggtcaagaaaattcaacaaccgaccggcaatttcgcctgtatggaaaacatcaacgcttttgtgtcatttgccaaggcccaaggagtgccaacggaggaaacttttcagagtgtcgacttgttcgaggctcgcgacctgtactccgtttgtgtcactgtgctttcattgggacgaatcttggagaagaagggcaagccgaaccctttctcttgaatggtcagcacttcaaacggacgaagaaacgtacaatttgtcaccccaaatgtttatgaataaatgcttttaaatttaaaaaaaaaaaaaaaaaaaaaaaaaaaaaaaaaaaaa

SEQ ID NO: 49212 - DNA, 469 bp, Heterodera glycines
  unsure (1)..(469): unsure at all n locations
caggatttgttcaccgtcaaaaacattgaccccgatgggaaaaagttcgacagagtcagtcgtctcttttgtgacagcgaatcattcaaaatgggcctcattttggatgtgaacacccaactctacgccatgggaatcaacgacaaattccggttgatgctttgcacttcgattcgggacgacggactcaccgaagagggcgaatacgacaaatcaatagaaaacattccccgggttcgaatgttcgaatatgtgatgtacggcaaaatttaccggattgagaacgacgagggcaccgcagaaacgagtcgactgaccgcatacgcttctttcggagggcttctgatgcgaattcagggggaggcgaacaatttgaccggatttgagcaggacaaaaacatttatttgttgttaaagaaagttcctaattgataaagagaggaaatgtgtgttanaaaaaaaaaaaaaa

SEQ ID NO: 49213 - DNA, 798 bp, Heterodera glycines
aacaatcaaaatgaaaggcttcttcgccctgttcgtcttcgccttcaccctttcggtgttttctgccgcccatttgccgcctttggacattaaccaaatcccggccgaataccgcgaattgatccccgaggaggtgaccaaattctaccacgagctgaccgaggatgacaaaaaggcgctgaaggaagtggcagaacgccacgaggaattccaaacggaagagcaggcaatggaagcgctgaaggaaaagagtgagaagctgtacaacaaagcggtcgaactgcgcacccttgtcaagggaaaaattgaccaattggtgcccgacgcgaaggcattcgttatcgggatgatcgaaaaggcaaagggaatgcgcccgaaggccggcgagaagccgaagcttgaggagctgcgcacggcggccaacgagctgatcgagaagtacaaagcattgaatgacgaagccaaagagtcgctgaagtccaacttccccaagattacgagcgtcatccaaaacgagaaattccaaaccttggccaagagtttgctgaaacaggaggcaccggccgcctaaacggcggcacttaggaaggaacggactgatcactgattaattgatggaccattgcgcttaatcttttgccattattttgtaccaaaaaaacagacagaacagaatttgtgcatattcacatacactgataatataatattataataacttttctcagtcttttgtaaatggctaataaattgaattgccaaaaaaaaaaaaaaaaaaaaaaaaaaaaaaaaaaaaaa

SEQ ID NO: 49214 - DNA, 541 bp, Heterodera glycines
ttattgactctgaacattattgtttgtcatcgaaaaagacaaatggcgattagcaagggcactaaaattacgccaaaaggtggtaagggcggcaaaggaaagaagaagaagcttacgctaaagtttgtgatcgaatgcaaaaacccagtggaggatggcatcatgaagactgccacatttgaaacctttcttaacgaacggatcaaagtcggcggaaaaaccaatcaactggcggctaatggtgtcaaagttgaagccacgaagacaaaactggtcgttacatcggagcagccattctccaagcgttacttgaaatatctgacgaagaaatttctgaagcgcaatgctctccgggattggttgcgcgtggtagccagtgccaaggacacttatgagcttcggtacttccaaatcaatcaggaagatgaagatgaaagcgacaatgaagcatgagcgatttgccatttcttttgttgggtcgtattatttgttgcactttttaccagcgataaaaacttgttgaaagaagaaaaagagaaaa

SEQ ID NO: 49215 - DNA, 1609 bp, Heterodera glycines
acgagtaagcaatgggcaaggaaaagatccatatcaatattgtggtgatcggtcacgtcgattccggcaaatcgactaccactggccatctcatctacaaatgtggtggaattgacaaacgtaccatcgaaaaattcgagaaggaggctcaggaaatgggcaagggatcatttaagtacgcttgggtgcttgacaagctgaaagccgaacgcgagcgtggtatcactatcgacatcgctttgtggaaattcgagacaagcaagtactatgtcaccattattgacgctcctggccatcgcgacttcattaaaaacatgatcacagggacttctcaagctgactgcgctgtgctggtggttgcttgtggaacgggagagtttgaagctggaatttcgaaaaacggccaaacgcgtgagcacgctttgcttgcgcagactttgggggtcaagcagctcatcgtcgcttgcaacaagatggacaccactgaaccgccattcgccgaggcccgttacacggaagtgatgactgaagtgtccaacttcatcaagaagatcggttacaacccagccaccgttccattcgtcccaatctctggcttcaatggcgacaacatgttggagccgtctgacaggatgccgtggtttaaggggtgggccatcgagcgcaaagatggcaatgcatctggcaaaactctgctcgaggctcttgactccattcttccgccgcaaagaccaactgacaagccattgcgtttgcctctccaggatgtgtataagattggaggtattgggacagtgccggttggccgtgtcgagactggtgttctcaagcctggaatggtggtcacttttgctccgcaaggcatttccactgaagtcaaatcagtggaaatgcaccacgagtccttgccagaagcgcttccaggagacaatgtgggcttcaacgtgaaaaacatctctgtgaaggacattcgccgtggttcggtcgcgtccgactcgaagaacgacccggcaaaggagaccaagagcttcacagctcaagtcatcatcatgaaccacccgggtcagatcgctgctggttacactcccgtgttggactgtcacaccgctcacatcgcgtgcaaattcgccgaacttaaggagaaggttgaccgacggtctggaaagaaagtggaggacaacccgaaggcgctgaaaaccggcgatgctgggatcgtcgatttgattccaaccaaaccgatgtgtgtggaggcattcacggactacgctccgcttggtcgtttcgccgttcgtgacatgaggcaaaccgtcgctgtcggtgtgatcaaggcggtggagaagactgaaggcggtggaaaggttaccaagtcggcgcagaaggctgctgcccctggtgggaagaagaaatgacctatggagagagcggtcccgggagggccatttgttgacgaaaaacccactccatccctttgttttatcgttattttttgcaattccttccacctccgtctctatccatattgtcgttacgttggataatgttcatttttttgttgttgttctggttggtaaaataaatttggccattaaaaaaaaaaaaaaaaaaaaaa

SEQ ID NO: 49216 - DNA, 493 bp, Heterodera glycines
ggtcgacttttgtccgacaaaaaatgcaattgctgcccgagtcgtccattacgaagatggaattgtgatcgaagcgtcaactcgtgagaagactgtccaaagtcaactatacagtcagacggatgtctccgccgctaataacattggtcggctgttggctcatcgatgcaaaatggcggggattgagcattgcatgtcgagtttgacggagaatgaattggagggcagcaaaaagcgagaggcctttctgagggcactgaacgaaagcggacttttgctggaggagcccgaggccatcccccacactcaccttaacgaccccaatttggtatgggaaacgtttccaattcagcacaaccgagctgacaaattggacgagttggacttgagtctggaaccgggcaaaggcgtttgctgatggcacaaataaaccttttttgtcttgtttccattttgtttctatgtgaaagatggcaaatgaaattttcgaacg

SEQ ID NO: 49217 - DNA, 524 bp, Heterodera glycines
ttgaaataattcttcaatgggcaagccgacgagtgtgaaggacgttgaccaacatgagattgtccagtcggtggccacctttctgaagaagagtggcaagatcaagttgcccgactgggtggacttggtgaagtcgggcaaaaacaaagagttggcaccgatcaatcccgactggtattacgagcgcgtggcatccgttcaccggcaggtgtcggctcgttccgcaacgtgtatggtggaaaaaatcgccgtggtgttgcactcagtcacttcaccaatgcgtccggggcagtgattcgtaaggcattgcaatcgttggaggaaatcaaatgggtggagaaagacggaggcactggtggacgcaaactgaccaaacagggccagaaggatctggaccgcattgcgtcacagctgcgttacagaaccgaagaatgaggatttcgacagatagatggggagaacaattatacttttctgttgttgttgcttgtttttttgtcatcaaagaaacatgacaggagttg

SEQ ID NO: 49218 - DNA, 651 bp, Heterodera glycines
cccaaaatggaaatgtcgacttcatttcttgactctttgcctggattttctgttgtagattttaatggaagtcatgagaaaagaacttgtgctcctggtgaacaattattttcagtctcaagtggatatcatgcgggaaatggctgttatgaatttcatggttcaatatgtgcttctcttgcaggatttttgcacgtttattcacttagagattcgcaaaacaccgagacaaacattgtcgaagtgagacgcaacattgacgagagaagcaatgtgctgccgtcacagggaaagatagtcactgcaagggttgagcgtattacgacaacatttgcaaaatgtgcaattatctgtgtagaagacacacccctcgccaacgaatttaactcgactttgcgcaaggaggacatacgtgacaaagagcgcgataaggtggaactgcacaaatttgttcaacctggtgacatcattttggctcgtgttttgggctatggcgaggcgcacacttcttatttgctcacaatcgctgaagctgaattgggagtagtgattggccggagccaaaacggcgaacggctgttaccggagaattccgaaataatgaaagtgccgggaagcgaataccgagaaacaagaaaagttgcacagctt

SEQ ID NO: 49219 - DNA, 1057 bp, Heterodera glycines
tttttttaaacatgtctggtggtggcaaagatcggattgcagtttttccgtcacggatgtgagttttcgcttacactttataacaaatccataccaaaaataatcattaagggctcaaactgtgatgaaaacgaggctgaaaggcgctcaaaaagggcatagtttactgaagaaaaaggcggatgcgttgaatatgcgatttcgtgaaattctgaagaaaatcactgaaaacaaaaaacgcatggctgatgtcctgaaagaagcagctttttctcttgccgaggcgaaattcactgctggcgatttctctcacatggttgttcaaaatgtgtcttcccaagcgcagtacacagtcagaatgaagcgcgaaaatgttgttggtgtttttctgccggtgttcgaagcccaccgaaaagagggctctgacggagacgcgtacaatttgacgggacttggcaaaggcggggcgaacattgggaagctcaagcgcaactacaacaaagcggtggaactgctggtggagctggccacgctgcagacgtgctttatcacactggacgaggccatcaaagtgacgaatcgtcgcgtgaacgcaattgaacacgtaatcatcccgaagattgaaaatacgctcacttacattgtcaccgaattggacgaaatggagcgcgaggaattctttcgcatgaagaagatccaagccaagaagaaacgccaacgcgacgaagaaaaagcccgggaaacggagaatgtgctgaccgaacggcagccggacgatgggagggcgccgaagagtttgctggaagatgaggaggaagtgcccgtgttatttgcctaagggcagtcgaacggaaagagggaacaaacagacagactcaattaatatttgtttgattggttgtgataatggcagtgtgtttatatcatgctaatagaaaacaatcactatgtaatttcgcaaattttcattccttttaatcagattttattttccgattcaatttgtagtgaataaaaacgcatcgtacttaaaaaaaaaaaaaaaaaaaaaaaaaaa

SEQ ID NO: 49220 - DNA, 429 bp, Heterodera glycines
tgaaaatcgtctagacctatttaatttttcgaaaaatgtctgacaacaaagaagaactcgttcagcgggctaagttggctgagcaagctgagcgctacgatgacatggctcagtcgatgaaaaaggtgacggaattgggtgcggagttgagtaatgaggagcgcaacctgttgcgtgacaacttgacgctttggacatccgacacggctggcgatgagcaggaggctggtggtgaggcgggcgaagctggtggcaactgatcgggcggacagacgttgaagaccaagaaaatgccccacgaaattttttccaccgaatcatttaatgacaattatgcttttctcaatatggcacttttgattgggtaaatttttttgaaaaatcgttcaattaaaattgttgtttaccaaaaaaaaaaaaaaaaaataa

SEQ ID NO: 49221 - DNA, 570 bp, Heterodera glycines
cgcgcagataaaggctcagatggcttcggccgcgccgcccctcggcccttctttggggcagcgaggcgtaaacgtggcgaacttctgcaaggagtttaacaatttgacttcgactattcgatttggtacaaatttgcctatgtctatccacgtcaaaccggacagaacttacgaaattgacattagcactccgaccaccgagtggcttctgcaacaagcggcggggatacgacgtaaccggcaggaggaaggagaaatcgtcggaatgatttcggtgaaacacgtatacgaaattgccaaagtcaaatctcaagacaaatctctcattggagtgccgttaaaagaaatttgtcaattggtcattgagagagcggattcgattggcatcaaagtgcaaaatgaagatttagacccggaagaatataggaaattcctggaacatcgtcaggaagttgtgcaaagacaattggaggaaatagcgaagcaagaagaggccaagctggccagaacatgatcggattttgattcattgttttctttttctcttcagcttatgaatgaacgtcaagt

SEQ ID NO: 49222 - DNA, 310 bp, Heterodera glycines
tagcaaagaacagaaaaaatggctgcgcacaaaaccttcatcatcaaacggaagttggcaaaagctgctaaacaaaatcgtccgcttccccactgggttcgaatgaagacgggcaatcgaattcgttacaacgcaaaacgtcgtcattggcgcagaaccaaactgaagctgtaagcgcaaatgaacaggcggaagacggcgggcgatgatttgacttgttgctgttgattcatacatttttatggactgttgataaaggaaattgtcatcagaaaaaaaaaaaaaaaaaaactcgagactagttctctct

SEQ ID NO: 49223 - DNA, 667 bp, Heterodera glycines
ttattcaaatggggcgacacaaaaagactcagaaattccgcaataagcttcagaaactgatcaagccaaccgatgacagaataaaagatgaaatccgcgtgaaaaaacctcccaaagaagatgaaaatgcacttaaaatcaaggaagcgtgagttatggggtggggttagtgaccaatgaatgcgaaatgatagcccgaagatttcggcagcgatgtttctcaaatacaacacacaactcgggccccccttccacgtcattatcgacacaaattttgtcaatttttctataaaaaaccgaatcgacattatgacggggttcatggactgtctgtacgctaaagtggtgccgtatatttcggactgtgtgctgggcgaattggagaaaatgggacgacggttcaaacttgcgctaaaaatcataaaggacaaccgcttccagcgactccaatgcacccacaagggcatttatgccgacgattgcatcgttcaacgagtaacacagcacaagtgttacattgtggccacttgcgacaaggatttgcgtcaaaggattcgcaaaatacccggcgttccgataatgtatgttcgtgaccatcggtacacaatagaacgaatgccagatgcatacggagccccgaagttgggttgaaacaatttacaattat

SEQ ID NO: 49224 - DNA, 896 bp, Heterodera glycines
gctgttctcgcgccgggcaagctccgtctgcagaagtggtacgtcgcatatccggacaaggcaaaaaagaaaatcacccgcgagttggtaaccaccattttgtcacggaagcccaaaatgtgcgcattcctcgagtataaggacacgaaagttgtgtacaaacgttacgcttcgctttacttttgctgcgccattgagcagacggacaatgagttgctttgtctggaggtcatccaccgttatgtggagctgttggaccgttattttggcagtgtgtgcgaattggacatcatcttcaacttcgagaaggcctacttcattttggacgagtttttgttggccggcgaaattcaggagaccagcaaaaagcaagtgctgaaggcgatcagtgcgcaggatttgctgcaggatgaggagacaacgcaaggattgtttgaagacaacagacttggctgatgatcgaccacactctaatcagatcagcagaaaaagcagtagcatcaatcatttttcaaaactttttcttccctaattaacccatttttcgtttcaatgtccaacaaaagttgtatttgtgccaaaacaccttaaattttcgtttatggcacaaaatgacaaaagcatcttgttcaccgtcccttaattacctgaaaatgtttttagttcacaccaagcctaatgatcactaattctaattacctatcatttcttttttccgtgatataattgcactgtcttttttattttattctgtcgatcagtctcagatgagccaaaatatttgtttttcttgtaattctttcctgtccattttgttcacttcatttttcctttcgatttcattcctcctaaaataaaaaaaaaaaaaaaaaaaaaaaaaaaaaaaaaaaaaaaaa

SEQ ID NO: 49225 - DNA, 651 bp, Heterodera glycines
tggctgcgccaaagactgttgcacgccgtgcccgaccgtaacgggcgaccagcaatgttttcgccatgttcgaccagccacaaattcaggagttcaaagaggcgttcaacatgatcgaccaaaaccacgacggatttatcgatgagcacgacctgaaggacatgttcgcttctcttgggaaggaagtctcggaaaagttcattgaaaatatggtcaacgatgcatcgggttctatcaatttcacaatgtttttaacgctttttggggagaaaattgactggcactgaccctgaagaggtgatcaaaaacgcattccaatgttttgatgaggacaacagcggaacaattgcagaggatcgcttgagagagcttctcaccacaatgggagaccgatacaccgaggaacaggttgatgaactgtttcgtgatgcgccaatcaaaaatggccgctttgactacgtggaattcacgcgaatgctcaaacacgggacgaaggaaaaggacgaggaagaaaagtcgtgaaatggaaaagagagatggtgatgtgctttattattccaattgcttaaatacaaatgtcttttttgtaattttatggggtcctgaaaaaaacaatggcggtgctgaaaaaaaaaaaaaaaaaaaaaaaaa

SEQ ID NO: 49226 - DNA, 644 bp, Heterodera glycines
atttgtcataccacaatccgaagtgaaccataatggcacattttatgctcggcatacgcactgacaattgggtgattttggctgctgatgccacccactttctcagtggagcgatcaaaatatcggaatcacaccaaaaagagtacaagttgggccctttgacttccatggtgtgctttggcgaggccggtgacgtggactcgttcgcaaactgggcaaaggcaaactgcgagctgtacagtcgtcgaaatggttatgaattacggcccaaggaggtgcaccattggctgcgaaaaaacatggcagacaatttgcgctcggaggacatgtggcgcgtcaatgcaatcatcggcggctttgattcaacggacaagaaagcgtatctcaccatgattgattatcttgcgacaaatattcctccccaaaatttcatcttctacggctttcctggtgcatttgcttactccatcatggacagtttctaccgtacagacctaactgaacaggaaggattggaattggtgcagcgcatgattgaccaggtgaagcgtcgtgcgatgatggaccttgccgagtaccgcgtggttgtgatcaattcgaaaagttcgcgcaccattgctgggctgaagccaaaagcggcatga

SEQ ID NO: 49227 - DNA, 540 bp, Heterodera glycines
tgcgttttcaaaaagccaaattcgccatttttcgactgaattcccaccaaattttcattcttttacttttgcttatcaaattggcaatgactgatcagcagaattcaattgtcgggggatggacagagcaaaatgtgaacgacgaaaaaatcaagtctctcgcttctcgctcagtggccaaaataaactccgagtcaaacgatcgcttcagtcttttccccttggaggttctcagtgccaagtcacaagtcgtggcgggcattcagtaccaattgcgcattaaggtcggaaggtcgaactgttcgaagaatccaaacttggctgaccacgcaaactgtgcaacggaggatgatcagacagcgcgaaagacttttttggtaacgatttgggagaaaccgtgggaacaattcgagcagatcacttacaaactcgaataagaggaaacccgaagaaagaaagcgagcaaacagaagggggcggggaagtgattgatcacatcgcaataatcctgttcaaacatttaattatttccaatcggta

SEQ ID NO: 49228 - DNA, 774 bp, Heterodera glycines
caaaatggcgagtccagcattgcacactttcaacgcactgctggcgacgggcgcttcgctcctcactttgatggccttttactacatgttgaccggccaaggagatcgttttgacattgcgtggtttctcactgagacttccccttacatgtgggctggcattgctattgccgcatcgctttccctttctgttatcggcgtcggatggggcattttcactaccggttcatcaattttgggtggaggagttaaagcgccgaggataagaacaaaaaaatctcgtgtccatcattttctgcgaggctgtcgctatttttggcattattatggcatttgtattcgccgggaaattggggaaattcaccagagaaactgcgacgcaagaagtcattgtgaagaatttggccgcgggttatgcaatttttggtggaggccttacggttgggttcagcgatttgatctgcgggttggcagtaggaattgttggctctggggcggcacttgctgacgccgcgaacccagtgctttttgttaagattctgatcatcgaaatatttgctagcgctatcggactgttcggcatgatcataggcattgtgcagaccaacaaattcaacattggcaccacctgagggacgactttgccattgcttctcgtgtttctgtactttaccctctgcggacaatgaactgttttctgctggttgtgtgatcatagaatttaaattcgcatattttacatcagtcgttttttaacttttaaaaatggaatga

SEQ ID NO: 49229 - DNA, 619 bp, Heterodera glycines
aactcaccagacacttgctccctctgctccctttgttctccccaaattgatcccccgaaatgaccgtccaattgtccgcccttttgctccctctcctcattatcactttgttatgcaattttgcgatggccaatttgattttccacaacattgaattcgattcggactgtatgaaggcgatgtgcatggcggacagcggatgcgaacagcaaggctgtgccgaggatgtgtttggccgactcggctgcggctttttccgcatgaatatttggcagtataagcaatgctacgagccgggacgagagattggcgaactgtcggagaccgcgtggattcgctgctcggaggactacgaatgcgcatcgaaatgcattgtgcaagtggccagcagattcaggttgaaatgctatgggaaaagcgactgcgaaaccatcgcacggattcacgacggaggagcaaatggatgccgcaccggagaaacgcttccctattggttcaatgtgaagtcgttttgtccggactgctgacgcacccatcaaaatcagcagagaaaaaggcagagaaagaaaagaaacaaaatttggccattttcccctcttaaggcataaaagcacaaatg

SEQ ID NO: 49230 - DNA, 521 bp, Heterodera glycines
gtcgaaggtggtgttatcacattgcacacgcgcaaagtgctcaacaatcgacttcttttccgtaaacagatggttgttgacattctccatccgaatcgcgcttctgtgcccaaatccgaggtgcgtgagaggctggccaagttgtacaagacgacccaagatgttgtggttgcgtacggtttccggtgtcaatttggaggaggtcgcagcacagggtttgcaaatgtgtacgactcactcgactacgccaagcgctttgaggccaaatatcgcttgttgaggcaaggcgttggtcagaaagccgagaagggaggacgaaagcaacgcaaggagcgaaagaaccgccagaagaaagttcgtggtgttaagaaagtgaaggttcaagcgggcaaaaagtgagcaaacggagaaatgacaaagaaacgagggatggagacgatgtttggtgttgttgaagttgcggccgagaggcttctattgttattcttcactcgttgaaaaaatgaagatcaattcactgg

SEQ ID NO: 49231 - DNA, 407 bp, Heterodera glycines
tccgtgccagcgagaaacattttggcaatttgtcgaaggcttacggttggtattacgttcgcattgctccggttgaacagaaagtatggaagggctttttctttgatgcgtttgttaagccggtcaaagagcagttgccccactggtggatgttcttcttccccgtagtcacttactttttggtcaccgactgggccaagaaagagtaccgtcgtctgggacggatcaaagaattcactgacgaagaatgaatgtcgaattggccattcggactgttatttgtaggaaagaccaccgagtcgacagaatataaatcgaaatgttttggtactgtcaaattgtgtgttatgtccaaataaatttattagtgttaaaaaaaaaaaaaaaaaaaaaaaaaaaaaaaaaaa

SEQ ID NO: 49232 - DNA, 522 bp, Heterodera glycines
atgcccgaaaaattccacatattcatcgtgtgatgaatacaaacattgatggcaaccgtaaagttccttgtgcccttacagcgatcaaggtggttaagctaatattttttgagtttttttcatcttgaagggagttggtcgtcgttatgctttccttgtttgtcgcaaagccgacattgacattcacaagcgtgctggagaactttctgaggaggacatggaaaagctgactactgttatgttgaacccacagcaatacaaaatcccaagttggtttttgaaccgacagaaggatattcgcgatggtaaaaatcaacaaggtttgtccaccaatttggagagcaaataacgggatgaatttgagcgcatgaagaagatccgtttacatcgcggtctgcgccattattggggtcttcgtgtgcgtggtcagcatacgaaaacgaccggacgtaaaggacgcactgtgggagtgtctaagaagaagggaggctaaaacaaccgtttggttaccgatcatgaagt

SEQ ID NO: 49233 - DNA, 403 bp, Heterodera glycines
ttttttgtccgcagaacgaatgtctgcgttaattccatttataattgttacactgttttgggctgtcattggtgcaggaggcccatttttggtaccaagtggtatgaacagagggatcattcaaacgatgatcgtactgaccgcagtctgctgttatatgttttggctgatcgtctaccttcaccagttgaaccctttgataggaccacaactgcccgtgaaaacgatttggtggattcacaacacttgggggaatgtgaagaattgatgatcgatgattgcagtgattttccacttttggatgtactattagtgaattctctatttctgtgaaaaactggcatgacaaaaagacacatataatttttcaaccttttatttctataaaaattgctttattaaa

SEQ ID NO: 49234 - DNA, 785 bp, Heterodera glycines
tttttctctgttgaatttcgtttactgcgtttttgtgacttttcccactgcatttaattttaagaatgttcgtttcgaacagtgtttttctgcctgtctcccgctttttccattgtcgcgcgttgtcccctgtgaatttggtggttcatccgtttgtcgctaggaagtgcgcctttttgtctacaccatctttgtcttttccatttcggcgtcaatactcatcattggcatctgctacaacgacgggagcgagcaacgacaagctgaatgtggacaaactgttcgaaaaaataaactttgaagtgcgcggtcacgacttcacagtcctcaagtcgtattcgctttttgttatgaatgtgtgccgtgtgttggacatcgatttcacttctcggcatcgtgctatgatcaatacggatcattccaagagtaaccgacccaaataccagcgatggttccagtggctgctgagcgcaaaatttgcaaagaaaaaatacaaattgcactatgaaacgcggacttatttgatggagttcgatgtgcatcacttgacgggaagcactgcgagtgcttttctggaatatatcgaaaggaatatacccgagggagtggccatgaaagttacatataccgagatgtgctttctgccagaaactattgttaaaacagtgatggataattagttctttgtcgtacatgataaaacattttatgattttcaacagtttgttcatgagctgataaattcatttttcgtaaaaaaaaaaaaaaatataaaaaaaaaaaaa

SEQ ID NO: 49235 - DNA, 626 bp, Heterodera glycines
attctctttccgatcgattgatcgctcatcgttcggctaatgccaagcttttcctctcactgatcatttcctactcggcctttgtctcttttccccgtctgtcgatggtttcccccgatttcgaatgtcgcgtttgccatgcctatgccactgggcatcattttggggctcagtcgtgccaagcgtgttgtgccttcttcagacgatccgttgtgttaaaacgcaattatttgtgccaaaaactatcgaaaattggagcgaattgtcccattgtgtacacagagaaagttttgtgccgatcgtgtcgaatggtgaaatgtttgaccatcggaatgaataaaaatgctgtgcaattgccggagaaaaggggcggcgaccacgcgaagaagggaagggcctatttcacaaagtcgggccttctgagaaacaaacgatttgccaacaacgcatttgggttgtgctgcgacggtttgcccaccgccccccgccggtcggccgattcgccgctttcctccgccgcttccgcccattccgccgattgtccctcctcctcctccgcttcgtcttcttccgcttcactaaccattcatccatcttccacttttgatcactctttctccacctct

SEQ ID NO: 49236 - DNA, 593 bp, Heterodera glycines
aggcaatctccgagcagtgccggtacgctttatgcattttttcggctgatataccaaaacaaaaaaaaaaaaaattatttttgggccagaaacatttcaattttttgaaattaagtgcctcagagaaaaaaaggatttttattcatattttattatattaatccaatttctgtcaattgtgaacatcggatttggtttaatgaattttaaaaaatgaaaattccaaccaaattttatcatttttccattgctctattaaatcgagtaattcatccaaattcgattacattttttccatcagaccgacgaggccaatgcgtacgcggagcgcaaccaaatggcattcattgagacgagcgcgttggacggcacaaatgtgggcgcggcgttcaccaacattttgaccacaatttgtcgttcacagtcaacaactgcgggcagcacaccgtgagcattttgaggccaccggaaaaattttggccgtattttttaaacggattttcccaaaaattggcgatttttgggtcaaattaatcggaaaaatttgtaggaaaattgacattaatgatgatctgattgacgaggacgcattg

SEQ ID NO: 49237 - DNA, 250 bp, Heterodera glycines
ggcactgattccaatcaccaagaagagactcggaagggacccaactgtggacacttcatttctgcctgaccgccaaagggacgaacaattgctacgtgcgcgcgaacggatcgcttaataatggcaagaaatgcaggagagtgaaaagaatgaggatattaccctggcattttgctattgggacgggtccagccatcggaaggactcacaaacaaacaaagggacgacaattgctcaatttctgcagaag

SEQ ID NO: 49238 - DNA, 304 bp, Heterodera glycines
tatcgaccaatgcgacgtcaacgagcgaatttgtctcgtcgatgctgaataagttttccgactggacaaattggcggaccgtcacattcgcgatattttgccccagcgcttccctaagcgcgttcgcggcgaaggatacgatcatttgtagcagtgcacaaagtacgtagactactacgaaaatgtcgagttgaacttctttatcaagtatgtcgaattgtgcagtgagctgactgtggtggcgtgttacatgaagtatacgcatccgctgatgtgggagcgtcgtcacatcgacataatggat

SEQ ID NO: 49239 - DNA, 619 bp, Heterodera glycines
cgctgattgccaaagtgaggccgtccagctacgggcaacggcgcaactactccagcattgacatttcggcggagaaatggttgatgcactacgacgccgactcgttggccaaactcgagaacccaccgtcactggcggacggaatcaatcgcgaattggagagggacattcgctatttgggctgtgaactgatacaatccggtgccattctgttacggttgagtcaaacatcagcggccaccgcacaaattctcttccaacgttattactacctcaaatcatttgtgcgctacaatttcgagcacatggtccaagcttgtctgctgttggcaagtaaaattgaagaagaacctcgaaaaccgcgtgacgtgctcaatgtgtacaatcgccttaagcaaatccatcatcggagaaatgcggtcgcatcacaacaccccgaagatttgcaaaagctgagcaaaaagtttgagcacttggagttgtgcagcaaaaggtaccaagaattgaagaacattgtgatcaaagcggaacgtcgactgcttaatgtgctcggatttgttgtgcacgttcaccacccgcacaaactcatctacatctatctgcacatccttgaccagct

SEQ ID NO: 49240 - DNA, 623 bp, Heterodera glycines
tgtcctttttgcaacgacctccttcgtccgtgaaagaccatcgacggacttgggacaggacggaatatgaagtcaaggcgcaggagagactgactaccgaaagggaggcgttggaaatcaaaaaaggaaacatacggccaccgccgaagggtccgaagattaaacgggaaatgctgaagccgagggaattcaaagtagacctcgagtcgaaagtgggcaggcaagtggtgatcaacaaaaccacgccttcctccgagacaggcggttattactgcaatatttgtgactgtgtggtgaaggactcaatcaactttttggatcacattaatggtaaaaatcaccaaaggaatttggggttttcaatgaaagtgaagaaaagcactgtcgaggaggtccgagagcgtttttcaatgaaaaaggcacaaaaggaaacactgcgcaatgaggacgtagaggagaaacaacgcgatttgaaggaggaagaggccaaaatggcggatctgaaacggatgcaaagggaacggcaaaaggagaccagtcggaagaggacggcagcggcggtgacggcaccgcccacggacgaagaggcggacgcggaactgatgaaagtgatggggatcggc

SEQ ID NO: 49241 - DNA, 217 bp, Heterodera glycines
tcgcctgcacaacccgggaaaaggcatttcgcgctcggcgtggccttaccgcccctctgtgcccacgtggcagaagctgaccaacccacaggtggaggactatattgcgaaggcggccccctgagggttgcggccgactcgaaatggcgtgaatttgggtgatactcatggcgcagcgcaatttcgtcgtctaacctgcaacccaatagggcgcatt

SEQ ID NO: 49242 - DNA, 609 bp, Heterodera glycines
cacttcattcccaaaatgtccttccttcgtctgatcacttttgttcttctgatcactctgtgctctttgccttctctggtcgaaagcggcctcattggcattgtcggcactcccgttgaagccgcttggtgcggtgttttgggcaaagaatccagccattgccctactgctggaggcggtcaacatggcggaggaggaggacgatgcgaccgcaccattgcacttggactgagtatgggcgagctcagcaaagtgctcaaatgttccaaatcggaggacactttgatgattcgctttgaggacagtgagcaggacatggtcacgttcacttttgaggacaccaaaggacggaagcaggacatcacactgaaactgatggacattgacaacgaacacttgggcatcccggaccaaaaatacgctgccgtggtcgaaatgccgtccaccgagttccaaaaagtgtgccgtgacattgcctccttctccgactcgatgaacatcaccgccacaaagagcggcgttgtgttcagcggcagcggagattcggtcacaaacacaattcgctactccaaggacaaaacggcggatgacgacgatgacaaagatcgc

SEQ ID NO: 49243 - DNA, 623 bp, Heterodera glycines
gtttctcgtctcacatttccttccttttggtaccaattgcgtgaatttgtttatgatccacgagtgatcgtcgttcaaggagttcttcatttgcgcacgagaaattctttacgaacgcgaattgcagagaatgcaacatggattcggatagacggaaacaccaacactttcaacaatccgcaactatttgaactcgaacaagcggctgccctcggcgttagtcgtgcgaaagacgtcgccaaaatcttctctctgatgctttccggcgaactgatctcacgcaaatcgctgattcggctgtccaaacctcaaatcataaaccaaattgattacgtgatgaagggaaaatggctgttcggacacccggggttcggcggatcatcggtgatgatggacccggaggaggaattggtcattgcttatgtgtccaatgggatgaagtccggcatgggtgagctgacacgaacattcagacgattgaaattggctgcatttgactctctcaaagcaatttccgatggacgaactgatggcaaaaatcagacgcaatataataaatttaacagcagcaaagcagaaggagactccccaaaaatacgatagaaatggcacttttttctttt

SEQ ID NO: 49244 - DNA, 232 bp, Heterodera glycines
atttcccaccgctctcggactcccttcatcctccgcccgttttgccgcacttgccttaggcctcggcaaaattctccgcttgactgacccagacgttgtcagaatgacccgaatgggctcgggctcctcgtgtcccatcattcaaggcggctttgttcactggacggagggcgctcatcaacacaacgactccgactgtctttgccagaaactggcgaccaccgaccattgg

SEQ ID NO: 49245 - DNA, 220 bp, Heterodera glycines
aattctggagcgcgataacgagagaggatataagattttcccgctacggtgcttgcactgccgtgtgattgactcgactgctactgctactgggccaacgctcgacgaccttgggaagacgaagagtgtctctgaccgaacttgctattatgctgctgcgaacaaaatcatggccgtcgtatgggacatcgacacgctgtccgaatacattgtcaaccca

SEQ ID NO: 49246 - DNA, 288 bp, Heterodera glycines
  unsure (1)..(288): unsure at all n locations
gtccatttaagattaaacttcatttctatccattcttttcaaaatggccgacgaaagtggaacaaacgcaggaggaaccggtgcagctggaggcgctcagcctgctgagtacatcaaactgaaggtcgttggctanggnactcaaatgaagtgcatttccgggtcaaatacggcacatccatgggcaagctgaaaaaggcgtacgccgagcggactggcgtccaggtgacttctttgcgctttttgtttgacggccgccgcgtcaatgacgacgacactcccaaatca

SEQ ID NO: 49247 - DNA, 631 bp, Heterodera glycines
aaagttcaaagtgtggcgatcagtcagaatggcgacttgtacatgacgaaacagccgacccacgggacggaagagtccgccatttggagatcacacatcgatcatccaatagcatgggaggaattttgctcgacattcgacgaatgtttccaatcactttgtgtttacgataatgaaacccttgcagtcgccgttgtttcatcgcctgttaatttatattcaaaacagtgcattaaatgggttgctacaaaagactgtcgaatcattgggtcattttccgctgccggcaaagacaatgggcaaatatttttcccgcgatgtttgcaaaagcatggtgactcattgctcattttggacaaaaccggaagaatacaaaaatttacacgggaagggcatttcgtagaaatatcagccaaaattgatgattatattgggaacggattcacaattcgagaggatgaggctgtgatcgcgtgcagtggtattgtgaaggatgaggaaggaaagaccatgtgcgacgattgggtggaaaacattcgcttggatgggtcgagatggacggaggaagcataaagagcggcttaaagaaaagaacacataaaccgaaagagaaaccaagaaatatctctca

SEQ ID NO: 49248 - DNA, 623 bp, Heterodera glycines
tgaaaatgtcgtccaactcgtccatggcactgcgaatgccaacaacagcttggaaaaggaaatttccatccaaatattgcatgttctcattgaacccattctcaaaaatgcgtattcgttggcccaaaacgaattcgccaattacctcgtccaatttattatcaaatcgccctatctccgccgccaacgctgttacatcatcaaaactcacatcattcgcaacgtttaccatctctcgctgcttaaatactcttcgcacgtggtcgagcaggcttttaagcacgcggaggaccgctgcaactgtttggccatgttattccgggaggtgttggaggggtacaaaccttcaactgatggaaagcagcggactgctctgtatgaaatgctgttcaatcagtacggcaattacgtcgttcagaggatgatccccatcgcccgtgacgtgtaccaaagccgtcgtcccggcgacccgaattggctgcgtcacattgcgcactgtgtccaaaccaacattgaagcactgagtcgttactcctctggcaagaagatcatcaacagcttgcaccctgttattttttgaattgtgaatcatcctacacccccacaactctcatgtcgatttt

SEQ ID NO: 49249 - DNA, 632 bp, Heterodera glycines
cgcaaatacggcaccgccgacgaaagtgtcgccgacgccggagaccaaccgacaaacgactacggcacaatgcgtcccgcgttcaatgcctgttttggtccgttccatcgcatttgtctccatttgcccgtggccaattacccggcccaattggcggacgaagcggcacgactcacccaactgttggccaaactgatggcacagaatgggcgagtcatgcaaatgaaacgcatcagcaaaaggggcacaacaacaacaaccaacagtgccattaaaatgttggagccgcgctttgacgaacggtttgacccggaaaggcgaaacaacaaaaacaacgacagcaacggcatgaaggcgcgagaaaagagttgggcaaagcgtgccaaaaatgaacggcgcggggcactcaaagaattgcgaaaaggcgccaagggaatggccaatgcgtacgccgagcgacagcgcaaagtgcgacgggagagggacgagaagacgaaacgaattatgcagtgtttggaagtccaagaatcggagcacaaaaaattgaaggctttgaaaaaataaaaaaataattttttttgttttttttattttgttgaaatattttaaatttaaaagacgaaaaatgacta

SEQ ID NO: 49250 - DNA, 630 bp, Heterodera glycines
tgcgaatttattcaaaataagggaaaatggtcgaagccgccgaacaatcgcaacaacagcccatccgtcgccgtgccggaccgaagtcggcacgtcgcctttatgtgaaggcggtgtttaccgggtacaaacgcggacaccgttctcaacacgaggacacgtccctgctgaagcttgacggggtcaatgacaagtcggatgccagcttctatcttggtaagcgtgctgcctgcatgtacaaggggcgcaaaacgatcgcacgcggtggtgggccgaagacgagcgattttttgttggctttgtttatgtgccttctttttgtacaaagtgcttgcgccgaggaatctttttcaatgaaagacctagcgctggagtacaagataaaatatgacttctttttcgcacctgtgacgttgattttggctgtgttaagcctagcgatggcgttttctgctggctttatggttgtcctcaaccgcatgttcagtttgcacatggatgtgcaggaaaacaaaaaccaagtgaaagaacttcgaaaagaattggacgagaatgttaaaaattttaacacattgtattctgaatttgttaatttgaaaggagaggtcaatttgctgaaaggcaaatagg

SEQ ID NO: 49251 - DNA, 630 bp, Heterodera glycines
caatgaataaaatgcttcccaatggtcgcacaatgacaccaattcccatccaagtgaacaaagctgcccggaagagcatcgatcggcacacgcatttcggattgcaccgtaggcccagcgaagtgccaccaccggtgcgtgaaacggtgtgggcccgtgacgactggttcgagcagttcggcttcgtccatctgagcatctacgggcgcggggcgcttgcggatgggacgcacgcggagagtgacgggctgacactgaacgtgacggtagtgcacgcgtacggcgccaaacagagcgtgaagcagtacaaactgtacgccgaaattgtgccatcacacagcgtgatgctgatcacggagaagaaggtggagctggtgttgaagcagctgaaccgggagaagtggaacaaactgtgctacgacgggggcgaggacggcgccatttgcgacggcggagacgacgacggcgcatttctgttggacccggcggacgaagcggcggaggacgacgaataggcgaagcggaacggacgggcgaagcgaagggcgaaagtgccatcattcgatgagaaatgccatattgttatcactagggcggcgaaaaaagaaattcgcgaaaaaaaaaaaaaaa

SEQ ID NO: 49252 - DNA, 621 bp, Heterodera glycines
tttgaagctaaatttacaaatgccgcccttctgaagaaaattgtggaagcgatcaaagagttggtcagcgaagcgccatttgactgtacagaaaattcaatgtgtctacaggcaatggatgggtctcacgtggcactgatttccctcaaattggacattggccttttcgaagtgttccgatgcgaccgcaccattgcacttggactgagtatgggcgagctcagcaaagcactttttgtacgcttcgaaatgatccaaccaaatgccatcgctgtcgccacccaccttcagtgcaaccgaccagattgtacccgaacctttggtctggacaagcttgggacattgagacctcacatttgtaaggctcaccgcgaggaccatcatcaggggaatcgcaaaccaagcttggtcattggactgaccatcgtccctcctggccgaactttcctcttcaccatatatgagtcaagagcgcaagcggtccctgcacttatcgtccgattcgccgtcagtcccgtgtctcgggcatcttacgacacggcactcgcccgcgcgcaacaactgctgggctatgagatcatcccaccgcttgccgtcaggcgctggccgaagcgacatacc

SEQ ID NO: 49253 - DNA, 622 bp, Heterodera glycines
ctcaaagtgatttgacatttttaaatcaaatggctcgaaatgctgagaaggcaatgacggcgttggcccgatggcgccgaatgaaagaacaggaggagaagggaccgatcgccaaacggccgaacgacgttcgcgagtgcaaaaagttgggcgacgctgaacgatttcgtcgcgaattgatccatgacatttcgaaaagaataacgggaattcagaacccgggacttggcgagttcaaaatcagagacctcaacgacgaaattaaccgactgttgcggataaaattggcatgggaaggacgcattaaggagctcggcggagtcgaccatcgacgaatcgcgccgcgggagttggaccgggacgggagggaagtgagcagcaaccgcggatacaaatactttggcgccgctaaagacttgcccggggtgcgcgaactgttccaacaggcggcggaagaggagggcgccgtgccgcgtcgttcgcgtgccgatttaatgcaatttgttgacgcggattattacgggtacatggacgatgacgacggactgctgattcctctagagaagacggaggagcaggtggccatcgcgaagatcaacgaggaatgggttaaacgtggacc

SEQ ID NO: 49254 - DNA, 623 bp, Heterodera glycines
ggagtccgtcatttttatttgtttgttatttatttgctgacatggctcaattagctgttgcagctcctctgccgccaacgacaaatgcaacagcggccactgctacaccggcggcaccgtcttacccaatggcttcgctttacgtcggcgaccttcaccctgaagtcactgaatcgttgctcttcgagaagttcagcgtcgtcggtcccgtcctctcaatccgcgtttgtcgtgatgctatcagtcgtcgttcgctcggctatgcttatgtgaacttccagcagacatcggatgccgagaaagccttgaattcgatgaattttgactgtgttttgggcaaacaaatccgcataatgtggtcgcagcgtgacccgagcattcgtcggtcgggatccggcaatatttttatcaaaaacttggacaaggacatcgacactaagaacttcttcagcactttttcggcctttggtcgaattttgagttgcaaagttgccacagactccgacggcaaaagcaaagggtacggcttcatacattatgcgagtgaggacgacgcaaataaagcaattgagaagattaacggaatccatgttgacggaaagacagtgtttgccgggaaattt

SEQ ID NO: 49255 - DNA, 348 bp, Heterodera glycines
  unsure (1)..(348): unsure at all n locations
gagccaccaaaatgccgtcgaacaagaccttcaagatcaagcgtgtgctcggcaagaagcagcgccagaaccgccccatcccccagtggatccgtctgcgcacggacaacaccatccgctacaacgccaagcgccgcaactggcgccgcaccaagctcaacatctaagtcgtcccaccggaatgtcggtgtttgtggtgatggcgccgttggcgtgattggccgagatttgtcgtccccgtcatgcctgcttcgtttgttgcttcttcgccgtcggttggatatcttgttgttggtggtattgccataaaagaaccctttctttcnnaaaaaaaaaaaaaaaaaaaaa

SEQ ID NO: 49256 - DNA, 621 bp, Heterodera glycines
aagctttttttgcgccagaaccactgagagactttcggtgtgaccagtgccgggagactaattgtgtgactcggtccagcagattcactcagcttcccgaattgctcattgttcagcttaaccgttatgttctagcaagcaatggaaaccttcgcaaattacaaaacgccgtgcattacccacgccttttgaccgaacttggaggcgagggaatcccggactatgagctgtgtgctgtgatgattcatgaagggaagagcactaattcaggacattactacgacgtcattcgtgacccggtcatcgaccgttggtttacctacaatgacgaaacggtgaatcaaaagcgcacagctcccggctatttgggcagactgactcagaaaccacgtgcgagtgctgacacgacggggtgttatgcgctgatctaccgaagggtgggcagtggcttgagggggccggtgcaattgccgccagagaatattgtgacggaagcaaagaaaaggatggaggcggaattcgcacaacaagacaaggaggacgacttggcatttaaaaagtggaaaaagcatatcaacgaaaggaatcatttgttgcagcaactctggaaggagcttgagg

SEQ ID NO: 49257 - DNA, 362 bp, Heterodera glycines
gtccaattaagaattgagtatgacatttggtaattcaccgactcaagggagaaaattaggcgaacaggagacgcaatttgatgagactattacgcggactgggattgcgtgtgatcggatacgacaacaattgaagaagtgcattaaagaatctgattgcatacagatcaagcggaagaaggccagggagtgtcacgaagaattggacctgcctcagcattgcattcatttgatgtattcactggccgagtgcaaacgaaacaacattgatcctcgagcccgttttcgtggacggaagggcgatttgtgattgaatactgcatacttttcatcgctgttttagaataataaagtttttctcg

SEQ ID NO: 49258 - DNA, 338 bp, Heterodera glycines
aaagattgtgaaagaatggctgcgcacaaaacatttatcatcaaacgaaagttggccaaggctgccaaacaaaatcgtccgcttccccactgggctcgaatgaagacgggcaatcgcattcgctacaacgcaaagcgtcgtcactggcgcagaaccaaactgaagttgtgagcgatggacgccgagaaaggaaaagcgaaaacatcggaagacggcggacggacgatgattttcgactttttgttgtttgttcatggagttaattttcatacatttttgtgtggactattgttggtaaaattgttgaatttgtaaaaaaaaaaaaaaaaaaaaaaaaa

SEQ ID NO: 49259 - DNA, 631 bp, Heterodera glycines
cggaaaccacaagagcagcggatttatggcggaattgcctaaccgcagatggggggcgcctaacattttttacatgggatacgcatcggtcggccgctttgctggactaccaattggcggattctctggcatttttaagcctggggatttcaacacaatgccatttcaaacggccgcccttccgtgaggcgggctacgatcgtctccaccttaccacctacgttcggtggacatttttcggtaacgccatctgacagatggacctccgttggacattttcttttcgcacgaatggaccggggggataacctagtttagctattgggaaactctctcgcgcattaaggcccattttacggaggatgtgcgaaacatccgaatgggctgaccgataacgatggatctcctccaccagctgacacccacccattgattggacccccatttgcatgtccatttcaccgtcgtagtgccccattcctccgcttcccccaccgcttcggtgacgcgctttttggcattggacataccaggcgaaaacccacggagacggtgcatccaattccttcacattccaattgctgaagacgcccctttggaccattgctatgacccccaatggttggcgatt

SEQ ID NO: 49260 - DNA, 595 bp, Heterodera glycines
gtccttggactgcctcatcacggtccacgccaaattcttcttgcatgaggagttttctgatgacagttggcactgcatctatgggtcacgacaaagagcaaatatgactactggaagtatctggctgtccgcctggaagttcttcggtcacttagtgccggaccagggtttgaagaccatccatgacgcccggatctacaccatctcgggcgagtattctaataacttcattcacaacggaaagccattggttgtccggtttaccgtcgaacgcgaacataacatcgactgtcgcggcggctatctgcagctcatggcttctgactgctgccgagacaacttccgcgtgcagacgccgttccatctgatgtacagtcaggacatttgcgggccccgcactaattaagtgcacgtgatcctcggctacgaaggcaaaaactcgctactcaattcggacctttcctgccaggacgacgatctcagtcatctgttcacactgatgttgttccctgacaacacttacaaagtgcttattgacggccatcaggtcgagagcggacaattgaaggccgattgggaccctgtgccggcaaga

SEQ ID NO: 49261 - DNA, 556 bp, Heterodera glycines
caagagatttcggccagttcacgacctgaccacttggagtttagtttggagcacggcatgatgcgcgattgacggaaaacaaatcatattgcaaatttgggactctgcaggccaggaatcctttcgctccatcacccgttcctattaccggggcgcggctggcgctctgactcgtttacgacatcactcgacgccacacgttcaaccatttgacctcgtggctgggaaacgctcagtcaacactcctattccaacaaggtgataatgctgcattggcaacaaaagtgatctcgaaacgaggcgtgcggtcaaaaaggaggagggggagcagttcgctcgctcgagtggacttgtctttatggaaacgtccgcaaaaacggctgcctatgtggaggaggcattcattgatacagccaaggaaatttacaggaagatccaggacggcgtgtttgacatttacaatgaggcaaacggtttcaaactcggtcctctacacccgaccagttcgccaagctctcccggtggtgcgccgttaggacgtgcgagcaactgttgc

SEQ ID NO: 49262 - DNA, 607 bp, Heterodera glycines
attttattgttatacatagaatagaagaatttgcttttttaattttgtctttggattcttagttcttacaatttgagaaatgtctacgagaccaaaggtttttttcgatgttatggttggcggaaaatcgacaggtcgaattgtgatggaattgtttagtgacatcgttccgaagactgccgaaaattttagggctctgtgtactggcgagaaagggatgggcaaaagtggcaaaccgttgcactacaaagggtcgaagttccaccgcgtcattccgagtttcatgcttcagggtggcgattttactcgaggcaatgggaccggcggcgagtcgatctatggcaagtgttcggacgaaatgcgaatgaatcggtcctttaggcgagaaattccccgacgagaatttcaaagagaagcataccgtcccgggactattgtcgatggccaatgccggccccaacactaacggctcgcagtttttcatcaccacagtgaaaacggaggttggacgaaaggcgtatttagccattttcgagattcatttttaacacaaattaatctagcgaattcaagaaatactggaaaatgcctatacttggaaaattct

SEQ ID NO: 49263 - DNA, 298 bp, Heterodera glycines
gggcaaaattcactactgcaagcgtccggacaacagcacaaagtcgtgcaaagctcgtggttcagatcttcgtgtccatttcaagaacacacatgagacggcgcgtgccatcaaacatatgccgttgaagcgtgccatccgctttctggagaatgtacgggaagaagaagagaatgtgccgtttcgccactttcaacggcgcgtgggaagcaaagcgcaagcccaagcttggggcacaacacagggaccgtgggcgaaaaaatccgcccagtttcctcttcaaacttccaaaaatgcg

SEQ ID NO: 49264 - DNA, 169 bp, Heterodera glycines
acagtcttatcccaaatgtcggttttgacgcggtggccccgacccaaagattctcttatatgacgggggtacgacacgcacaactgttgacgaatttccgtgctgagtgcacatgctatcgaatggcaaggaacatttgtcgtctgaggctctccaagctgctcgaatt

SEQ ID NO: 49265 - DNA, 445 bp, Heterodera glycines
agaagagagagaggcggagaggaaacgatacattttcaaggcacgcattaaaattcaaaatgagtagccaaacaagtccatctctctgcaagggatcggtcgttactacaaaacgaaagctgaagacaatagcggatctggaaccagacaaagccaatctttgccatttacacggcacaaccaatggacaaccaattctcttccgcttgcgactgcgttgtcttacatcagtcagtaccattcgccttccgtttatggcaaatcggatgaactgttgctactgcacattgagatgaacatgacctccgaaaaaacgaccaaattcaagacagattcacctcaattggttgaccttccgcatccttttcaacactctgaatagcgtaccattctggcatttgccggcaccaaagaagcgcaacaggaagtgatgctaaacggagcg

SEQ ID NO: 49266 - DNA, 576 bp, Heterodera glycines
caaaccccctcaattgcctccccaattcaacatacctccgccctccgtcccctctcatcagtttcaaatgcaacctcctccattggtgccaggccaatttcaccacggatttccatccatgggcatggctccgccttcgctactgcaacagcagcagcaacagacgccttttacacaacaaaagccgacacccatcgctcctttggcagtgcctccggcagcgaccgctccgcaacagcagcaggctgttagtccgcctccgcttagccaacaaacacagcaaagtaacagcgacaatttggacgaggagcagcaggcgcaaatgcttatccgcgtgctgcaactcaccgatgagcaaattcgtatgttaccacccactgaacgtgcccaagttatcgaattgcgtaaccaactgagaagtgcggatgcaaatgcgtgaccatatcaaatcgcactgacagaggtcgaaaagccaactgatctcttctttctccatcaacctatttttatataatgtttgatttttttgttgttgaaaatcaagatttaatgaaaaaatttttactaggttacaaa

SEQ ID NO: 49267 - DNA, 598 bp, Heterodera glycines
gtccaattaaggttttttccaatttttccccatttcaaaaatggccgactccatgttcaagtatgaccaggaggagcagcggatgatacgcaatgtgaagccatgggagcaggatccgcactatttcaaggaagtcaaaatttcggccttggcccttgtcaaaatggtgatgcacgcgcgcagcggggggaacatcgaaattatgggtttgatgcagggccgggtggacgccaacacaattattgtgctggacgcttttgcgctgccggtcgaaggcaccgaaacgcgggtgaacgcgcaggcccaggcctacgaatttatgaccaacttcagcgaaagttgcgaggcggttggccgtttggaaaaggtggtcggctggtaccactcccacccgggctacggctgctggctgagcggcattgacgtgaacacgcagtccatcaaccagcaattccaggagccctttgttgccattgtgattgacccgattcggaccgtcagtgcaggaaaagtggacattggcgcgtttcgcacttacccaaaaggttataagccgcccgatgagccgccctccgagtatcagacaattccgctgaac

SEQ ID NO: 49268 - DNA, 625 bp, Heterodera glycines
tacggttcggagaccaagtcctcccttcccctccctgccgtcttcaaggcgcccatccgctccgatgtggtcaaggccgtctacaagaacgttgccaagaacaagcgtcaggcttacgccgtgtcggtgaaggctggtcaccagacctctgccgagtcgtggggtaccggtcgcgctgttgcccgtatcccccgtgttggcggttcgggtacccaccgtgccggccaagccgctttcggtaacatgtgccgtggcggtcgcatgttcgcccccaccaaggtctggcgccgctggcatgtgcgcaccaacgtcaacgagaagcgttttgccgttgtgtctgccctcgctgcctcggccatccccgctctcgtcatggcccgcggtcaccgcatcaaccgcattgctgaggtgcccctcgtcattgacgactcggccgagtcgttcaccaagaccaaggaggccgtcactttgctccgcaagctcaaggcttacgatgacgtcaagaaggtgatccactccaggaagctccgcgccggcaagggcaagctccgcaaccgccgccacacccagcgtcgcggtccccttgtggtgtacgccaacgacaacggtatcgtccgtgccttcc

SEQ ID NO: 49269 - DNA, 632 bp, Heterodera glycines
caattaaggagccatttaaaagtgaaatgagcaaaggaaaggaaggcgttgttttcgtttcaatgggcaccatcattcgctcatcggaccttccggccaaatttcggcggaaccttctcgaaacttttgcaaaattctccgattatcacttcataatgaggatagaaaagggggacaattattcagcggaaattgcagcgaaattcggaaacatttttttgacgccgtgggcgccgcagccggccattctcgctgacccacgtctgaaactgttcatcacccacggcggctacaacagtcttttggaggcgacgcgcggcggagtgccggtgctggcgatgggtttttttgcggaccaacaccgcaacgcacgagcagcggaacggaacgggtgggcacgctcatttgacaagttgaagctggtcgaaggcacggcgcagttcgaggcgctgcttggcgaaatgctcaataacgaaaaatacgctgtgggggcaaaaagaattcaaaatttaatgagcactaaaccattcccggccgaagaacgactcaccaaaagcatccgatttctcgaacaaaatgggggaaaactgccggaattgctgagcgaatcgagaaatatgggcacaatttcg

SEQ ID NO: 49270 - DNA, 547 bp, Heterodera glycines
gtttgagccaaattaataaatatttcttcgatatttttttagtaagaatgtcttcatcagaaacaaaattggatgaaaaatcaaacgaaattagcaacaatgaattggtgggagaaaacaatgccaaggatggaaatgtgaaagaagcaaataactcaactgacaaatcagctgaagcagaagttcacacagacgaagcccagctgggaattgctgcagttgacccaaaaccaacggacttttcggaaaaaccaactgatattcaaaagggtgggaagccagaggaacaacagcaacaacagcaggaggacaaaggacaatcgacgcttaaaagccttccgactcgtcaatatttggacatgaccattgtgccaattttacttcaagctttgagtgcacttgcaaaagaacgaccatcggacccaatcgaatttgtcgcgaattatcttttgaaggaaaagccacgttttaacggtgcagcgaatgcatcatcaaccaatgaacattgattttatttgattgtttaacagtttagccacttgaaaaa

SEQ ID NO: 49271 - DNA, 626 bp, Heterodera glycines
gaacagagtattttttgtgttttatgaattaaagaagcgctgtttagtaaatggatgcttcctttgaccaattcggtggtggaggatggggtgaccaaggcgaacaagaatttgcagcttcacaattccaaaaaaatatttatgacaaagttcctgtccccgttgcaatcgatgtccttatttccatgactggtgatgaagaaaaatatgttcttggaaatttttcttttaacacggttcaattgatgggaaaagttgccaatgtgtcggaagttgaccaatgtacgacttacgagttatgcgatgccatggccacggatattcgtgtggcaaagagatttactgtcattcgttatattacggctgacttgcaacccgttaaagacgaggttttcacaattggccaattggtccaagtaattggaaagctgcggctgtataacactcggctgagtgccgtctgcttcaatatccgtgaagttgaaattgatgagattgctattcacaaattggaatgcaaacttgccaaaatctactttgagaagaatttgactgaattttcacttgggattgttgagaatgacaccattttccatggcaaaatgtccaacccacgggcctggctc

SEQ ID NO: 49272 - DNA, 628 bp, Heterodera glycines
cttttgtccgatattcgacgggacctcaacgaattgttgtccatttgtcatggggatcagaagcagaacaatcacagccgtgaattaatagctgcattggtcaagagaaaacgtgtgccagacaattggctccaattttccgtgccaaaagacgtaacagcacttgaatggatgcgagactttgtgcaaaggatggaacaactaaagcgcttgtcactttcggaaaatctgagatatgaggaagtctggctgggtgggatgttctttcctgaagcgtatataacggctacgcgtcagctgatagcccaaacgaatggctggtcgctcgaacagatgtacatgcatatcacaaaaacggaggaaggacaattaaaatcaacggcattcacattgacagaccttcgcgcaattggcgttctttgtgaggccgacgaaatgaagctgacagatgaagtgcatgttggagtgccacggcttcagttcacgtggaccttggaaggacattctccagcgagtgttgtggtgcctgtttatctgtactccaacagggccaaatttttgttcggacttaatttgttaccaattggatttgatcattctatgctaagccagcgaggggtcgcctttg

SEQ ID NO: 49273 - DNA, 634 bp, Heterodera glycines
ttaagattaattccttgaagctattaattcgatgtctcaagcggatgccggacgtatcattcacattgggaagcggcgagagcgtgccaaagaggacattgagagccaacgacaaaggcttgaggaagagcggcgaaatttggcggcgagcatcaaagcgaaattcactacaaatattgacgaacaagaagagaaattcaaagaacgaacggttggattggtaacacttgacgaagtgaaggagagacagaacgaaatattttacagtgggccatctttaaaattttcaaacgaagaccgacccaaatttgagaaagccattcaaaaaagagtgctttcgtttggcgcttttgacgacgacgacgacgaggaggacgaggcactgattccaatcaccaaaaagagacacggaatggacccaacggtggacacttcttttctgcctgaccgcgaaagggacgaacaattgcaacgtgagcgcgaacggatcgctaaagaatggcaagaaatgcaggagagggaaaagaatgaggagataaccgtggcattttgctattgggacgggtccagccatcggaaggactcaaaaacaaagaaagggacgacaattgctcaatttctgcagaaggcattg

SEQ ID NO: 49274 - DNA, 328 bp, Heterodera glycines
caaaagctacccaaaatgtgctccaaaccgacgaatgttttcctcttcaaacgccttgtcagccccgtccaaatttgctgccgttcaataaaaggcggcggtttggtccatccggtgaccggcaaagagccgccaacgcttgaggaattcgaccctttgaaccccggcgagtggcagttaggggcctatggtaaaattttgcctcgtctcccggagggcacgcgttgtggcggtttggtgatgggcaaatacggcctgtacaatccgaaggtgcgcgcgctgcaggaggaatgctatccaaaaatgaatggccggcgtgccgacggag

SEQ ID NO: 49275 - DNA, 466 bp, Heterodera glycines
gtccagtgaccttgcccagaaaaaggaaacgaaccccaatgagactgatgaccaaaccaagaaataaaatcccttgacgaggatggaaattgccccacttagaaattacaacctgggaccggacgccgatcatttgaagcaggcccagaaggacattgatgaaattcagaagcgcataaacactctttgcggagtgaaagagagtgacaccgggctggcgcctcccattctttgggacattgcggccgacaaaatggccatgtccaatgagccccctttgcagatggctcgccgcaccttaatcgtcaaagaacagggcaaagacacgcgttacctgatcgatgtgaagcatttcgccaagttcgtcgagggcctgcacgaaaatgtggcgcccactgacattgaggagggaatgcgcgcgggggtggaccgtcacatttacgacattgcacttgcccttgccgga

SEQ ID NO: 49276 - DNA, 238 bp, Heterodera glycines
cctgcaaacgaaagcacaagtggatgaagtcctcggcataatgaacgggaacgttaagaaagtgttggagcgtgaccataaactgtccccattggatgatcgtgctgatgctcttcaagaaagtgcgtcatggttccagaaatctgccgcgacgctgaatcgcaaatattgctggaagaacataaatatgatcgtgatcatgtgcgcaattgtcttcctgctgatcatcatcatcgtc

SEQ ID NO: 49277 - DNA, 645 bp, Heterodera glycines
taaaaaagttactgtccaaggaacgcatcaattatcgtgacctcaccgacaaatgggtggacaaggagggaaaagtgcgatatgttccacttccttcgtatgaaaatattttccaaagtttttccgaacacgcaaaaggtcacaaaacatctggcgatctttttaacagttcttcgcagaatattaatgaaatgtccgatccaaaactcattagcgaatcggaatttgcttatttcgaaggctcgttgattaacattaaacagagtattgagcgacaatacgcactggaaaaagagcgacaagaaacagtggaccaaaacgagaagctgaccctccaacttaacaacattaatgagcagcgagaacatctggaaaagaaaaagcgacgactcgaagatgacgttgatcgttacaaaaagaaattatacgacagtgaaaagctgctgaagaaggagcaggaggacaattcgtccatgaagacttctttattggattgtaagcgctacggggagagaatggtcgccgttgttgagaaagtattgcccccgccatcgaaaaaggaagaaaaagaaaagtcgtcgggatcggacaaaaatggaacgagcggaaaagaaaggacaacgaagttgcgaatttgaataccga

SEQ ID NO: 49278 - DNA, 600 bp, Heterodera glycines
gctgctcccgtgagctaattgttgagaaggaggcaatgctttcggcaaaagaaacgaaggaaatgtgctgtgcactgatggaccacagtttcatcactgttcggcaactcgcgcgcaccaacgatttcgcgcccgcccgcacatttttcctctacaccgtgtccatggtgcaggtgctgaacgcgatgatcagcttctgcacccaggcgttgaacaacgtgatcagacgacgcatgttggagagggaaaagcacgaggctttgttggatcgccaactgaaaatggaggtgatcctcagcaacatcgccaacgacccgacctttgatgacgagtcgcgcactcagcagatggccgacgtggagcagtcctacatgaccgaggcggaccgccgggcgttggagcgctttcggcgcgctgaacggcgcctgttttccaccgagattgagctggacaaggtgctgttcaccttccaacagtacgacatgctcagacgccgctgggccatggagcaggcacggcaaatgccgcacggcagacggaaaaggcaacaagcggcggcggcagctgtggcggcgacaacggcacagtcaccaaacgtga

SEQ ID NO: 49279 - DNA, 592 bp, Heterodera glycines
gcacagtgacggcgagtttggcctacgcaattgccaatttgcaggaaggagcgaagccgttcaaagtggccgtgttggacgtcgacatttgcgggccttcccaagctcggatgttcggctgtgaggagaacagcgtacaaaacagtgatcagggatggacacccatttttgtgcagaacaatctgttcgtgatgagtattgcctttttattggacactcgcgacgaagcgataatttggcggtggccccgaaagaatgcgctcataaaacagtttttgcgggacgtcgactggggcgagttggactttctgatcattgacaccccgccgggcacttcggacgaacacatttccatcgtccaaatgctgctccaagcttcttgcctggacggcgctgtcattgtgaccactccgcaggaaatttcgctgttggatgtgcgcaaagaggtcaatttctgcgtgaagaccaaagtgcccgttttgggtgtcgttgagaatatgtgccaatttgtgtgtccgtgctgttccaccgcctcccaactgttccccaacaccaccggcggggccaagaaaatgtgtgccgatttgagcct

SEQ ID NO: 49280 - DNA, 379 bp, Heterodera glycines
aatatggcaaattacaccgcaaaaattgtgcaaaatgctgacttgtgtctttttttttccgaatacacttatgcgctctcctcgtgaaaaaccctttccctaacggaaagaaccaactaactgggagaatttcgccagggctaaagggataacaaacaagaaagacagcaaagtctgggacaaaacgactcacgaatgcaagccgaaatacggatactgacgaggcgagaaccaatcgaaggaaaggatcattgaaattcccgacccagaagacccatagctagatcattttgctgagaaggcagaggaaaagcggtgaaagaataacaagcacgagttgccacggctgacgaacatttcccgcgactctaacacatca

SEQ ID NO: 49281 - DNA, 310 bp, Heterodera glycines
cttcgagaaaaagcctgtctccgcgaatatatttggcgtttggctgcgaatcaattctggtattgtatacctgaacatggaccggtagtatggcgatgattgggcagcgtttggtgcaactcagtgctatggcgacttgcaccctctgcggagccgtctaactgatcgtatgagaatcatccaagtgcaaccagtgcacgtgggagtatggattcgatcccgagtgaatcactgtcacaactctcagatctaatttccgcttcctcactttgtggattgcaagcgacgcatcatgactgctctcacgaca

SEQ ID NO: 49282 - DNA, 417 bp, Heterodera glycines
atttgttgaccctcactgtatttgacaccttttccacgcactaaaaaagaaacggcaagcactcgaagaaaaggaccaactcgagttgtacgcttccgccttggacgaagacttagagcgtctttccaccgactccgaagatgagcaggagacgcggaaagcacggccaaatatcgtttctcggcgccgaagtcgctcgcgcagccgtggccgaagtcggagcaaatcgagagaacggagacgccgatcactttccacggatgaccgtcggggaggacgaagtgccgcgaaagacaccgaaagagaaattgaggagaataacgcactgagaaagaaattgggattggcaccattggagcgttaaattgtttttgtgtaaaaattcagaattggcattaaaaagcaccaagtttcaaa

SEQ ID NO: 49283 - DNA, 136 bp, Heterodera glycines
taatctcgcccgctttgagatgaaattgtcccatgagtctgtgaccatcgagctgaagaacagtacacgaatgagcggtgctattcagggcgtccacgtgtccatgaacattcatttgcgctcggtaaaaatgaca

SEQ ID NO: 49284 - DNA, 307 bp, Heterodera glycines
gactgctgcctcagatagctcgcggacagactttctatgaactaaggagcgaatccaatcggggaatttcttcatggatgttctcgacaaggtattggcaatcaacccggatgagtacactctgcttcacatgcgcagcaggctcgtcctctcggtggcttctctgtcttggattgatcgcaaggaggccaccgcccttttcggcccgccgcctgaagtttcactcttctaggcgatcatagacttctcggcggtgttggagttcgcttcgcattgggtggagaacagtctcctcttggccaaggcg

SEQ ID NO: 49285 - DNA, 635 bp, Heterodera glycines
cttatcaataatggagagcaacagggaattaatcttgtatcgtgccaaactagcggatcaagccgttcgttactacgacatgggacagttgatgaagaaggtggttgagttggacaacgtcttgaacgaagaggagcggaacatgctgtcgattgcgtacaaagctgtcatccgtccgcttcgcttcgcgttacgggagatctctccgatcgaatggacgcaggatgggacggaaaagcagctgcttatgctcaagcgatatcgcgaaaagttggtcaaggagttgcacgacacatgcaacgagctcgtggagttattggacaagttgatctcgagggccgacgaccccgaagtgaaggtgttctacctaaagatgaaggctgacgtctaccgttacatggcggcggaggcaattggaggtgttgttgacaagtctcgccaagcataccaagaggcgttcgacatagccaaggacaaactacggccagcaaatgctacacggcttgggctcggactgaacttctgcatcttctactacgacaatttggacatggaagaaaccgcaatcgatttcgccaaaaaggttcttgaggacgcaaattctgatcaacatggtggcgcatgcaatgaatctg

SEQ ID NO: 49286 - DNA, 532 bp, Heterodera glycines
aatcaatgaaggccgaatctgttgacgacaagcccaagcagcagtttacattctcaaactttcgtttcgtccttcacgaggataagtgcgaaacgcgacgggacaaacgcaacaaattcaccggccgcgactttcgccgactgttagaaaaggcggagaagcgcgggcaacggatggaacgcattcggacgcaaaacccacaaaaagcgcaatgcgtcgagaaaaacgtcgcgtgggaacgcgcgtttcggcgagcggcgggacaaaaagttaaggacaatgttgacctgctgaaaaagggagtggtcagaaaggcgaaaaacaaacagcgaaagaagcgaaaatgggaggaacggaagcaaacggtggaaacagtgaaggagaggagggcggagaagaagcgagagaatgtggagaagagaaagagacagcagacggaaaagaacagagggaagagaaagagaaagtgagagacacagacaaaccaaccgaattgagtcgaattcttttttatgtttataaaagtgttaaa

SEQ ID NO: 49287 - DNA, 528 bp, Heterodera glycines
ttagcaaagatgagcaggattattgcgtcaaattcagcaacaatcttcgcagcactgtggccactgggaatcagcagaacaaaggcggcggcaaattgccatcggccacgaatatgttggagttggcatataacgagacaattggccaaactgcgcaagcgtgggcagatttttgttaattttcgcattccaacacggcagggctgggcgagaacatttactggtccacgaaggaggggatcagcaacaccgaagcgttaaacaaagcattcgttttttggtggaacgaagcggtgacaattggcatcccggaaaatttggtggtcgacgccaacaattttgagccgattgggcactttactcagatggcatggcacagtacgacagacattggctgtggcgtggccaaatgccaacacgcgcaatggaaactgtttgtggtctgcaattattggcccccgggcaatgttttgggccaaatgacttatggcccgggtgactcgtgcagtgcgtgtgaatcggggtggg

SEQ ID NO: 49288 - DNA, 232 bp, Heterodera glycines
gatcagactgttggccaccgaatggaccaatctcgagaataacatagatccccagtggctcatagtgtacatccacctgccgatcaaagtctccaagaatgtgctcttccccagtttccgtcctccaaagtttaattttgtgggcaaagttcttggaccttaacgcacgactttgcagaatatccccacatcattcaaatgtctcgtgatcattttggggctgggcagcact

SEQ ID NO: 49289 - DNA, 600 bp, Heterodera glycines
gtccaattaagctaatcactgaaaatgccaaagaaaaagaatggcaccaccgacgaaaagggttgccttctgatcacaaattatttcccaattcgtaggagcaagcgcataacaacgaaggaacttgaggacatcaaattgaaggagctcaaggagttgatcgacacagggttcaacgaggaccatttggaggtgtttcggtgttcggtgaaggggcgaagtgtccgtgcgtcgaaatgctttcaaaggggcgaatttgttgtggagtacaaaggcgacttaatcagtgtgaagacggcccaactccgcgaacaacggtatgccaaagatgagaacgtgggctccttcatgtactactttcggcaccgggacaatgtgttttgtatcgacgcgaccgatgaaacgccgtacaaaggccgactgatcaaccacagctatttgaagcccaacctcaagacgagggtggccgacttcggctgtgacggcttccatttggtgctcgtcgccatgcgcgacattgacaacggcgaggagttgttgtacgactacggggagcggcggccctccgtgctggcgggtaacccgtggattttgggctca

SEQ ID NO: 49290 - DNA, 268 bp, Heterodera glycines
gtcaaatcggtgcttttgcaattacagcccgacggtgtgcgacatggaggacacttggataacatacacttcggctgccagttttcaagcgattgtgctggagtttaattctggcacgagtgccatcgaacgccgtcacttttttggttgtgctccgctcgaaagaggcacagacgcatcgcatcttacgtgcgacgcgtggcgatactcccactcaaacggccgaaccgtcgcgtgctgttaccagggcaatttttgcagtccgaat

SEQ ID NO: 49291 - DNA, 421 bp, Heterodera glycines
gagtgtcatgatgaaaagcacttctattaaagtaactttaatctgcacaagtggagacatcggccaaccgctcggattacttttgaagaaaaacccttccattgcacacttggcactttactatcttgtcggcacccccggagttgcggacgacctttcccatatcaacacccaggcaaaagtgactggccatttgggaccagaacaacttgctgcagcgttggacggcgctgacgttgacattattcctgccggtgtgccacgcaagcccggtatgactcgtgacgactttttcaacacaaatgccggcattgggcgggacatggccgaagcaaccgctaaaacttgtcacaaagccttcatggacattataaccaatccggtgaactcgacccttcccatcgactgcgaaatcacgaaa

SEQ ID NO: 49292 - DNA, 613 bp, Heterodera glycines
tccaaaatggtgtccctcaagctccaaaagcggctcgccgcctccgtcctcaactgcggtaagcgcaagatctggctcgaccccaacgagtcatcggacattggcaacgccaactcgcgcgccaacatccgcaagctcatcaaggatggctacattgtgcgcaagcccgagaacgccccctcgcgtttccgcgtgcgcgagcgtcttgccgccaagcgcaagggtcgccacactggcaccggtaagcgccgtggtacctccgaggcccgcatgcccactgccgtcctctggatgcgccgccagcgtgtcctccgtcgcctcctccgcaagtaccgtgaggctggcaagattgaccgccacatgtacgccgaactctacctcaagtccaagggtaacgtgttcaagaacaagcgtgtgttgatggagtacatcttcaaggtcaaggccgagaaggcccgtaccaaggccctcgaggaccaagccgccgctcaccgtctcaagaacaaggctgcccgcgaacgcaaggcgcagcgcgctgccgagaagaaggctgctctccttggcgacaagcaataagttgctttgcacttgttctccttggtgtttttcatcc

SEQ ID NO: 49293 - DNA, 618 bp, Heterodera glycines
catatttgcaattatcagcagaaaacaaacacaataaaaattaaaacaagggaaagagcaattttcaacaaagacaaaagaggaaacgccagacagacaaaagaacagcgaaaaaagtgaaggaaagaaaaaatggcggaccgacaaacgcagtacaaaaacatcggaaaggacgtggaggcgttgcgcaagaaccgcacggagcaggtggtgtccatccggaaggagaagcgggatgacattttgtttaaacggcgcaacattccgaccgaagacgccactgaggacgcttcgacaagcaatgtcactggcgttgcggtgccttacgatcgtaccaatttgcaggagattgtggtccaagcgcaaagtgctgacccggaagtgcagatgctggccgttacccaggctcgaaaattgctctcctccgaccgcaatccgcccatagacgacctcatctccagtggcattctgcccatcctcgtcaactgtttggagtcgccaaatgccacgcttcaatttgaggccgcctgggccctgacaaacatcgccagcggcacttcagaccaaacacgcgctgtcgttcaggctggagctgtgccacactttttgaagctgctt

SEQ ID NO: 49294 - DNA, 492 bp, Heterodera glycines
aaagtcgcgccaacaagaggcggagtgtatgcgccgcttggccttcttcggtgttgcgctctccaccgtggcaacattgatcactgtgctgtccgtgccgatggtgtacaactatgtgcagcacgtcaactctcaaatggtgtccgagctggacttttgcaagtcgcgctccggcaacatttggcgcgaggtgacccgcactcaggctcttcacagcaacaagcagcgtgtggcccgtcaagcggactacggatacggcggcggtgcctgctgtggctgtggcgtgtcggcgcgtggcccacaaggacctcctggccagcccggtgtgcccggtgacgacggtgctcagggcaacaacggtgcgcccggtattccggcatttgtgagcctgccacgaatggtaacccaggcgaacagggacctgctggttcgccaggggagccaggcaagcctggtgcacctggttacccgggccagaatgggccacgtgga

SEQ ID NO: 49295 - DNA, 623 bp, Heterodera glycines
atttttttgtttttgtcacgccaaaacgcagcaatttggtgaaccgttcgacagaaaaggcataagcaaatgacagaatataagttggtcgtcgtcggtgacggcggtgttggcaaatcggcgctgaccatccaattaatccagggccaattcattgaggagtacgacccgaccattgaagactcgtatcgaaaacaggtacttattgacggtgagacttgtttgctggacattttggacaccgcaggacaggaagagtattcagcgatgcgggatcagtacatgcgcacgggtgagggctttctgctggtcttcgcgctgaacgagtacaaatccttcgagaacatccatgcctaccgtgaacagatcagacgggtcaaggacagtgacgaagtgccgatggtgttggtgggcaacaaatgtgacttggcacagcgcgccatggaccagcgctccatccaggagttggcccgctcatttggcattccgttcattgaaacgagcgcaaaaacgcgacggcacgttgacgaggcattccatgcattggtgcgcgaaattcgtaaacacaaggacaaacaccgggagaagccgaaacggagaaagcgctgtgccgtcctctgacg

SEQ ID NO: 49296 - DNA, 611 bp, Heterodera glycines
atttgttgaagaatctcatttgccaagttccatttagacgatgctacggcacattgattcaaccaacaccttttatttgcgaaagaatgcaacatgatccaaaattgaaagaaaaagtggaaagagtccagaaagaatatgaggtgtacgattatttctccgaatttattcctaaatcatttgacgataaagaatgggttcgaacaatggaatgttcaagtgttgtcgaacgcgttaattattgggcttttttggcactttctcagcatcgaaaagacttggacgaaatgaaacataatcaaagtgtagaacatacggatagttttttcaaagaacagttgcgactttataatgctggaggcatgggatacagtgaagacgcgtactgtttgtatttaaattcctatcaaggcagaaattacgcatcgagaaaatatcgcacaattgaagaatcaaagaaattggcccagcaattaacacttggagaatcaccgcggattctcttcgattgtcaatttttacctcaaatgacacaacgaatttacggcaaagtagcaaaatcggcagttcatgcatattttaaaaatcttcaccttccttcgccttttcct

SEQ ID NO: 49297 - DNA, 631 bp, Heterodera glycines
gagattatgcttaactccaaagggtacaccaaatccatcgatgtttggtcagtcggatgcattctcgcggaaatgctcaacaaccgcccgttgttccccggcaaacattaccttgaccagctgaacctcattctcgccgttgtcggctccccgtcgcaggaggatttgcagtgcatagtcaatgacaaggcccgtgcttatttgctgtcgttgcaacagaaaattaagcagccctgggtcagactttacccgaacgccgacccaagagcattggatttgctcgacaaaatgctcacattcaaccccaacaaacgaattggcattgaggaggccttggcccatccgtacttggagcagtattacgatcccagcgacgaaccgatttgcgagaggccatttacatttgagatggaatttgatgatttgccacgtgaaaagttaaaggaactgatctttcaagagacggaggaattccatcgacgtgccacagaagcggcggcagcaagccgaagtgagacgacgatgaatgagggcacttaagaggaagtgacacacaaaagatggaaggaagcctatgccattttcgaaaaccaatcagaatttaaatcctttatttgctgacagtttgggc

SEQ ID NO: 49298 - DNA, 579 bp, Heterodera glycines
gttttttaatcagatttgaaaatgtctaaagaatcgacgaaaaccggtaaacaacaactgagcggagggaccgattttaaaatgatgagttcggaactattcattctcagctatggtgcacttgtggtcgacttggtaaacgacttggagtccccggaggaagtaaacaagcatctggacaaaattggatttaatatgggtttaagaatggctgatgattttcttgcaaaaaacccaaggattggacgttgttcggacatgcagcaaatcatggaaattattgcaaagagtgctttaaaggcatatttgggcattactgctcaatttgttgcgattggcaccgaaggaaacgaattctcgctgacattggactcaaatccgttggtggaatttgtggaggtgccggaagaaatgaagggcctttgctattcccaggtgatttgcggttgcattcgtggcgcgttggaggcactgcacatggaagtgcaagcagtgttggtcagcgacgttccggagccccccgaactgcgcatcaaagtgcaccgggtgttgcaagagtccatcccggggggggaagaa

SEQ ID NO: 49299 - DNA, 630 bp, Heterodera glycines
cgtcgcaaatgagaacaccgaagcgggaaaaggtggagcggaaagagaagcagcaaagggaggagaaaaaggatcacatcaaaaagccaatgaacgcgtttatgctatttatgaaggcaaatcggcacaaatatttggaagaatcggtggacaaacggaaacagtcggcggaattgaacaaagagttgggccaaatttggcagcagatgaaccgcgaagcgcaacagccgtattatgaaatggcacagaaagcgaaggaggaacacgcgcggatgcacccgcaatggtcggcccgggagaattacgccattcacaaaagggcaaagaaaaaaagagtccgggaaaagtcagtcgataacaacgaacagaaaaagtgcagggcccgatttggagtggacaatctgacgaaatggtgcaaacattgtcgacgcaagaaacgctgcttaaatgtgctgagggactctgattctccagtgcaggtgtcgtcctccaccaacccttccaccacccctttgtctatcggagtcccttcgtccgctcacttcggaagccttcttaattctgcacaccatcagcgcctctgcagtcctcactcccgaaaggacagagaagggcacggggcaccgacta

SEQ ID NO: 49300 - DNA, 202 bp, Heterodera glycines
gacacatggattggctgatgtgatgaaatccttccccgagaatgaaaaaggaattatcggcttggcaggaaacgtttcaccgattggcggggacagtcatattcctgccatttgtgaagaaaaggggcttccttatgatttctctccgtctcgagaacaccttggtatttgtgctgggtataaacgccccgcatttgtcctt

SEQ ID NO: 49301 - DNA, 618 bp, Heterodera glycines
ggtcaatgtctgatagtcaacaaagcgaccagcggactgaacgtgttactcgccgatcgctgtttggttctgggcgaccaaatgacacggatgaatggctgaaaagcctggaaaataacgcaatggaggagaaagtgcgaaaatggagcttcgatttccgaattggatgtccattgaaaaaggcgggtgccgagtcgccatcatcaagccatgtttacgaagcaatcgacgaacgcgaggtccccgagttctaccgcacgaagactcttcgctccgttccgaagcgccgtccgtcgtcaatccgttctccgctgaaatcgcccctgaaggcgtccgagtcccttaaaagcgagtcgaatttggcgtcggcgacgaaagaggcggcgaatgttttggaaactccgcgcaaaagcaaaaggctgcgaaaggcaaattcgacggagagcacgccgcagaagaaaaagcgaaacgaatgaatgaaagcggaggaaagacggaagagtatttgaagccactcacatttgacgactcactgccaacgattgcatattcaattccgcatttccttcagcccactcccgcccttttctcctgtacagcattttattaacttttacc

SEQ ID NO: 49302 - DNA, 611 bp, Heterodera glycines
gttaattgctctattaatctttggcccggccaattcgcccttttccgttccgctgaatgagatcgctgctctctgtgctcctctgtccccttctcctttccctcctccgtccttcttccacttgtttgctttgtccgttgcatattccggcccggcccaaaccgcttgatcagttccgattgccctccattcagaaaatagtgcacacagccgacactttcgaatggctctgtcagaatgggtcaaagttggccacggtgtccgctcaatgccgtgccgatgtgtcccatttgttctgttccctgacccgactggtccaatccttgaaaacggaatgcccgggagctgacgagggaatggcacaatgtgccgagtgccgtaggaaaacggacattctctaccgggagaacaaatgggtgctgacatggatcgactcgttggggaagatgccctcgggcataagtgatggcaattaccattggcttggcgactatgagcagtgccttcgattgcgggacgacggtctcttcaatggccaatactgtctgctcgagttccgcgttcccgacggagtgttgctgaactcggaacattgtgaggacggctcggag

SEQ ID NO: 49303 - DNA, 546 bp, Heterodera glycines
attttttctaattaactatattaattgttgctattaaccgtttattctaatggagaatggcaatggaattgaaaagcgaggattggtcgttgaggacggtgacggacaccccctttcgctttttgccgtgccgaattgttattgtgcggacttggattcggtgctcattccaaacggaatgattcacgacagaattcgacgaatggccgacgaaattcaaagcgcaattggcgacagagtttcttttaaaccaaatttgaattttgcgcctttttggcgttttgttcagcctctgactttggtctgtttgctaaagggcgcctaccgatttttcaccgctttggccgactgtttggcccaacttcggctctgttgcgcatctccgatgcagatcgaattcattcgggcgcaaagctatttggaccaatcgtccacaggccaattgcgcagcgacggtccttcgtccattgacggaccgttgcggggggcggaagtgttgcttgttgacgacattctcgacactggccttacaatgactcggattgc

SEQ ID NO: 49304 - DNA, 587 bp, Heterodera glycines
atcacctctcttggccccagcccaccacctcgcccccgccgttgccggtgacaccacacccatcaagggcgtcacacctaccaccaagctgacgggcacgcttgagaatctcgagatggactctgtcaagaaggcggccgtctccggatcactcacggcttcgggttccgccgcagcccgtgacgacgggtcgtcggttggccgtcccgctcgtacactcctgtcggatttggagttgagtgagtccatcttgaccgagaacaagaaccggtttgtcttgttccccatcaaataccaagatatctggcaaatgtacaaaaaggccgaggcctccttctggacggccgaggaagtggacctgtccaaggacttccacgactgggagaaccgtcttaacgacgacgagcgccacttcatctcgcacgtgcttgccttctttgccgcctcggacggcattgtcaacgaaaatctcgttgagcgcttctcgcaagaggtccaagtccccgaggctcgctgcttttacgggttccaatcatgattgagaacattcactccgaaatgtactcgctgctcatcgatacctacat

SEQ ID NO: 49305 - DNA, 619 bp, Heterodera glycines
tctcggtcgatttcctcaagcgctataagatcgatttcattgcacacgatgcacttccctactcggcaaaggacgaggaggacttgtacgagaaattccgtcgcgcggatatgtttgtggaaactcagcgcaccgagggcgtgtcgaccagtgacgtcattacgcgcattgtccgcgactaccatgattatgtccgtcgaaatctgcagcgtggctacacccctgaggaactgaacattggtcttttgcaggcctcaaaataccagctgcagaacaaatttgccgcgatcagacagaagggagccaaaatgctgaaggaatggacggaccgatcggacgaatttattcgaaacttcaccagcacgttcaacagcgacggaccgattggccgttttctgagcagtcgcagtccgacgccggcattggaggagcaggaagaagcggcggcatcggacgacgacgaagacgaagaacacaacgaagcttaattgattcaccaacaaaaaagggtgcttaatcgatcatatcaactaaccaaagaggatgagaaatgaatgatattatattatgttatcatattgtccttttgtgattttcttacaatgattgtgccttggct

SEQ ID NO: 49306 - DNA, 520 bp, Heterodera glycines
ggtttcgctcggggattctacgcgcacgggggagcaacgagcgtccggtctacaatggccgattatgcttttgactggccatgagggcgaaatctacgccgcccaattcagtcccgatgggacatgtcgcgcttctgccggctacgaccagagaattttcttttggaatgattatggggagtgtgagaacttctccactctctccggtcaccaaggcgccattatggacgtacatttcagcaccgatggaagtttccgtttctcctgctcaaccgactaaacagtgcgcgtgtgggacatggaaagtgggaaatgctgacgccggttccgtacacacaccgatttcgtcaacggctgacaccccgcccggcgggggccatcgcttgtcgtctccggctgtgagggcggcaaaattattgtgcacgatgttcgtcggcggtgccctgagagcacttttgattctgtgagcgattaccagaggacctctgtgacattcaacgagccagcccgaacaattatc

SEQ ID NO: 49307 - DNA, 400 bp, Heterodera glycines
tcgaacaaaacaaacggtacgcaagtctactggtgggaaggggccacgaaaaccattggctactaaagctgttcccaagtatgcccctcccatggggggggtgaaaatgcctcaactataccggccagtgaccatcgcactgctggaaatcagccgctactcactaagcaactagctgctcatccgcgaattgcccttccaacgattggtgcgcaaaattggccacgactacaaaacagacttgggattacaatcggctgccatcggcgctgtgccagaagcttctgaggcttatgtggtcgatctttttgaggacaccaatcattgtgttatccatgcaaagcgcgtctccatcatgccgaaagacatttaattgggccgtcggatccgtgtagaccgt

SEQ ID NO: 49308 - DNA, 253 bp, Heterodera glycines
tggaattgcacttacatgttcccacattctcactcatttcctacatgcaactggcaaaactggttcttcttgctttcgctgctttgaaaaaattgacccttccaaagaatacatccgagcgatgatactcgttccgactcgggagcttgccttactgccatctctgatttgcgtataactcaccaaacgcttgtacattaacattatggtgacgactggctcaccagatcttcgcgacaatattttgcgtctc

SEQ ID NO: 49309 - DNA, 622 bp, Heterodera glycines
ctttgctttgttgaatttctttctctcaaaaatgtccagtgaccttgtcgagaaaaaggaaacaaaacccaatgagacggatgacaaaaccaaagaaataaaatcgcttgacgaggatgaaattgccgcacttagtaattacaacatgggaccgtacgcggatcagttgaagcaggcggagaaggacattgatgaaattcagaagcgcataaacactctttgcggagtgaaagagagtgacacggggctggcgccgcccattctttgggacattgcggccgacaaaatggccaagtcgaatgagccgcctttgcgggtggctcggtgcacaaaaatcgtcaaagaagagggcaaagagacgcgttacatgatcaatgtgaagcatttcgccaagttcgtcgtgggcctgcacgaaaatgtggcgcccactgacattgaggagggaatgcgcgtgggggtggaccgtcacaattacaagattcacttgcccttgccggacaaaatcgacgcgtccgttacgatgatgcaagtggaggacaagcccgacgtcacctacgcggacatgggcggctgtgaagaggagatcaaaaaggtgcgcgaagtggtcgagtttccgctgctt

SEQ ID NO: 49310 - DNA, 597 bp, Heterodera glycines
gcgcaacgacggacgaagcccaacggactaccggcccatggcgctggagacgggcgttctgctgggctccaacgggtccgcccggcttcaactcggcgccaccgatgtgctcgtcgcggtcaaggccgacctgcagctggtggagccgtccaccgaagccggggacatccaacgcgtccatttctttgtcgatatttccgcaaatgcgtcgccacgctttgcgggacggggcggcaacgaccatgctgaggaatgggccaagtcgcttgcgggtgcgttcgccaacaccgccccgtcagcaatgcccgacatggccaagctgatgctggcacccacccagctgtggtgcttgtacgtcgacgttgtcgtcctccaatttgacggcaacgcaatggacgcaatttcgttggcggtcaaagcggcgttggcggacaccgaaatttgcaatgtcgtcgtgcggccggccgacgaaggcaaagtgcacattgatttgccggaagtgatcagcacatggcgaatggacatggcgggggcgcccctggtggttggagtcaacaaaattggtgaccaatgcgtgttggacgccgatttgatgga

SEQ ID NO: 49311 - DNA, 640 bp, Heterodera glycines
tttgctttttgttgattgccttggcctattttttgcaaaaatgcctcgctatgatgcaaccgatgacttgtcaggagcggaatatttggccagcatttacggcacagaaaaggacaaagtgaattgctccttcttcttcaagattggcgcatgtcggcacggggacaactgtttgcgggcccatcacagaccgaccttttcaaacagttctgctcaagaatttctaccagagtcccattgtgaacccggcacaggcgaacgctttcgacaaggtcggtaaaaaggatgagcttgagcagcgccattttgatgagttttacgaggaagtattcaccgaacttcaacgcacttatggtcccgtggaagaattgaacgtaaattgggaacgaattttcgcttaatttacgaaattttacacttttaggtttgtgaaaacattggcgaacacatgattggcaatgtgtacgtgaaatttgtttatgaggaggacgcagaaaaaactgcacaaggcttggagaatcgatggttcaacgggcagcccatctacgccgagctgtcccccgtgtccgactttcgcgaggcgcgctgtcgccagcacgaaatttccacctgctcaaagggcggattttgcaatttcatg

SEQ ID NO: 49312 - DNA, 584 bp, Heterodera glycines
ccaattaagggaaaaaagtcctccaaaaatgaattcttacaacttttgctgctggtgacataaaccaccaaatttactctttgaagaagtgacgccgtggggagagaaagtgcggacgaacggacaaagcgaaggcaatgaacgcggaaaagacagtcttcggcaaatgctccccaaaatttgccaacgttgaaaaagcattcaggcgacactttgcggacggatgggagcgggagggggcgtcgttggccatttactggaagggtcaattggtggtggatttgtgcgatggatacgccgacaaagcgtcgcatgaacggtggggcgaggagaccctgacggcttgtgttctcagggatgaaaggcactcgctgcacatcattgcttatatgctcatctgcacgggtcacgtcggttattccaaaagcatcagagtgttctgacgcgatgtccaccatgtcgggacggagaatgtcacactagaagaacgacttgtggacgaagagggctcgccactgtctatgaacagtgacgatgaagcggcacagcacacatccaatggacaggacttgaacgcaacccaa

SEQ ID NO: 49313 - DNA, 427 bp, Heterodera glycines
gatgggtgtttgtgctgacaaaacggttgctgaatttggcttcacccgtgagcagcaggacgcgtatgcactcacctcctatgctcttgcgactcgcgcgtgggcgggcggctcattaggggcgcaaattgtgccggtgaaacacaaaaaccggaagggcaccgagttaatggtggcataggacgacgaggagcggcgactagtgcccgacaaagtgccttcactgcagccggcgtctgtcaaggacggcactggtaccatgaccggggctaacgccagctcattggatgacggaacgacatcacttgtgatcgcatcaggccgatttgcaggggcagaaacgatggctatagttatcgcctactccgaggctggcggaacggccgacaacttctcagtggctgccgatgacccggccaaatcattg

SEQ ID NO: 49314 - DNA, 391 bp, Heterodera glycines
cgggaaagagcattgcgccaacggaacgaaatggattctcaatgtgtgcgaagattgtgccgaaactcctatgaaaatgtgcggtttttgggtcggataggtgcccttgttcttgcggctgatacctgtgtttcctgagctgaacgatgactttctgaactaacgctgtgaaggcctttccatcttctttctgatgttatgggtgatcggtgacagttgcaacatgatcggagctgatgtcacccatcgacagcctctgcaacagatcatcggcgtgtattacattttgccagacttggctttgcttggtcaggtcatctactacactcggctgtactcggcaacactacgacgcgaaatggtcaacggaacgacagtgattgtgccagtg

SEQ ID NO: 49315 - DNA, 622 bp, Heterodera glycines
gctcatcggactctatctgacggccacctgagtgcaaaaagaacacacgcggagaggcgcgcaaaacggagcgtttgggcgctcattaggagcccgactgatgggcgctggcatcgcgaatgtcagcattggcaagggcattcatacaactctcgaccacacgaagcatgaggcgctggaccgcgggctgaagcaaatcaccgcccaagtggacgggcagctcaagcgcaagaaaatcagcgccacggaacactccatctgtttgtcagagctgaacccggtgggtgactactatgaccaattgcatgactccgatgtggtgattgaagctgtgttcgatgacattggacttatgcacttgatcgtcctcattcttgagaaggtggtgccagaccattgcgtcatcaccgcaaacacttcggcactgcccatccgcgacatcgcatcggacgcacaacgacccgagcgggtcatcggcatgcactatttttctccggtggacaaaatgcaactgttggaaatcattgtttccgaaaagacctccaaggaggcactcgccgtggacgccaaactcggtctggaccataagaagctgattgtcgtggtcaaggatggccctggc

SEQ ID NO: 49316 - DNA, 319 bp, Heterodera glycines
tacaacgggatggtcagcgaatgggaacaggactgcccttaatgcgctgttgtcccagaacaactacttccaccttaaacggactatcaatctgcatccgctcactaattatacgtttggaagcaacgaacctctatcgaagcgagaccattccgtacaggcgcgtttccagcgattgcgcaacgaatacaagaaaacggcgatgcgccgaatcgcggacggactgctgctggcgcacgaggattcgctggctcacgagctgctgcttcatgtcggaaccactttcttgcgattgcctggaggagaactgaaccatggc

SEQ ID NO: 49317 - DNA, 280 bp, Heterodera glycines
gaaatggggcgaagaaattgataaacatcctgcatttgcacgcgatttgaaaccgaccgaagacggacaatattcaatggaaatgcaagcaatacaagcaatgaaatacgacgaggacgacccaacggaatgcgccaatgcgtacaaagaggagggaaatcggcactttgagaagagaaattatcggtgggcgattgatgcgtacacaaagggtatcaaattgcgttggtccgatgttcgtcttaactctgttcttttcgctaatcgttccgctgcccac

SEQ ID NO: 49318 - DNA, 555 bp, Heterodera glycines
atcaaaaaactgactgacaaccaaacgtccacaatgatcaaggcaactgctcgatctgctccggaacgtgaaaaagaaatttccgagctagtccgacgcgccgaattcatcaatgaccccttcgctcatgagtttgggatttcaatcactccggtcatgacggaatttaaaggccgtgtgttgactgccccaaaattgctttacggaggacggaatcgggcaacggcactgcccaaccaaggggtgtgggacatgcgggccaaacagtttcacactggtatagaagtgaaaacgtgggcaatcgcttgttttgcaccgcaacaatccgtcaaagagaacgatctcaggaattttaccgtgcaactccaacgaatctccgctgatgctggcatgccgattcagggtcagccctgtttctgcaaatatgcgcttggagcggaccaagtggagccaatgctcaaatacctcaagcagaatttccccggcctccaactcgtctgcgtcattcttcccggaaagacgccggtttatgccgaagttaaacgcgtgggtgac

SEQ ID NO: 49319 - DNA, 616 bp, Heterodera glycines
  unsure (1)..(616): unsure at all n locations
acgaattgcgaaggcaccagcggagcgagctcgtctgtacttcattatttgctggttccatgccattgtgcaagaacggctccgctatcagccactcgggtgggccaattcgtacgagttcaccgacgcagacttccgagtcgcgtgtgatactctcgattccactgttgacatggtcgcacagaacagggcgaatgttaagccggataaattaccatggctggctctccggactctgctctctctgtgcatttacggaggaaaaatcgacaatgattttgatcaggtgcttctcgatactcttctcgacaaactgttcacatcaaattcatttgacgctgactttattctcattgataacatcggagtgaacgccttgaacatgccagacgaaactaactcaaaggatggcttgatcaactgggttattaacatcaaagccttacaaaagcctaattggattggacttccaaacaacgcagaaaaagtgcttatcgccgaaagagggcaagaatttatacggaagatgatcaaaatgtcngacgatgaacttgcatacgaagcggatgatttggaacgtaacaagcaagcccctacctggatgggtcaattttct

SEQ ID NO: 49320 - DNA, 412 bp, Heterodera glycines
cgacgaataacctgctgctctcatggcggacaatgggtccggaatgttcaaggccgttttcatgtatgatgactcgcccctctcggcgtttccgtccattgtgggccgcccccgtcatctcgacgtcatggtcggcatgggacacaatgactcgcacttgagatactaagtgcactccccgcggggtattctgactctgaaaaacactattgtattcgatatcgtcacccactgggactacatggataacatctggttcctcaccttctacaacgagctgcgtgtcacccccgaggaccacccggtgctgctcacagaggccccgctgatcccggagggcaccagagaaaagatgaccccaatcatgatcgagacgctcaacactccggccatgtactagaccatccaggct

SEQ ID NO: 49321 - DNA, 654 bp, Heterodera glycines
cagaattttccctcattccctgtttttgttatggcttcaactcataatcattgttacattgaaagcctcaggacgaggcagacagcttcgctcaagcaacttctgaacctcaaccagcccctgaacgtttctctggcggttgaacccgtgtggaaattgctgatttttgaccgctactgtcaggacatcatttctccgctgctcagtgtcaaacagttgcgcgaactcggcgtcacactgcacttatcggtcgactcgccgcgtgagattctccccgatgttcccgcagtttattttgtgtcgccaaccgaacaaaatgtgcagacaatttgtgcggatttgaagcgtgccatgtatgacagcttctacttgaacatggtcaggcccatcccacgccctttgcttgaacaattggcggaaagcgcagtggccggtggcgcaacacaacaagtgcagaagttgactgatcagttcctctccttcatttcgcttgaagatgacctcttcatgctcagccgttacacaaaaagcagcccattctctttttacgcaattaatgacccgtcgataaccacccgatcaattgacgcggtggtcgccgacattgccaatggactggtcgccgtctgtgtgacccttggtggtgtgccggtg

SEQ ID NO: 49322 - DNA, 553 bp, Heterodera glycines
caccactgtggtggaatgtctgaaggatgccgacatttccatcaaaaagagggctcttgaactttgctttgcccttatgaaccaaacgaacatcgcgagcatgtccaaggagattataattttcctcgaaactgccgactccgatttcaaagctgagtgttcttctaaaatgtacgttgcgacggagcgcttctccccgagtcttgtttggcatttggacacaatgataaacgtgctgcaattggcagctaaccatgtacctgatgaagttgtcagtgcgatgattcagctcatctcttcccagcaggaactgcagcattacgcaaccgtccaattgtttcatgcctccaaacgggaacacatagtaaatgctcagcccttaatgcaaatcgcattttggagcattggcgaattcggtgatttgcttgtcgctccgggaaatacggaggaggcaaatataaaagtgagcgaggatgaagtggtggaattgttccaacttttgatgcctcatccacggctcactgtgccaacccgtggagtatggactaactgc

SEQ ID NO: 49323 - DNA, 193 bp, Heterodera glycines
ggccggtttcgcgggctatgacacaatccgagcgttgtttccgtccattgcgggccgaacccctcatcaaggcttcatggacagcatgggactcaaggactcgcacgtgtgatattaggcgcagtccaagcgtggtattctgacgctgaagtactcgactgagcaccgcatcgtgaccaactgggacgatatg

SEQ ID NO: 49324 - DNA, 406 bp, Heterodera glycines
gtgcgacgaagaagtcgctgctctcgtggtggacaatgggtccggaatgtgcaaggccggtttcgcgggcgatgacgcgccccgcgcggtgtttccgtccattgtgggccgcccccgtcatcaaggcgtcatggtcggcatgggacagaaggactcccacgtgggagacgaggctcttttcaagcgaggcattctgacgctgaagtacccgactgtgcacggcatcgacaccaactgggacgacatggaaacaatctggcaccacaccttctacaacgagctgcctgtccccccccaaggagcacaccagagctgctccaagaggacccgacggaaccgaatggccaccacaaaaaacgtgacccaaatctcgtatcgagacgttcaatcacgccgggccatgtac

SEQ ID NO: 49325 - DNA, 504 bp, Heterodera glycines
cttcatcgagataattcaaaaattaatcgccaaagaaacacgagcaatgaacaggcttagaagggatcaaaaagaaaaggtccaacagtttgtgtccttaacgcaggcaaacgaacagacggcaattacatgtttgacggcctccaactgggacttggagatggcctgtgacatgttctaccaaaatccgtcatacaccaaccagcaagtgggcgccaccggtggggcggacagtcggaaaattgagcacttgttcaacaaatatgcttgcgatccaaaggacaaatctcagaaaattggacccgatcggatcggtcccaatgggatggttcgtttcttgcgcgacttgaacatcgagccaacgagtcgggcagttatggttttggcgtggaaaatgggtgctcagaaacagtgcgaattcacactgcaggagttccgcgacggaatttccacactgattcccaccggtacggtggaaataaatggtctgcgcaaagctttgct

SEQ ID NO: 49326 - DNA, 610 bp, Heterodera glycines
attcgatagccctaattgttctttgtttgtctactgaatttctttaaaaaacttacgacaaaaaaaaatttaaaaaacgtgttttcccgaacacttggccttgacttttttttaaacgggtgtcgaaaacccgaaaaacgattccattcaaaaaaaaatttttaatgattattccaggtcgactccaaaacggtgaaagcgcaaatttgggacacggcgggccaggagcgctaccgggccatcacttccgcgtactaccggggcgccgtcggtgcactgctcgtctacgacattgccaagcatgtgacctacgagaatgtggagcggtggctgaaaggtgtttgtgtgtgccggacggaaaaaaatggggaaatttacggcggaaatttttggtttaccagaaattttctgtgtgccaaaatccgacattttgaaaaacttggacatggattttctgggtaaaaatcccattccttgtagagacctggacccaggaaaaaaaccaggggcctgttgctcgtctccgggtttagtaaacccgggttaacgattaaacccgggtttcgtaaacccgggttaaaaatttttgaaaataacgttgctcgtcttt

SEQ ID NO: 49327 - DNA, 322 bp, Heterodera glycines
tgctgggcttgacttggaagtctatgctgatgatgtccctacgagacctgaacccagtttgtactacactgtgtgcctcaccacactccaggtcccgggtccggaggctgctgtctctgcatatggagctcttgttcccacgggctccaatgattgatctcttaatactctggatggcgatccgatcctttccaggattgacgtgactctgaatgagtccggccgcgacgcccatctaccggtcattcagaccctttatgaccacctcgatgtgactactaaaactctttaccatcaatcgttggtctttttgctaagtagt

SEQ ID NO: 49328 - DNA, 370 bp, Heterodera glycines
ccattggaaatatgagcgtgactactcctatgacctgaggtattcaaacccgatctacaattactccaggtttaccaggttcattacgctcaccgcaacaggtcaccaacaattgtgggcacttttcccccttctgatgctttcgtcatctctcgcgacaggaattgcgtttcatcgccttgacaagatcgaaggttgggttgaccgaagcacatcacctcctccgtgagattgcgcgcgagtacgtgacacatattggttatttccgacagatctctatgacccgaccggggttactcatgttccactccgcccgatgtatatacttcacgacgacctgcttgaagctgctaaagaacgcggcacccgc

SEQ ID NO: 49329 - DNA, 570 bp, Heterodera glycines
gagaaaatgcagagacttgctaaacgggccaatactggcggacttttaattcctttgtctggtaccgttcagacaatttcgacgaggggcgttcttcgtattccgcactgggagaatcacatccgtttcgacccccgatttggacgcaagcgaccgtgtcaagatgtattggaccgattcgcaaggctgaacaatggtttgtgggtgcgatcgcgacaaggcagaaacaaacaagtttatcagaaggactagatttttcgaaaagtcaatatgcagtgggacacgtgcaccaaaagagaatgtgcaatgcttgacaagcttatgactccgttttggcttcgtcccaagcattacgtcggtgatccaatggagccttatcacacgcgttatggaatcacttcgccacgtgtcgatgatcaaaaacgtcttgtgcgagaaaggcccaaactcctgcttgacgatttgacatctgaccgattctttgaccggatttcacccgctcagtccaaatcagagcttcttttgcaggggcagtcctccatcctgccgaaactacttcaaaaggcgatg

SEQ ID NO: 49330 - DNA, 630 bp, Heterodera glycines
aagaagtgacgccgcggggagagaaagtgcggacgaacggacaaagcgaaggcaatgaacgcggaaaagacagtcttcggcaaatgctccccaaaatttgccaacgttgaaaaagcattcaggcgacactttgcggacggatgggagcgggagggggcgtcgttggccatttactggaagggccaattggtggtggatttgtgcgggggatacgccgacaaagcgtcgctgaagcggtggggcgattatacgcggacggttctgttctcagtgacgaaggcagtcgctgccctcgcggttcaaatgctcatcgaccgtggccacatcgcttattccgacaaaatcagcgtgttctggcccgagttcgcccgcaacggcaaggagaacatcacgctggaggacgtccttctgcaccgggctgggctcgccgctttggatgagacggtgacgatgaaagcggcacgggaccacgtccgaatggcacaaatccttgaagcgcaaacgccaaattggccactcggcacaactcggagtgggtaccatgccgtcacttttggctggctgatcgatcagatcatccgtcgggtggacccgcagaagcgcggcattagtcaatttgtgcgcgaagaa

SEQ ID NO: 49331 - DNA, 193 bp, Heterodera glycines
gactaaagccgatatatctccgcaaaaaaaggagaagaagttgggaagccctatgagagatttaaaaagaccaaaactctgtctcaagatttgcatcggtgagtcgggtgacccgatcactcgtgctgcgaatggattaaaacgattgactggtcagagtccgggtctttcacaggctgagtacactgtgaag

SEQ ID NO: 49332 - DNA, 646 bp, Heterodera glycines
ggaaatatggcatagaaaaatcagtgcagaatctttgtgtcgaatggatgacaaaagtcccgccgcaatttttgctcgagaatttgagcatcgtcaagcgcgcgatgtcgacgagttgcgcaggatattccacaggcacattgaagaggaaagtcgaagtgacgagcagcaaaggcacgagaaaacggcggcgccgatgctaacgacggcaccagcgatggcggcggcacttcccagtgcgcgcattgttcggacgccacacattggcacaaatgtccgcgagaatggcaccgcctcattgtccgccatcactccaatcgctgccgcctttcggtggtgcactccgctggccaacacaccaactatttctgtccatgtcaatcctggtcatttcttcgtccaattgccctcccatccgacattttcgtcgcttgcgctgctcaaccaatatatgctccccgtatacacgcacaatcagccgggcgttggggcaccaggcttggccaagccgtacgatgtcggcgtgctttgcgctgccccggcgtacaacggatgggtccgcgcccatactttgggattccaccaggaccaggaggagatgttggtccgtttcccccaatacggggggttccccccgttggcccgg

SEQ ID NO: 49333 - DNA, 319 bp, Heterodera glycines
ccaatgcaactcgtgcaatacgacgagtgttctgttcaaggtcatcagccaactaagcctcggattgtcgaccaacaccgacgacctgacgctcaaggactgcctggatgcgcacttttcatcaccaacgctcgaggataaatgggattgtccgaagcgcagaagtaaacatccggcgacacggatcacacaaatttgggagatcccgaaggtgctgatcgtccatttgaagagattttcgttgaatgatggacactacgtcaaaaataacgtcgaagtaacgtttgatgtgggcgaaatagacctggcgccctttctc

SEQ ID NO: 49334 - DNA, 598 bp, Heterodera glycines
catctctgtactcggagatgagccaaatgaacagcaaagtgcgcgacggagttgaggccttccgcgtcaacaccgactcggcctggactgacttgatggacgtgcaagtggtcgtgacgccgccgtcgaagccccgtgataaccccttcaactccatcttccgtgccaaacgtcaactgcccggacactgccagtgcgctggcctccaacagccaagctgtccccctggtccgcccggcccgtccggaccgcctggacagcccggacagcctggaggcgcaggacagcccggacagcctggacagcctggccaacccgctcctccttgcccgccccagaacggaaaccccggaagccaaggtcagccaggacagccaggaggccaaggaccgcccggacctcctggcgcgcccggtcagcccggccagcctggaaactctggccagcctggacagcccggagcaccgggacagcccggcaaggacagcggctactgtccgtgcccgccccgctcttccgtgttggcagtcaaaaagaagatggcggcagccaagaaagcataagcgacaagcgcagggagaagagaaccgaaagacaa

SEQ ID NO: 49335 - DNA, 641 bp, Heterodera glycines
gcacgagggttacatttaattaatttttggttcggatggtttctatggtcgctgggagagtgcatcttttgccgcgcgccgcctcttttggcaaatcgtttctttcatcggatgcgactaaaaagcctgataagacttcctttggcaatttgaacgactctgatcggattttcactaatctttacggtcgacatgactatcgcctcaaaggcgctttggcgaggggcgattggttcaaaacaaaggatattattctgaagggtcccaaatggattctcggcgaaattagcacttccgggctgcgcgggcgaggcggggccggctttcccagcggaatgaagtggggcttcatgggtaaaccgttcgacggtcggcccaaatatttggtggtaatgcagacgagggcgagcccggcacatgcaaagatagagagataatgagacacgaccctcacaaattgatcgaaggttgtcttatcgcgggcgttgcaatgggcgcgagagccgcttacatttacatccgaggcgaattttacaacgaggcgtgcattctgcaagaatcaattcacgaggcttacaaagcgggttacattggaaaggactgtcttggcaccggctacaacttcgacattttcgtccatc

SEQ ID NO: 49336 - DNA, 654 bp, Heterodera glycines
gtttttttgcgcacatataacattggtaggtaacactattaacaacggacaatgtctctgctgaatggaaagaatgccactggccattgtcaatctgacggcgattcatcgatcgctatgaagcggggcgccgaagaattcgacttcggtgggagcgaagccgacggggcaattggccaaggtggaaacgcaccgccggcagccaaatttcaaagggttcagcagttctcgtgctatgccgtttatagcatatcggcccagcccaaatcgaacgccattcgagggcaaattcaggattttaaacatgaattgcattacgttttgacgaccattttcgatgaaaaggctgctgaaaacttgaaaagtctcagcttggtccaactcatcaaaaaggctattattccccaattccgcaactttttacgcacaaaaagtgtccaacttgaaaaactctttggcgtcttaaccgaactgtcctcgaactcgtcggttttttctctgtcctcctcctgccttttgtatttgttggctcgcgaccaaaagagtattccgccctctgaaaattgttttcgactcatttctgaacttctccggcaagactctcagcgtgccaaaatggacgaggaacacaaaaagcacacggaaacgatttgg

SEQ ID NO: 49337 - DNA, 467 bp, Heterodera glycines
tagaccgctaaccatcacacaacccaaaccgcttgttgagttcgccaacaaaccgatggtggtccaccaaatcgaggcattggccgccgtcggcgtggacaccgtcgttttggcagtcaccgctcgcattgaggaccttttggccggagaaatgcgaaaggaggagcaacgcattggcatcaggattgttttttctgtagaggatgagccgatgggcaccgccggtcctttggctttggccagcgatttgttgggcgatacggagccctttttttgtgcttaactcggacgtcatctgcacatttccgttcgccgaaatgatgcactatcacagaaaacatgggcgacagggcacaattgcagtcacaaaagttgacgagccgagtaaatacggcgttgtcgtcttcgaagagaccaacggacgcattgaccgttttgtggaaaagccccaggaatatgtgggcaac

SEQ ID NO: 49338 - DNA, 637 bp, Heterodera glycines
cggaagcgccacctgatgatggccggcggatttggcggatttgtggcggcggacgcggaaggagcaggcaaaaactttgtagttcccgagaaaagcgagaagggcgcacagcagggaatgccgggacagacgagcaaaccgcgaggactgagcaaagagcagcaggaggaggccaaacgcaattacatgtccattgtgaaccgaccggtggacgtgtcgaacatgttgcccaatgacatcaaggcaaatatcaagcagttgcacgcgcgcattgtcaaattggagggtgaaaagtacgacttggagaagcgaaaagatcgccaggaatacgatctgaaagagctcagcgagcgtcagaagcagcacgcgcgcgccaaggccctggagacgggcgcggaccccaccgaagtggaatcgtccggcaatttcccgccaaaggtccgcgtggcttcaagattcgaccgtcagacggacctccgcggatatggtcagagacgcgacttgttcgaacacccggcagaaacaccggagccaaaaattgtgcacggcagcggacgaccgccaccggaatggggccgcaaagaatttgaggaattggagaacatccggaagaatttagaaccaccaaagtacgtgg

SEQ ID NO: 49339 - DNA, 367 bp, Heterodera glycines
gtgcgacgaagaagtggatgctctcgtggggggaaatgggtccggaatgagcaaggccggattcgcgggcgatgacgcgccccgggcggagagaccgacaattgggggacgaccccgaaataagggcgtcatggtcggaatgggacagaaggactcgtacgtgggagttgaggcggagtggaagcggggtagtctgaggctgaagaaatcgaacgagcacgggagcgagacaaacagggacgacagggagaagatctggcagcacaccggcaacaacgaggggggagtcgcccccgaggagcaaccggagcagctcaaagagggccgggggaagccgaaggcgaagagagaaaagaggacccaaatg

SEQ ID NO: 49340 - DNA, 642 bp, Heterodera glycines
gttcgttcaaacagtgcccggtattcgttggtcagaaaaggcgagtcgtaatcttcaacgccaaccatttgctgaaataatggaagtttggcatttatttccgaaacaatgacattatggaagaacacaatttgatttgattaaacttacgctccacattggtggggcgcattgatcgatcgtcagaatgcctcggaaagccttttgtttgccggttaaactgtgccgataccacgtttctgggttattggcggaaaggacatgattgacgggcacgtggatgagagtgcaaagacagcgagtgccatctttgagcctgaactattgaaagtttgcattcagaatatcaaagtggaagaacggaccactgaagagtcatgccaattttgcgaccaatcagaccaattcgcttggaagcttcaaacgaatattgattttgggtacaatccggcggattcgaaacgccgggaatcaaatggaacgtttcgtagggggagagagacaatttgcgtgaatgtacaaaagaatcgctgctcaattcctgctcgatcagtgccctgaaaccgccgaaacaattagagagttaagcccgtagaacagaccgatccggcttataaagctggtcatgaatggggttgaact

SEQ ID NO: 49341 - DNA, 633 bp, Heterodera glycines
gttcaattgctatttttgaagggttaacattttatcaattgcgcctttgtgaagcagttgatggcatctcttacaaatatgatcacaaactcgtacattgtgaacacgccgagtggccaatacacaattcagcaacagcccgggatgacccttcagcaccaaccgcaacagatcattcaccacgtcattccgcagcaccgacagcaaagttcaatgcacggcatccaacaacaccacagcgagaggccactcgtgcggggaaagacgtcgccctatgggtttttcgtcaaaatgtgttatgaggaacacaagaagaagtacccaaacgaatgtgttcaggtcaccgaaatctccaagaaatgctcccagaaatggaagacaatgaccgacgacgagaagaagcgtttctttgagttggcacaaaaggacgccgagcggtaccaagcggaagtggcggcgtatgggggcgaagacgttttgaagcgaaaaaaacgggccaaaaaggacccaaatgcgcccaaaagagcgctgtcggccttcttctttttctctaatgagaagcgtcaggaagtgtccggagagcatcccgaatggaaagtcgggcaaattgcgcaggaactcggcgttcgttgg

SEQ ID NO: 49342 - DNA, 565 bp, Heterodera glycines
cggcactcaccgatcgcccgtttttgcgactattcatcaacaaacggccaaattcatcagcaaattctcagaggcaaaacggcgtttcttcaatgaacgaattgacactgagccgtggcagccgaatcgaattccctacgtttaccagagaattgtcgacaaattccgactaagcggtgcattgagtgacgtggaggaaaatgtggaggatgagcacgaggacgatgatgacgagagagaagggaaccgcgactatttggtccttggcggcagcaaacgcttcatcgttgtcggctctgcgacttcgcttctccgcgtgttggcccagtacagcgacttgctttttctgttcccccaatgttccatggaactgactatggacattgtccaaattttgaaggcgtttaacagtcgcacttgccaattgattttgggcgcgggtgcgcgtcaattggtcggactgaaaatgatcagtgtgaagcatttggcattggcattgcgttcgctgcaattcatcgcccaattcatcccagcacttcgccaaacatttctgaatcaattgcca

SEQ ID NO: 49343 - DNA, 637 bp, Heterodera glycines
atttcaaatttaaatatatttattgagcaaaccacaggcacattagtgctcttatgtggcgcataaaaaaaaatcaaaataaataatgtcaaaaaatacaacaatatgaaatgtaaagtaaaataaaataaaatggaatgaatgtcaatgcaaatgtcaataaatcccttagaactcatacatagcttttagcaatgccctgaattgatttgccttatctgcctgaattggaacaattggtaatttgtttcaattcttggctatacggttaaaaaaattattcttactttttgtggttgtgcgccgcattctcaaaagtaatggcctacgagtgggtcgatcagaaaaagtaaaaagtttactagcatcaagactcgtaaaacccttcataattttaaaagcggtagttaagtcagcaatatttcttcgcttggttaattctataagctgacaaatttcaagtctttctgaatatgatctatgtaaaagtccgcattttttaaaggcttttctcgtgaaaaatttctggactttttctattctttctatatctttttttaagttagggttccaaatttcaacagcatattctaattgaggtctgacataagtcttatacattcttataatagttttt

SEQ ID NO: 49344 - DNA, 660 bp, Heterodera glycines
cttcttctcatcgccttcgccttcaaaacttagaagcaccaatcccaaccagaaaaaatgtgcgacgaagaagttgctgctctcgtggtggacaatgggtccggaatgtgcaaggccggtttcgcgggcgatgacgcgccccgcgcggtgtttccgtccattgtgggccgcccccgtcatcagggcgtcatggtcggcatgggacagaaggactcgtacgtgggagacgaggcgcagtccaagcgtggtattctgacgctgaagtacccgattgagcacggcatcgtcaccaactgggacgacatggagaagatctggcaccacaccttctacaacgagctgcgtgtcgcccccgaggagcacccggtgctgctcacagaggccccgctgaacccgaaggccaacagagaaaagatgacccaaatcatgttcgagacgttcaacacgccggccatgtacgtggccatccaggccgtgctgtccctgtacgcctccggcgatggtgtcacccacaccgtgcccatctacgagggttacgccctgccccacgccatcctccgtttggacttggccggccgtgacctcactgactacctgatgaagatcctcactgagcgtggttactccttcgtgaccaccgccgagcgtgagatcgtccgt

SEQ ID NO: 49345 - DNA, 582 bp, Heterodera glycines
gtgcgacgaaaaagttgctgctctcgaggtggacaatgggtccggaatgtgcaaggccggtttctcgggcgatgacacgccccgcgcggtgtttccgtccattgtgggccgcccccgtcatcacggcgtcatggtcggcatgggacagaacgactcgtacgtgggagacgaggcgcactccaagtatgttattctgacgctgaagtacccgattgagcacggcatcttcaccgactgggacgacatggagaagatctggcaccacaccttctacaacgagctgcatgtcgccccccaggagcacccggtgctgctcacagaggcccccctgaacccgaaggccaacagagaaaagatgaccctgatcatgttcgagacgttcaacacgccggccatgtacatggccatccaagccgtgctgtccctgtacacctccggccataccaccagactcatgttggactccggcgatggagtcacccacaccgtgaccatctacgaaggttacgccctgacccacgccatcctccgtttggacttgaacagccgtgacctcactgaatacctgatgaagattctcac

SEQ ID NO: 49346 - DNA, 331 bp, Heterodera glycines
gacggacgatgcacgcctgaaatttttggtgtgcgaatcgaacatcggcaccaaaaatatggactaccaaatggagcattatgtgtggaagcatctatcagacggcattcacatcatccacattcacaaaaccagttataaactgatgctcgccgcccgtgccatcgctgccattgaaaatccgtccgatgtttttgttgtctctactcatcccaactcccaacgcgatgtgctccagttcgccgctcacatctctgccactccaatcgttggccgttttacgcccggctctttaaccgaccacatctaaaacaatttcaaagaaccacga

SEQ ID NO: 49347 - DNA, 650 bp, Heterodera glycines
ttgagatgttttttggcgaagagattactaaaattccgcgggaagtcggcaaagaggacgtgtgtaaagcaatttctcatcaaattgaggccattgacatagatcagtgcaatttgaatatgtatttgaagcctgacacgggagtgatttcacttgaccaattccaagcgatgggttccaaaagattgacaatgctaaggaaactcgaaatgcttaaagaaaaatttggaaatgccaattcgcaggatgagtacaaaaaggcatttcgagaggacatcggtgctctgatgccattggtaaccaatttatgcgtaaatgccggactcaatgaagcaagaagagaggaccgcatttcgcattttatacttcgtcttgctttttgccatattccagaacaatccgattggtttgttcggttggaaaccgaactttttcgcatgcgctttcaaaacgagacgaaaaaaaatatggcactttttgtggcatcgatcggcatacaattgaaccaagttgacacttctgagagagagcagttagttgacgaactttgccaagcgctgtcactgagtgctgaagagatggaaggggcagatttgtacaaagttgatttcgttgatgttttggaattgctttcctcacatcgaattctg

SEQ ID NO: 49348 - DNA, 616 bp, Heterodera glycines
gctgtccattatgatgagtgcgaaattttttacgcatttgattaattcggtatcgggacgacccatctccacttcatgctgcagaaaataattgcgtgaattgtggaaattggacaaacggaacccttttcaagaaattcccgaagcatgggtcacttccctggacgatattgagacgaaaaattgtggactcattcaactccatccagacattttccgcgtcaaaccgggcttggatttgcttcatcgaaacatcacatggcaatccaattaccggaatttgacgctcctcaaaatgttgtcccacgacgaaatgccgggcggtgggcggaagccgtggtctcagaaaaagatgggccgtcaccatgcaggaagcattccctcaccgcatttcattcgcggcgggtttgcgcacggcgttcgcggcccgtgcacccaattttacatgctgcccaacactgtccgaattcacgggctccgcaccgcgttgaccctcatacatgcgcaggacgacttggtcattgtggacagctacgacacgctgaacagcgcggaaccacaatttttgaacgatttggccgacgcacgcaattgggggctattccgtgctggttgc

SEQ ID NO: 49349 - DNA, 337 bp, Heterodera glycines
gccctccttcatcagtatggagtcggtcggcatccacgaatccacctacaactctatcatgaagtgcgacatcgacatccggaacgacctgtacgacaacaatgtgctgtccggcggcaccaccatgtacccaggcattgctgaccgcatgcaaaatgagatgaccgcgctgggcccgtccaccatggagaacccaatcatcgctccctcggagcgcaagtactacctctggatcagaggctccatactcacctccctgtgaaccttccaacagatgtggatcagcaagcaagagtactactagtccggaccgtccattgcccaccgctagtgcttc

SEQ ID NO: 49350 - DNA, 629 bp, Heterodera glycines
gttcattcgttcatttgtccgtcattttctttccatccattcaaagagtcattctcccatcacccaaataaataattaattaattaattgactgctcgttgattctcttaattgaccacaatgtttctgctaattgctctactgctcgtcgtttttcctctcttttgcggtgccatccccgcgctgcccaactcagccgcggcactaactcaacagcagcagcgcatgatgcaaattgatgctttttctgcggcggatgacgcacagcgaaaggacagcgacgccgcgggcggtgcggcgcccttcgctttcgaaccctccgagcaaaaggcattcgtactgaaagggttgcgtcgcgtgaagaatccgtcgccgccggcggtcgttccgaaactgacggcagatgccaaaatcatttcattgaacgcggacgacgacgagtggcgagaaatgggacaacaacagaaacaacagcacttccaacagatcggcgcccaaatgcagaacgaagtggacttctgcaaaatgcgctccggcaacatgtggcgcgaggtcaaccgcacccaggcctactccaaggtgtcgcacgacagccgtcacaagcgtcaggcaggcggttgctgtggctg

SEQ ID NO: 49351 - DNA, 579 bp, Heterodera glycines
tactttcttctttcgtccattgactaagccatctttggtcgaagcaataaaaaggcaggcgactcttttgatggataaaggcgcagtgattacgaaattggaaagcctcggctaccgcgacttgccctattcgcgattggacagattcgcgaagaaaaacgtccattatgcaaactccattctgatgaattcgtcgatgtcagtgaaaacaatgaatgatgcgagaacattgttttcgaatgacaaagaattgctttggtttggcatcgtcaacacaaatagtttgcctgatacgcccgacaaatgcgacttggagcagtttctgcaaccgcccgcttatcggcagtcagtggaggaattgcgcaagaatcagaaattgccattctttacgagtttcaaaatttacaagaggacagaaactgaataccacaatatacccaagtcgtacttcgtggcaccacacaaacgttgaacggacgacggaacgcggaaaacgactcgtttttggagaatcgctttgtgttgttcgatttgtttttgatcatttcaagatgactgtattttatttaaaaatattct

SEQ ID NO: 49352 - DNA, 217 bp, Heterodera glycines
gggacgtcggccctctcgtggctatcgctacattatgaacaagccttatcccaagtgctcgcattttgtcccggggtccctgaccccaaaattcgcatgtttgactcggggaagaaacacgacaactgttgacgaggctccatgctgtgtgcacatgatatcgaatgaaagggaacatttgacgactgaggctctcgaagctgatcgcaatttatgc

SEQ ID NO: 49353 - DNA, 556 bp, Heterodera glycines
atttgatagtgcagtcggagggcgccagccataattacgacaccacttttgtacaaaagttattcagcgaagagggcaagggagagttcagcactcggatcaacattcttggccaccctcaacagggaggcaagccaactccattcgaccgcaacatgggcacaaagttaggcgcccgtgcgttgaaccatcttatcacacagatcaacgctaacttcgacaaaactacggaaagatgcaacgcggacaaacccgatactgccactttgctcggtctgatcggtcgtgaagtcgtcttctctccgctggaagagctcgccgctgagaccgattttgagcatcgtttgcccctcaaacaatggtggctgaaattccgtcctctcctgcgcattttggcaaagcatcgcgcttcttacgtccaagaagcaacttaaaagccagcggagagaatgagaaggaagcgaattagctgagatttgctgagcttttggacattaattaggaattatccggtaacgaatgaaagtgcttgtgcatttatcaggaaattaatctc

SEQ ID NO: 49354 - DNA, 634 bp, Heterodera glycines
gacactttcactcccttaccaatttgattgtttttgaaaaatcttcatccatccacccattcgtcgcattcttcatccaattcattcattcatcgtgaaaaacaaaatgaccaccggttcaccgcaacagtcgccacaagcgcagcaaacggaggccacggcacagcagcagacggcggcggcggctgccaacgccggcagcgcgggcggaacgccaaagagtcagacgaagaaagcggcgaccaaagcgcccaaggcacccaaagcgaaggcgccaaaggcggccaagaaagcgcacgcaccggccaaccatccgccctacattcatatgatcaagaaggcgcttggcgagttgaaggagaagaagggggccagcaaaggtgccattctgaagtacatcatgtccaactttgacgtcggcggcaaccaacttcgcgccaatatgcagctgaagcaggcactgaagcggggcgtttcgtccggcgacctgaaacaggtcagaggcatcggcgcgtccggctccttcaaattgggcgacggcacgcagccaacgttggccaaggcgtcgccagcgaagaagaaaagtccgatcaaaaaggcgaagaaagcggcgcctccagcgcccgcggcggtg

SEQ ID NO: 49355 - DNA, 217 bp, Heterodera glycines
gtgcgacgaataagttgctgcactcggggtggacaatgggaccggaatgcgcaatgacggttgcgcgggcgatgacgcgccccgcgcggaggttccgtccattgggggccgcccccgacatcacggcgtcatgggcggcatgggacagaaggactcgcacgcgggatactatgcggagcccaagggtgacattctgacgctgcaatagccgattgat

SEQ ID NO: 49356 - DNA, 352 bp, Heterodera glycines
gagcgacgaataagttgctgctctcgtgggggacaatgggtccggaatgtgcaagggcggcttcacgggctatgaagccccccaagtggggtatccgcccgttgagggccacccccgtcatgagggcgccatgggacgcatgggacagaaggtctttttcttgggacactatgatcaaacccaggggggaagtcagacactgaaatgccctatagaacaccgtttccatgcctgctgggactacgtggagaagaactggcactgcacctgctacgacgagctgcgtgtatgcccccatgaatacccgagagtggctgaaagaggacccgcggaaccggaagggcgacagaga

SEQ ID NO: 49357 - DNA, 635 bp, Heterodera glycines
attatactcatcagaaactctgaatgactcataaaagccgattttggtgtgtgtattttagcgtttgtgcagaatttttataattttgtttcacctttggtttgccctaattttctgctcaagcgatgagaatcaagaaaaagtttgcgagtggcactgcccgggtattcgtctcgcggaagaaggcgctgaagaagttgcagttgaatttgagggatttccgtcggctgtgcattttgaagggcatttacccgcgcgagccgagcagtgcgaagagggcgaacaaagggggcagcagcgagcacaaaatcttctaccacctcaaggacatcaactttttggcccaggaaccgttactcgaaaagttcagggagtacaaagcctttctgaagaaagtcacccgggcacgagccaagcgtgagcatttgaagttggagggactgctccgtgccaagcccaccttcagctatgaccatttggtgcgcgaaaggtatccgacttttgcgtccgctttgcgcgacttggacgacgcgctgtgcctttgttttgccttctccgcactgacacagtcaaaaattgcgcggccgcgaacaattggccaatgccggcgggcggtcaccgaattcatgcatttt

SEQ ID NO: 49358 - DNA, 625 bp, Heterodera glycines
gatgcacatttggccagtcagaaacccccgcccgaccgccgaaaaattaacggccaatttccctctcctctgtgggcaacgagtgttggacgcactcttcccaagggtccagggcggcacaacggcaattcctggtgcctttggctgcggcaaaactgtcatttcgcagacggtgtccaaatattccaactccgatgccattatatactggggctgaggcaaacgtggcaacaaaatgtccgaaatgttgcgcgactttcccgaactgacgatggaaatggatggagtgaccacatccatcatggagaggacggcgctggtggacaacacttctaatatgcccgtggcagcacgtgaagcatccatatacacggcaattactctggacgaatacttccgcaacatggatctgaacgtggccatgatggccgactcgacctcccgatgggacgaggcgcttcttgagaattcggagcgtgtcagtgaaatgccagatgactcgaaggtaccccgcctatttggccgaacagctcgcttactactacaaaagggcgctaaaaatgagatgatgtgtgtcacctgaacggaaagggtccgacataatgtcagcgcagtgacaccccct

SEQ ID NO: 49359 - DNA, 415 bp, Heterodera glycines
  unsure (1)..(415): unsure at all n locations
tgatcagccgaagatgccggaaagcgaaaacgacttcgatgaggaggcgccctacgccaccatggagaccttagtggcgggcggcggcgcggcgcccaaccgcgtcaggcgctggacgttggcacagctgcgccagacggacggcatcatcccgtcccatgtcgggtggaaccagggagactcgcagaagttgatgaccaactttggtacgccgcgtaacaccaccgcctgagtcaatgtggagaatcgggccgagattccggaggacattttgctgataagccacggggaggtgcgtctgctgtccggtaccaaccggctcgcctcccataagggctgtgtttctatcggtaccgtacgtgatgtgcgacgctgaggagtgaatgtgaactttgtgccgngcgacttgaagccg

SEQ ID NO: 49360 - DNA, 640 bp, Heterodera glycines
gccagatgtggcaaagagaatttttgatttgggattaaaaagccacggcagtgacccggactatgctttggcttacgtggagtttttgtcgcatttaaatgaggacaacaacactcgcgttgtgttcgaacgcttgctaaattcggagaatgcactgcccccggaaaaatctttagaaatttgggacaaatatttggaatttgaatcgcaggttggcgacttgacaagtgttttgaaggtggaccagcgaatgaaaactgcttgtctcgagggggaggaccgacaagccctttggctgatcgatcgctataaatttctaaatttggctccgtgtaccactgatcagctgaagttgatgggttattcaccacagaaatttgccagaccgtcggcttctgtcccttttcaaaatggggctttcccagtttcttcggcctctgttcagccaaacgtgcttcaaagtggacgttcccagcagttcctcacatctgcagctgcattgaacattgagctcggggggtacgctcgggccgacacttcgcaaatgcttccattcaaaccgaagcttcccccggcttcctatcacccggtgccccgggggtgtttttcctcccaccgccttttgtctccccattgcttc

SEQ ID NO: 49361 - DNA, 649 bp, Heterodera glycines
acgtgctttggacaccctgaactttgacctgaccctgaacaagccaattcgcattatgtggccgcaacgtgacccaagcattcctggctcgggcgtggggaacctcttcatcaacaacttggacaaggaaatccacacgacagccatctacgacacttttaccatggtaggaagcattctgagctgcaagagtgccactgacatggagggaggaagcaaaggggatgggatcatccgttaagatactgaggaaacggcgaacagagcaattgctaaagtgaacgggatgcttatggatgggaaaaaactgatagatggaaaatatgtgccacgaactgctcgagagaagcaacatggtgacccgacaagtcactacaacaaagcgtatgagaaaaattttgacgaggcaatggagtctaacaagctgatcgaactgtactcacaacatggcgaaatcatcagtgctaaagtgatgaaggatgacagcggaaaatccaaggggctcagctgtgtcgcctaacaggaccatgaaagtgctgcgacggcggaggagaagatgaacgaaggttcagagcccggaagagagaaaggctagccaaagttacggtgtgccgagcgcaaaaaaaaacaagcccaggctcagctgaag

SEQ ID NO: 49362 - DNA, 499 bp, Heterodera glycines
  unsure (1)..(499): unsure at all n locations
ccccatctcaccttcctttgtaaatattccctccctttgaccacaatgaatgtgtgcaatttatggttccggcgccattgtaaaaggccatcataataatgcgacgggacaaaaggggcggcgaaacgcgtgccgaaggggcgggggggggcgatggtcccgcggcacacctcgggattaccccacgcttcttacctttacccccaaaatgtggtgggccttttgcgggcgaagggactccctggggggttnnnnntnntttnttnannactacctctnctttttanaaaatttnnncnccntcntaatacacattttccaagtcatgtctggcaccatcttccacaacattttgttaacgtactctgtggaggacgctaagaaacacgcggcggactctttcgaccagctgaaggaggcggagaagaagcaaaaggaagcgtatgccaaggaggagcgcaataagttctaggaggaagacaaaaccggaaggaagaag

SEQ ID NO: 49363 - DNA, 553 bp, Heterodera glycines
gtgcgacgaagaagttgctgctctcgtggtggacaatgggtccggaatgtgcaaggccggtttcgcgggcgatgacgcgccccgcgcggagtttccgtccattgtgggccgcccccgtcatcatggcgtcatggtcggcatgggacaaaaagactcgcacgtgagatatgaggcgcactgccagagtggtattctgacgctgaagtacccgattgagcacggcatcctcaccaactgggactacatggagaatatctggcaccacaccttctacgacgagctgcgtgtcgcccccgaagagcacccggtgctgctcacagaggccccgctgaacccgaaagccaacagagaaaagatgacccaaatcatgttctagacgttcaacacgccggacatgtacgtggccatccatggcgtgctgtccctgtactcctccggacgtaccaccggtctcgtgttggactccggtgatggagtcacccacaccgtggccatctacgatggatacgccctgccccacaccatcctccgtgtggacttgagcggtcgagac

SEQ ID NO: 49364 - DNA, 334 bp, Heterodera glycines
tgatcaggcgatcatgtcggatagtcaagacgacttcaatgacgaggcgccccacgcctccatggagaccaaagtggggggaggtgtgtcggatccaagccggggaccccgctggacgtcgttcccgctgtttccgacggactggatcttcccggttaaagccgggtggagctacggagactcattgaagtttatgaccgactttgtcacggcgcgatccaccaccacctgatgcgaagtggctaatctggccgagatcaccgaggacaatttgctgcgaaccgcttggcatgtgcgcctgcagtccgggagcgacaggattgccaggggactg

SEQ ID NO: 49365 - DNA, 238 bp, Heterodera glycines
gaacagttacgaggtgcgcaaattgggggacaaagtgcaggggtacgtgatgaacttcacggaaacggagcaaaaggtgcgggaggcgacgaacgaggacccgtggggaccgttgtgtttgcaaatgcaggaaatcgccagcttcacattccattacgaactttacacagaagttatgggaatgctatggaagcgaatgtttcaggagaataaattggcatggcgacgcgtctacaaa

SEQ ID NO: 49366 - DNA, 328 bp, Heterodera glycines
cacagcaatgaattattatgccggaagtcgccttgtgggcgtgtgggcgccgttgctcgtcgcttctgtgctatgtatcgcaattggaacaaccatctccatgatttacgggattcggcatgagcagccgcaaatgttgtggccacaaatttactttctgaaggtggagatctgcttactaatggcgggcgcagtcttctcaatttcgtgcatgtgcatgggaattgaagcgaccaatttgatcttttcgcattttatcagtgtgccgcagatggagctcaactttggccccatttggcccttcaaattggccattgcttgccttttc

SEQ ID NO: 49367 - DNA, 250 bp, Heterodera glycines
aaaggagttgcgtgaattgaggaaattggaccaacggaacccttttcgagaaattcccgaggcatgggtcacttctctggatgatgttgagcacaaaaattgtggactcattcaactccatccggacattttccgtgtcacaccgcgcctggagttgtttcttttcaacagcacatggcaatcccagtaccggaatttgaggctcctcaaaatgttgttccgcgccgaaatgccgggcggtgggcgaaag

SEQ ID NO: 49368 - DNA, 619 bp, Heterodera glycines
ttaattaagtgctaatgagacggattaattgattggcagtgagctctgctgaaattgggttttcattttgacttccgtcgttcgacatcgtggggaattgtccatccacgagaagtatcggtacgatctcagccgtgcccagctgaaggcttcttcgcggacttccgctctgcttgccggcttcgccatgatcgctctcgtcgagctgcagtaccaagagtcgacccccaagccgttgctgatcatgctcggcgtggtcacttctctgctcgtctccgtccacctgctcgctctgatgatgtccacctgtctgttgccgtacatcgaggcaaacggatgcactcaagactcccctcacataaaactgcgcttttacatcgaactttcctggctgttttccacgtgcattggccttcttctctttctgttggaaatcggtgtcatttttttcgtcaaattcaattcaattggctacacttttgccgcttacattacgacgggaatgttggttcccgtggtcattgtgttcatcatcatttcttatttgattcatcgcaatcgattcacacattccctcgatcgagtgaacgaaaaagtggccgacttgcagaagtacctt

SEQ ID NO: 49369 - DNA, 657 bp, Heterodera glycines
ctcggggagcaaaagtcgaaatggcacgacgagggggaaaagattgaggctggttccattgtttacgagtgccgtggggcgaaaatggtgccaatcggatgtttggacgaatttggccaacaaattcgacttaatgagacgaccgtggcgaagggccttctgatgcgatgctcactttcgcgttgggcgaccgatttgcaattgaaaatcattggctgtgtgccgaagggaaaagcgaacgaaaccattttggtaggagaaatggacagagaaagagagtcagacgtggtgggaatgcgcggcggagggaacgaccgtcagagcacggcttggcggatgtgtggacgagccgagtcggagccgacttcgcatcggcgaaagcgtcgaccgaggacacaccactttcgaatgccaatccaagggggccgatgcggctgaaatggtcgcggttggctgtgtgacgaacggcggagagcatcgacgaattggccaccaatggcaggacggcgattttctcttttactgcaaaaggaaagccgcgggactttgcgagaagagctgtttgggctgtttgctgcagggccgccgtttgtacgacggcgaccgtttcgccacgggcgcaccgttttcaatgcgaaatcggccaaagcggcacgc

SEQ ID NO: 49370 - DNA, 545 bp, Heterodera glycines
gacgccagtgacaaactgagcaagttgatgttccgcatcggctgcttctctttggtttacgttcttccgatggccgtcggcattttctgcgcgttttatcagactgaaaacattggccattggctgaccaattggtattccacgcgctgtctgcacgttctgcggagtgcctttggctttacccatccgcgcgcccaatgccccgtcggcgacggcgtgcagctgagcagacagcctgaccccgtgctgttcttcctcaagtacttgtcccacttttccattggcatcgcatgcgtggtgtggacactgaacggcaaaacagtggccagctacggcgactttttggcgcgacttttctcttcgcgcggtcaccgccggggaaggccaattcgggtgccaactcggccacactgacggaagcgaaaacggacggcaaacagtgccctcttttgtgcagtcaaatcggtcgcccattggccgctttcctccaatttttgacgttgacaaatcccagcaatcgctccgttctttttgccgttttgcaa

SEQ ID NO: 49371 - DNA, 598 bp, Heterodera glycines
aggtcctaccaccaacccagtgggtattccattcatggtggacaatgacaggaaaatttaacgcagtctacgacatttattcgaggctgctcaaagatcgcatcttttgcatcatgcaaccccattgatggactttgttgctgtctcagcgatcacacatctgctaaatctgcaaaacgaaagtggcaaatcttctatttacatgtacatcaactgtacatctggcaatgtgactactggtctcagcatttaccacacattgcgtcaaatgtcggtccctgtcgcaacttgatgcattgatcagacaagttcaatgcccactcttttgttgacaaaaccgtgccaaaggaatgagcgcttacttgctcaatgctcgcattatggtccatcattggagcggaggtgcttacagcactaaagcggaattgtgatcggagcccacgatatcaacctagatggaaaacggctcaaagagatctatgcaatgcacgcaggacagacagaggagactattctaccagccttggacatggatcgtttcctcagcgcactgcaagcccaacaagttcggttgttcgaccggtacgggacgcgttcg

SEQ ID NO: 49372 - DNA, 528 bp, Heterodera glycines
gaagaaagcaaaccatgcccaacaagtaaaaaaaattgttgtccataaaattggcagacagaaaaacggatgccagaggaaagtgctcaagaaaaaggagcccaagcttttgctactagtgcccagtgttcaaatcaagaacaaaaacaagccgaaaaaagttcagttgcccgaatcgatttcccccggaaccgttctgatcatattggctggccgtcaccgtgggaagctcgttatctttataaagcaattgccaaaatcgggtcttcttcttgacacaggcccactgaagttgaacgcgacaccgttgcgtcgcatcgcacaagctttagtcctaccgaccaaaacgaaactggacatttcgaccattaatgtgccggaacatttggacgacacatattttaaaggacaaagtggcaaagtggcggacacatcgaacggtgagatttttgctgagggagcaaatcagcagtacgctgtgaccgaccagcgcaagggagaccagaaaactgttgacatccaagttat

SEQ ID NO: 49373 - DNA, 565 bp, Heterodera glycines
ggacgccgccatgcagtccaaacaaatgggcaatcgggtgaacaaattcttctccatggacgggcggatcatcttctatgtgcttcaactggtccttcgcgagtacaaattgcacagttacactcttagcaatgactgctattttttcctgggcgagcacaaggaggacgtttcctacactttcatccccctacttcagaatggctccaacatggacagacggaggctgactttggattgcatgaaggacgcctttttgccgctgcgtctgctggacatacttatgctggtgatcaattacattgagatggcccgtgtcaccggctgtgcgctgaatttcctcttctcccgtggacaacaatgcaaaattttgtacatgctgatgagaaacactctatagcactttttggtccttcccgactccaaaatgggcgatggctccgactgcgacgacgtccgctacgacggagcgactgtcattgacccattgcgcgtcttctactaaagaccctgcgccacgctggacttcacctctttgtacccggacattatgatcgcccacaac

SEQ ID NO: 49374 - DNA, 536 bp, Heterodera glycines
attacccctacaaacaggagatttcattggcggttacgctggccatggcaatttgtctgatcagttttgtgtaccacagcacttgggtcacttctgaggcgtacagcagtccttccattgtcctttccgcgcgttcgggcgatggcggacgcataattttcgacgatttccgcgaggcttattactggttacgaaaaaacacgcccgatgatgcgaaagtgatgtcctggtgggattatggctaccgaatttcgggaatggccaaccgaacgacaatcgtggacaacaatacgtggaacaacacacacctttcgcgtgtaggacaagcgatggcatcgaatgaatcgcatgcatacgaaataatgcacgaattggacgtcgactatgtgctggtcctttttggagggataacccgctattcatctgacgacattcaacaattcctgtggatggtccgaatcggcggttccacaccggaggggggaccattttcgaaatgattctaccccaagaatggagagtatcccattgacagg

SEQ ID NO: 49375 - DNA, 599 bp, Heterodera glycines
gtccaattaagattttgtccagcattgataatggttaatctaaagctttttgtcgactcttacgaagttgagtatccgacgttagtccgcgagattttagctgacgcgcaaaaaaaggcggtgatttcggctaccgtcaccccatttggcaaatgtgcgctgatttgtggaaattccatttacgtttggtcttacagttcaaaggagtcggcaattccgcacgccacgcgaatgaatttgcccgcgagcggactcaaatattcaacgcaactcatcagcatcttttcgagaggccagtcccacaagtcgggcgtgtgtttgttggctgtttccccggaagggaatgtccgcttttggagcgaacttgggaagccgtacagggacgagagctgtttgctgaacaacgaagtggcgcactccgtgcagttgatttccatcaatggcactcccttctgttcatttttccaccgcaccatcgatgcccacaaagactacaaaaaggtgcgcattagcggtgaggtggaattgaccgggatggaagtgagtctgtgctgggaaagtgttggaggagtgtccaattgctgcaaatatccggaggg

SEQ ID NO: 49376 - DNA, 628 bp, Heterodera glycines
ccgcaacttcaattgttcgtcctcgcggcatttttcgctcgcttctgttttatttcagcagcaaaaattctctgctgttgcatcatcgcccaataaaaatttgaatgctgtgcttatcgatgctgtacgtactccctttctccaatcgaatacaactttccgtgagctgttggctgttgatcttcaaagacacgctcttaaagcattggttgagcgaacaaaaataccttttgatgaaatcggacacattatctgtggacaagtcgttcaggaatgcaaaacgagcaatatcgcccgtgaggctgcgatcaccgccggtttccctgattcgatcccttgcaatacggtcactctcgcgtgtatttcttccggcgtttcaattcaaaatattagcctaatgatttccactggctatttaaaggcgggcatcgctggaggagtcgagttactctctgactttccaattcgttacaacagaaaggttcgactttctctcatcgatttgcagaaggccaaaagttttggagagagatttaagcacctgaaaacagtcgcctccaattggttctctcccgagttgccggccgtaagcgaattcacaaccggcgaagtgatgggcaattccggg

SEQ ID NO: 49377 - DNA, 571 bp, Heterodera glycines
cactttgccatcgctgtactcggagatgagccaactgaacaacaaagtgcgcgacggcgttcaagccttccgcgtcaacaccgactcggcctggactgacctgatggatgtgcaagtcgtcgtgtcaccggcttcaaaggaccgtggcaaccccttcagctccatcttccgggccaagcgtcaattgcctgggcactgctattgcggtcccccacaacggccaaactgccctcctggcccacctgggccggccggaccgcctggccaacccggacagccgggaggcgcaggactgcaaggacagtcggtagcacctggacaacctgctcctccgtgctcgccccagaacatcccggtcccacgctgcccggctggcccacccggtagccccggaggacaaggaccgcccggacagcaagtagccaccggtcagcctggtgcgcccgctccaggcggaggacatggaccgcctgccgcgtccggaccctaagttgcgcctgggtagactggacgcaccgtaacacccgtttcacccgtacagcctggaaataagcctgttatttgcaaacca

SEQ ID NO: 49378 - DNA, 626 bp, Heterodera glycines
tactttaaataattaccgcttgtttgaagtgaacccaaaaataaaaacaaatggcaagaaccaagcaaattgcgaagaagagaatgagtgaaaagaaagcgactgaacaggatgctttggtttctaagcaaaatttgcccacccaagcagtcaaaaaagcgggatctgacatgggccatcgtgctaagcgacaattggcaacgaaaagtgccccgaatcgccgcccacggtaccaagcatcgcatttgctaccaccacccgaagaaccattacaacaaaaacgctttaaaaagcgtggagcgctcgctctccaggagatccgcaaattccaagaaagcgtcaatctgcttataccgcgcagcacgttctttcgtgttgtccgcgaggtgaccatgaagttcgccgatggaatgcgctggcagggcaaggccctattggcactgcagaccatgaccgagtgccatctcgttaatatgttcgaggatgtcaatatgtgcgccctgcatgccgggcgagtcacgataatgccaaaagacatcgccttggttcgaaaaatacgcggcgaaaccacactcgctccgtcgtccggtttgcgccagactaaccgtcgtcgttgaactgctctg

SEQ ID NO: 49379 - DNA, 484 bp, Heterodera glycines
cgatcggaacgtcgcacatcgggacattaagctggagaacattctgtgcagctccaacgcagaggaaaagtgcaccttcaaattggccgactttggcttcgccaaacgcacggaaaagggccgactgatggagtcgccgtgctgcaccccggcgtatgtgtgccccgagattctgaaccgcaaccattacgactagggatgcgacatttgggctttgggagtggccaattacattcttttgtgcggatacccacccatttattccatgcagggacttccattctctccggggatgcgcaaacggatcatggagggaatgttcgccttcccctaggacgaatgggggacgatttatcactcatctagaaatatcatcgctgctatgcttaagacggaccccacggagtgaattaccattgaacgactgatggcttcatctttggcacgtactccagcccatctttctaatgcttttccgcttccc

SEQ ID NO: 49380 - DNA, 642 bp, Heterodera glycines
ccaagtttgagcttcagcaaaatgacctcgcaaggagttgaaaattatttaaaggaccaaacgatctctgacattccgacgatcgcggaaggctttcaaaacttgatgaatctttacatcaacaagctttggaaccaactctccgccgaggccagtcagctcgtacgtaacaaattgtttgtgtcgacagcgaatcttttccaattttacgaggaatttgtcagagacttcgagcggcgcattgagccattgcaattaattgagctgattacgccaattgccgaggacatttttgaaagggacagacaatcggcctacacttttctggacaacttcgataaagtgatcaagcaggacaaaagggccatcgttcggctggaggacagcaaaattcagctccgtctcagagacaaaccgacggccgaggcgaaatgttgcaatgacccggcattggttcggaaaatgttggaagaagcgaagacaatggtcgaccaactcgtcgaagtcggctcggtccacgccgcttactacggatgttcggcggagtaccaattccaaatgggcgaccacgaccgttactatgaagaggcccttcattatctcggctgtgaagacattaacgtcaaattgagcacggaacag

SEQ ID NO: 49381 - DNA, 556 bp, Heterodera glycines
ctgtaccggcttcacacttcgaccggtggccggccttctacgttcccgcgattttctggacgggctggcattctcggtgttccattccaccctgtacattctggattcgtccaagacccagtacacacctgaggccgagatttgtcacgaactgatgggccgttgtccactgcttgcggaccccgattttgcccagttttcccaagaatttggactcgcatcgcttggcgcctccgatgaaatggtggagaagttggctacgctctattggttcaccgtggagttcggcatttgcattcaaaatggggcaaaaaaggcggacggtgcgggactgatgagctcatttggcgaattggaatatgcgctcagcggacagcccgaattggctgcgttcaacccgccggagacgtgccaaaacaaatacccgatcactagctaccaacccacatatgttgtggccgaatcgttcgccgatggccaaaacaaactccctactgggtcaacgagcatacccagacaggtcccagtcaactacaacccatttccacaacgcatc

SEQ ID NO: 49382 - DNA, 630 bp, Heterodera glycines
ttaaggacttttatatttataaaatgctttataacggcaaatttttaaataagaaaaattatacaattacctttgaattagcaggaagttttgtggagaatcatcgtgggactgtttattccgtgtctttcaatccttttactcactcggaagcgcccatttattttgccactgtagggaaaaatagggtgtctgtgtacctttgtccacccgaaaagggctttcaattggtgcggcaattcgaagaccaagacgcggtcgggtggactttcttttgttttggagttttgctttgtttcacacattttctcagaaggacgagttttattacacggtcacttgggcttataaccttgaaaaagcacaacatgtgttggtcgtcggcggatttcgcggaatcatccgtgtgattagcccactcaatgggcgacttcattgcgcattaatcggtcacggcgactccatcaacgaattgtgcacttctcccgtctctccgatgattgtcgcttcagcgagtaaggatctgacagtgcgaatttggaacgtcacttactcgcaatgtttggccatcctcggggggaccaacggacaccgtgaccaagtgatttctctggatttcaattcgcccgg

SEQ ID NO: 49383 - DNA, 624 bp, Heterodera glycines
ggttggtctcgagctgactcttccaatttgcttggcgaacaacaaaattccttcgccttttcttcgatgggcaataaagcgaccaataacattttcaccgattttgtcgacccgttctttgtcgatgaagtgatcacttcagttttggatgttgggcgtgccgaaattcgctattacaaaaatggtcaaccacttggcgcggcattcaccgacattcggtaccaaaccggtgatatttatttcccccatgttgctaccaaaaattgcaaagttatggttaactttggcaccgaaattcctgaatcgattgaagcggccaaagacgagtccggtctttgcttgtggagtatgcccgccgatgaagtgcccgaagagaccgaatgggtcggcaacgtggaccggaaacagatggcaccgagcagaaggccgatgatcgacaaagcacactgcacaatcattgcgatggttggactgcccggcgttggaaaaacgacttgggttcgccaatacctcaaagagcacccgaatgaaaattggattctgctcaacacggacaccatcctcgaggcaatgacggtcgacggaatgccaaggcatcgagtgcaccagggcagatgggacatg

SEQ ID NO: 49384 - DNA, 637 bp, Heterodera glycines
agaatttatttttaaatagcttcattttaaaaaatggcttcttaccatgttgccattgctgctgatgaacgccaaaaatatcgctctttttgggaccaattttcgggaagagcagacaattcggcaatgatgctaaatgctaatgcagatcaaattgagtcattggacagagaaaatattctcgccctgttaccatcggtcaaaggcaaatttgtggtggacattggtgccggcattggccgtttcaccacagtgtttgcccagtcggaagcatcaaaagtggtggccactgattttgtggcctcatttgtggacaaaaatcggcagcgaaacggcgcatatgcaaatgttgttgagtggcgggtgggcgatgccaccggacttcagtttgacgagggcagtgttgatttggttttcactaattggttgttgatgtacttggctgatcaggaagcggtacaatttgttgccaatgctcttcaatggcttcggcctgacggttatctccatttgcgcgagtcgtgctcagaaccttcgacaaaaaaatctgctgatcactcaaccaccacaaccactaccagcacttcatcatcctcatcctcgtcgttgcacaacaattcgaagccaaatccgaccc

SEQ ID NO: 49385 - DNA, 646 bp, Heterodera glycines
taaaaggtaattatggcgcgaaacaataaattaatatgatatcgtccaatgaaggatcgccctgacgaatctatactgatctcatgactattagctgcacatggagatgacagtaagacccgtcagagaaactcttccattaagtaggcggaatgcacgcgaattccttgtgtggattagcccatttaagcaagaaaaaggttaccaggggaactgcctctcgctcccaaaactccacataatcaattcccttggaacgtcgcgtctttgtgtcggtaatcactcgaacatctctaacgtgtccaacacttgaaaaaaattcctccaagtcacgaggacgcgtttgacgagcaagcttaatcagaagaatttttcaataatcagcaaatgaagagccaacctggagaataaaaactggtcgctcatctctttcttcggaagccctatccattcgagcctcacgcggcgggggatctcgagggcgtaatgggcataccttaagaatcaaggcctggaataggctacatgggcaccgggtgggtggagcgacgccccccctaaccggcgacgtgccgggggccgggccccgggtcacccaccccaccgccgcgcgacgggcgcttgcgcgggagggggatgggggacg

SEQ ID NO: 49386 - DNA, 583 bp, Heterodera glycines
ggcaacaacatcgccaatttggaacaacaacacgttgccaattcgcctttggctgagaacggaggtgacaatttgcctctgttggatggagcccaaattgaagttggtgctgatccgcaaactccgcttgtcgacgccactgcattttcgccgccgcaaatggagaaacggcagagcgcacgacgatcgcgagcacatgagcgcgaggaagaaaacgaggacgaggaagtgttcactcgtcggacttttaacgttttgcagtcaatcgcgacaaaattgcgcgcggcaaatacaaacaaaattgtcttcgaagatcttttcaccaaagggtcgacgcgtcgcactgcggcacagaaattctacgcacttttggagctgaaaaaatggcaagccattgaagtggaacagcgcgatgctttcgacaccattgaaatttcggccggtgcgctaatgaatgagacaattaaattggcaatttgattgaagattatgggagggttccttccgtactaataatgatttttccttggatctcaattcgtatcttaatggccatgaaaacaacaaaaggctctgtttgatg

SEQ ID NO: 49387 - DNA, 563 bp, Heterodera glycines
acctatatttcccttcttcaattcaataaagcttcctttattccgttcatggaaaatggctcagaatcatgtaccgagtcggtgattttgtctattttgagactttttcggcggctccttaccaaatacgaagaatcgaagagctgaacaaaacagctaatggcgcagttgagaccaaagtgacttgcttcttccggcgccgggatttgcccaactctctgctgaaaatcgctgaccaagcggggcgtcagagtaaaattgcatcaaagccgcggaaaacactgctaggaaaggccgagccgacctcttccacgagcaacgcaaatggcgaggagggaccaagcgaaaacggggcggacgcaatggaaagtggcgggggctcgtcgacggacgcggagaactcgcgacgcgaaaacgacgagacggctgacgacggtcgggcggaatctgttggtttcgccggtctccccgccggtgcagaacgactcgacgcagcggagctaagcagacttcgtcagcatgaacttttcctctcgcgcattgtcgaaaccctaccagccaca

SEQ ID NO: 49388 - DNA, 523 bp, Heterodera glycines
acacaagaagagcgggggattcaacacaaagaagtttttgttggacctcgcatacggcggaactgctgctgccgtctcgaaaaccgctgttgcacccatcgagcgtgtcaagctgttgttgcacgtgcaagatgcttccattcacatcaccgcgaacgaccgctacaaaagcatcatcgacgtcctcgtccgtgttcccattgagcagggctttctgtcgttgtggcgtggtaacctggccaacgtcatccgttactttccgactcgggcgctgaacttcgccttcaaggacacttataatcgagtcttcacgcaaggagtggacaaggataagcacttcttgaagctcttcaccatgaatttggcttcaggcggtgccgctggcgccacttcgctgtgttatgtgtaccctttgcactttgcccgaacgccgttggtatcgcatgttgcaaaggacgatgacccggagttcagaggctgggcggactgcatcatgaagatccccaaatcggaccggcccatc

SEQ ID NO: 49389 - DNA, 596 bp, Heterodera glycines
cagtggcagcagctcgcatttctgccacctgcacaactgctcgctcctcaactacaatgctgtcgtctgttgatgcaatgcgtggccgtttactcaaatttaaattcttttcaagttaaagcgccaaatattcatttaccaaaaccaaaaggacgccgattttgagcgaattttggcgagaaggaagcgaattgagctgtacaaagagaccaatgagcaagtgaagcgggaaaaattgcagaaggaacttgcacaggcgaacaaacaggaggaacagcgcagaagggaggagttgaagaagttgcaggaggagaacaaagagaacgagcggaggcgcaaactgaacgaacaggaggagattcagcgaaagttgcaatccgagaagttgaagaagtaccaggcgcaccctttcttccaacagttggtcaaagagcatggggaggcgatattcgacaaagttgaccctgacaaactcatcagagagaagcgaattcgttttgacgctgagcgacccgagcagcagaccaaattgcaaaacttggagaaaaaatatgaccacccccgtccgggcatttcatttggaagaaatggcactg

SEQ ID NO: 49390 - DNA, 623 bp, Heterodera glycines
gacgaccgactcgacctcgacagaccgaccaattggagggtcttcaacattttggccgtcttccacaatctttcgtttgaggaggcgaacacggcccttatgggcgaaagtcacgcgcttgtcaggtttttgctgctttgctccaaatgtcggtggcatttgctgcgtaaaattgcctatgatacactgagtaacatcgcaagaaatataaaattggtcgacaaattgtccaccgttttgctgaacaccgtccaaaagggtctccactcggacgacaaatgcaaagtgatgcgatccatggaaattgtggccggtttatgcgcaacgccaaccaacgagtcaattgtttgtgaattcttcgaagaatcgcaaatcataccgcggattttcgctcttttgtcactcaaggatattttgatgtgtatgtgtgccatggagtccgtgttggccatttccgagttgggacgggtcgcgtgcgaagccgtcgcccgctgtgaccgcgccgttgaaatgcttgtcggctttttgaccaccgatgccttttcttttggcaccgtcggtttggcggggatgcacgtggttgaggtgcacggacacccaaccagaccttatgttgcgccaaa

SEQ ID NO: 49391 - DNA, 461 bp, Heterodera glycines
  unsure (1)..(461): unsure at all n locations
acagcacacacagccgaaaagcgcttcttctcatcgccttcgccttcaaaacttanaagcaccaatcccaaccagaaaaaatgtgcgacnaanaagttgctgctctcgtggtggacaatgggtccggaatgtgcaaggccggtttcncgggcgatgacgccccccccgcggtgtttccttcattgtgggccccccccctcttcaagccttcatgctcgcatggaaacaaaggactctatttggtaaccagggccaatcaaccgggttttcctacccttaattccccttttaacccggtttcccccccctgggacacattggaaaaaatttggccaccctcttttaaaaaaattttttttccccccaaaaaaaaccccgggttttttaaaaaccccctttttcccccnggcgccaaaaaaaaaaaacccccccttttttttaaaaataaacacccccccccc

SEQ ID NO: 49392 - DNA, 650 bp, Heterodera glycines
gcgggaccacttgtgatgactttctgagggagaatttggattggatttcgaaagcgactaattggaataaatttaatgccgtggcatccctcggactcattcacaagggacatgaacgagatgcgaaaaagcttttggagccataccttccaaagggggagcaggaccaattctgtttcaaagaaggcggatctctttttgcctatggtctgatacatgccaatcacgggagctccgcgattgattatctgtctgaccaactcagccgtgcttcgacgagtgccgttcgtcacggcgcatgtctgggacttggattggccgcactgggcacacgtaatgaacgtgtttacgaacacttgagggatgtgctgtaccagaacgaagcggtgtcaggagaagcagctggaactgccatgggcttaatcatggctggatcgatgaaccaaatggccttcgacgaaatgtaccagtacattcttgacactcaccacgacaaaatccaacggggacttcgcacgggaatttctatgttagcttatggagttgcagaaagagctgaagattggattcggttgctttataacagtccttacgcaattattcggcagacgggtgtttgcatgattgctttggcttacgcgggtacggga

SEQ ID NO: 49393 - DNA, 370 bp, Heterodera glycines
gtgcgacgaagaagttgctgctctcgtggtggacaatgggtccggaatgtgcaaggccggtttcgcgggcgatgacgcgccccgcgcggtgtttccgtccattgtgggccgcccccgccatccagacggcatggtcggcatgggacacaaggacacgaaggtggtttttttttttcagaccaaccggggtattctgacgctgaagtagcttattgcgcgcggcatcgtaacgaagtggagaaacatggagaatatctggcacaacaccttctacaacgagctgcgggtcgccccccagaagaacagtttgctgcacacgtatgcccgactgacaccgaatgccaagtgagtgaagatggaacagcgtctc

SEQ ID NO: 49394 - DNA, 593 bp, Heterodera glycines
gccgttataaaaatggcaacgaattcggcatttgaacggttggatgattacatttggggtcgcgctgacgagggcgaatttcttcggggagtggtcgcagatgagcgattagacaccgagaaactgttgtcgcgagtgcaaaacattcaacgggaaatgaactcgcgtcttcgccaaggggtggaagagaattacccaagtctattggagcaggtcagcaccatcgaacagttggacagtgcccattttcacgtccaacgcgaaatggacgcggtggtgaggcgggccgacgcattggccaaaacgatggaggaacaggtgggtaaaatccgtaaggatgtgcgtgcaatcgcttctctgacccaactgagtcggatgcaaggcgatgcgatcaggtgcgaagaattggtggacgcatggcgcgcggagacggatttgatcagacggacggaacacatcacagaagtgaacgcaattgtgaaggccaacgacaaactcagacatttgaaatggctccagtaccgttgtctgttcagtctttccgagatgaactcgcgcactcgtcaggatttggtcgttcagttgcgttccgc

SEQ ID NO: 49395 - DNA, 637 bp, Heterodera glycines
ttatcacttcggcatcgaccatttgccaactactcgcaccactgaactgttcaaatgtctcacaatgcatgaaaaaaaatttggcgaacgattgcaaattgagggagtcattttctcaaaacgccgtcaccaatacgaagagcaagtcaaggagaacccattcaattacgacgcgtggttcaattatgtgcgactgttgatggcggaggacgccgaccgggcctaagtggaggaatgttttgataggaccatttccaatgtgccgccttatgtggaaaaacggttttggcgtcattacatttgactgtgggagtattacgccatttacgaatagctcgatgttgacgacctgagaaagtgtcctgaagagtggcgtgcctgtttagacatcctcccccacaagcatttcaccttcgccttcacttggctgatgttcgcccaatttgagctcagacaactcaatttaagctccgctcgtaagattttgtgcacggcaattggaaaatgtccaaagaagaaacttttccgcgagtacattgagatgtagctgcacctgatggagctcgaccgatgtcgatgactctactaaaaattccgcgagttctcacctgacaacagtgtcagctggatgaaatat

SEQ ID NO: 49396 - DNA, 652 bp, Heterodera glycines
ctttctccgcgctgtccttgctgtgcataacaacgacttcgacaaggcatactcctgcataaataaggtcagagatatgtttgactcggaattgaccgcaatggcagcagagagttatgagcgcgcttacggagcaatggttttgctgcaagaactgaccgagctcgaggaggccatcgagtacaaaatgatccccgagcgcgaaatgcgtatcgctcttttgtggagccgacggttgcaaggatgcttactaaatgttgaacattggaggcgcattttgatggtcaggtcgatcgtcttttctcaaactgagttgcgccctctttggataaaatttgcggcactttgtcgttatgaggggaggcaggtgaccgtatctcgcaatgtcatccgttctttgttggaagtgccgccggacactccgttggagaaagtgccaatcccattgccattagagaaaacacagttggcactggcactttgcaaacaattatgggttgacagccaccgtcgaacggctttagttcaattggaacagctcacgcagactttgcatcgatgtattgagcgcaatcgcacaatgctcacccgcgaacagcttgaaacacacgcaagactgaccgcgaaatgctaccttaagttgggtgaatgg

SEQ ID NO: 49397 - DNA, 547 bp, Heterodera glycines
gtgcgacgaagaagttgctgctctcgtggtggacaatgggaccggaatgtgcaaggccggtttctcgggcgatggcgcgccccgcgcggagtttccgtccattgtgggccgcccccttcatcagggcgtcatggtcggtatgggacagaaggactcttacgggggagacgaggcgcattcccatcgtggcattctgacgctgaagtacccgattgagcacggcataccttccaactgggacgacatggaaaatatctggcaccacaccttctacaacgagctgcgtgtcgcccccgatgagcacccggtgctgctcacagaggccccgctgaacccgaaggtcaacagagaaaagatgacccttatcatgttcgagacgttcaacacaccggccatgtacttggccatccaagccgtgctgtccctgtacgcctccggtcgtaccaccggtctcgtgttggactccggcgatggtgtcagccacaccgcggccatctacgaaggttactcgcgtgcacacgccatcatgcagtttggacttggtcgg

SEQ ID NO: 49398 - DNA, 645 bp, Heterodera glycines
aacagaaaatcgttcagttgtccaaaaactaaaagcgaccttctaaccggcacttcgacggcaaatttaagtcccgaggacattggcattatcgcatcaatgggcgactcattggccaccggtgccgggctttggccgcggacggacatcgaattccgcggtgccgcctttcccattgggggtgatgcgacaattgatggtctcgtcaccgtccccaacattctgcgcgagtttatcgactccaatttgctcttcggagtttctcacggaatgggccaacgcgaccaattgcccgaaaaccaactgaatgtggcagtcagtggggcgagcagttcttcgatgcctggacaggccgtcgaattggtgagacggatgaagcgacttcgggaattggatgtgttcaacacttgggctttgattattgtcaccattggaaccgaagaggtctgcaaaaattgcacgggtccaaatacaaaggcactcgtccaggcattggacattttgaaccgtgggattcacaaagcactggtgattttgttgggcccaattcacgtcacttcgctgtaccaacaaaagttcaatttgctcaagacgcgttgtttatgctctcaaaataaagacgacaaatttatgagtgcactgagc

SEQ ID NO: 49399 - DNA, 645 bp, Heterodera glycines
aaacatttcaccaacaaaagcagcagaagaattaccaaacggaagagcagagaaatgccgtcccaaggagaactcaaagaaatcttcaacctttacgatgaggaattggagggcaaaatcgacgccacgcaaattggcgacgtggcacgcgcgtgtgggctgaagccgaccaatgcgatggtttggaaagcggcgggcgaagaatacaaacgcaagggcgagaagaaattggcattcgaagaatggctgcccatcttcgaacagttgcagaaggagaaggaagtgggcacttacgccgacttcgtcgagggtctgaaagtgttcgacaaagacgagagtggcaaaatcatggcagccgagctcaggcacgtgctgctggcgctgggcgaacggctgagcgcggaggaagcggacgaacttttgctgggcgcccaggacggcgagggaatgatcaattacgaccgtaagcgattattaatgaaattaaccgtgtcgagagtcccgacaaatgaccgttcccccttggtatttcagagttcatcaaaaaggtgttggccgggccctaccccgaggattgaaagacgcaacgcaaattagacaaaacacaaaatgagagatgggaaaagtccacccgaatgacgaaag

SEQ ID NO: 49400 - DNA, 586 bp, Heterodera glycines
gggccaccaaaaaattgctgctctcctggtggaccatgggtcccgaatgggcaagggccgtttcccgggcgatgaccccccccccgcggtggttccctccattgggggccgcccccctcctccaggcgtcatggtccgcatgggacaaaaagactcctacctgggaaaccaagcgcaatcccagcgtggtattctgaccctgaaataccccattgaacaccgcatcctcacccactgggaccacctggaaaagatctggcaccaccccctctaccaccaactgcgtgtccccccccaagaacaccccgtgcttctccccaaagccccccttaaccccaagggccaccgaaaaaagatgaccccaatcctgttccaaaacttccacacccccgccatttacctggccctcccagccctgctgtccctgtacgccttcgggccgaccaccggtctcctgttggacttccgcgatggtggtacccacaccgggcccctttaccaagggtacccccttgcccacgccctcctccggttggacttgggcggccctgacctcactgactaccctgagaaaatcccccctgag

SEQ ID NO: 49401 - DNA, 647 bp, Heterodera glycines
gacgatacggcgccgagtgtgactggtggtcgttgggcatttgcatgtacgagatgatttttggcgagacgcccttctatgccgagagtttggtggacacgtacggcaaaatcatgaaccacgaggagatgttcgagttcccggaggacatcgacatcagcgacgaggcaaaggacctaatctcgcggctgatttgtgcccgcgagacacggctcggcaaaaatgggctggccgacttccgggattatccgttcttcgccgacatcgactgggagaacatccgaagcgctgaggcgccctacaagccggaggtgtccagccccaccgacacgtccaactttgactccagcgtggtggccaacgacttcaccccgtgcgaaacgcaaccgcccaaagtgaccgcgccgttcaccgggctccatttgccgttcatcggcttcaccttcaccagcggaagtgccttctccgatgccacctctctgctccaaaccatccaagccaacagcggtggtggtgccgtcggcgtcgtgccattgtcctccccagcggtggacagtgccggcgcaaaatcggcgattctgcagcaacaacaacaggcgcaggcggcgtccgtgccggcgcaggcgcaggacgacgaggagcgcgag

SEQ ID NO: 49402 - DNA, 295 bp, Heterodera glycines
tggtgtttattccaatggttatgatggttccttaaattcttgccaccgttttcccctttttcacacagtgatcatagccaatcactttacgagaaaagatccgaatcaatccgattccctgactgacgaggacattaagccatccccgaattggcaaaacttccgcaatagctccacaatttttttgcggggcccgcccacatttttgggcccggccaaatggaaacaggcaattgtttttttttttttcggcggggaaaaaaaaaatcccccggaaagccccccctcccggggg

SEQ ID NO: 49403 - DNA, 530 bp, Heterodera glycines
aaaccgccgcctccacttttttgcattgaccgccatggccgtttcaacgctggaaatgcgtgtacggtgcgtctggatgactatttgatcttccactatacaaatcccagattgcttgagcatttcctttaccccggcactgatacagcccctgcccataattcaaaccggactttgtcaagaacaatactgcaatttgcaagcccaacttcatcgaggacaaagagcacggtacgtttattttcaacgtgcccttccggcacttcaattatggtcaatggtatccaaaagatgcgaatgcattaataagcagtgatttggaggacgaccaaccgagcagagacttgacaaacgtcgaatacatttatccgaatcctcaaatcgcatttgaaacacacaaccgggacaaacacaatgcttgggatgaatggtggatgagacaagaaagattcattaaaagactcaaataatcgcacatttgttactattgtctgtttgttgcattcacttcgaaaaatatttcaacgcga

SEQ ID NO: 49404 - DNA, 596 bp, Heterodera glycines
gtccaggcgcgacaagcacaaatccgtttctggcaagaatacatggagcccattgaatcaatgcatcattccactgctactttggctgagtccaatgccactattgtcgctggagggggtggtgggatgaatggcactaccaatgacttggattcgtcgccacttttgttgccgccggagaaagggattttagaggagaattgcggtgtcattctcatcgcagcaatcaacaaaagcgacatgcactctgacctaagcgcagaacagctcgaccggctccaataccatgtgcgcaagttttgtcttcaacatggcgccgcattgatttacacttcggctaacgacgacctgaacacacaacttttgcacaaatacattgctcaccgcattttctcactaccattcactgctcccgcttatattgtggaaagagaccgcattttcgttccgactggatgggactctgagcagaagctgtccatcatcaaggaagcgttggtcggttctgatcttttggatgtgccgatgttggcccagcagtccagcgatgcgtcacccttctccaattatcgggcgactggcgaaatggaagttga

SEQ ID NO: 49405 - DNA, 208 bp, Heterodera glycines
gatccaggcaccagacttgatcacggacgtccaagccgtgatgctcctgtacacctcccgccacaccaacgatctcgtgttggactcgcgcgatgttgtcacccacaccgtgcccatctaccatgcttatcacacgacccgcgccattctccaaaaggacttgcccagacgcgacctcactgactaactgatgaagctcctctctcag

SEQ ID NO: 49406 - DNA, 577 bp, Heterodera glycines
gaataaccatcatccaactgtaaatggaaatggctttggcttgaccaatgggacacatttcgctgatgaattttctgagtccattaaagacgttggtattattggcatcgaactttactttccaaaatcctacgtgaaccaagaagaccttgaaaaatttgacaatgttacatcaaataaatacgtgctgggacttggccaacaagaaatgtgcttttgccatgataatgaagatgtttgttcactttcgctgactgttgcagctgcactgatggacaattacaaagtcaatccaaaggacattggctttctcgcggttggtaccgaaacttggttcgacaaaacaaaaggggaaagccgtggttatggaattgtttgccgattccggcaactggacttggaaggcccccgacgaaaaaaccccgggttcggggggacccaagcgttggttattgccccccaatgggtgggacccgaattacccaacaaaaaaaacccctgcccccccgttgccggggcgaattgggcaaattttaccaggtggggccccccccaattgacgggggggtcggcgggg

SEQ ID NO: 49407 - DNA, 217 bp, Heterodera glycines
cgacgaagaagttgctgctctcgtggtggacaatgggtccggaatgtgcaaggccggtttcgcgggcgatgacgcgccccgcgcggtgtttccgtccgttgggggccgcccccatcatcgggggggcatgcacggcatgggacagaaagactcgtacacggaatatttttttttgtccaagcgtgggattctgacactgaaataccctattaagcac

SEQ ID NO: 49408 - DNA, 495 bp, Heterodera glycines
agcacacacagccgaaaagcgcttcttctcatcgccttctttttcaccacttagaagcaccaatcccaaccagaaaaaatgtgcgacgaagaagttgctgctctcgtggtggacaatgggtccggaatgtgcaaggccggtttcgcgggcgatgacgcgccccgcgcggtgtttccgtccattgtgggccgcccccgtcatcagggcgtcatggtcggcatgggacagaaggactcgtacgtttgatattaggcgcagtccaagcgtggtattctgacgctgaagtactcgattgagcacgggatcgtcaccaactgggacgacttggagaaaatctggcaccacaccttctataacgacctgcgtgtcgcccccgaggagcaccccgtgctgctcaccgaggcctcgctgatcccccaggccaacagagaaaatatgacccccatcctgctccagacgttccacacgcccgccacgcacgtgggccttccaggt

SEQ ID NO: 49409 - DNA, 659 bp, Heterodera glycines
atgttcccatgttttccggtgccactgaattcatagctaaccaagcgttcacaagtgcactttggaacattgccgaatccggggtacaacgagcagaatatttggtgcacaattacctgctatcaccgacagcagagaacggcatggacacacaaaaacagtcgccttcatctaaaaagatttattatgtctcattcaaccaagactgcaccattcttgtggtcggacacgacgacgggtacagcttctacaatttgcgctcattggaacgactggagaaaatttcggactcgcgagtgcctgaacgcgcatgcattgttgagaagctgtacagcagttcattgacctgtgttgtgtcgatgaaaagcacgcgaaaacttcaggtcttccattcgaagaatgagaatgaaatctgttcccacacctatgccagttcgattattgctgtccgtatgaatcggaagagagtggttgtctgtctggaggacaccatccacattcacaacatcagggacatgaaaataatgcacatgctgaaagacacaccgccaaatccgaacggaatcgtcgacctgtccatcgcggaaagcaactgatttctcgctttttccgtgttcgtccgcaccggccctgggcatatattcgacgctgagaatttg

SEQ ID NO: 49410 - DNA, 223 bp, Heterodera glycines
gcgctggacgttgtctcaggtgcgccagacagacggaatcatctctgcccaagccggttggaacaagggaaactcgaacaaaatgatgaccatctctggtatgccgagtcacaccaccatcaaatttcatgtggagaatccggtccatattccggatgacattttgttgaaaaacacggctgaggtgcttatgctggccagtccgacctggttctctaaccaa

SEQ ID NO: 49411 - DNA, 682 bp, Heterodera glycines
catgatcggaggtctttttgtttataaccacaagggtgaggtgcttatttcaagaatttatcgcgacgacgtgaatcggaatgccgttgacgcctttagagtttcagttatacatgcaaggcaacagattcgttcaccagtgacaaatattgcaaggacttccttttttcacatcaaaaggggaaacgtttggatgtgcgctgttagcagacgaaacattaatgcatcgatggtcttcgaatttctcaatcgttttgcagacacaatgcaatcttattttggaaaactgaacgaggaaaatgtgaaaaacaatttcgtcctcatttacgaaattcttgatgagatccttgattttggttacccccagaataccgacccaggagtattgaaaacatttataacacaacaaggcgtccgaacagcgagtaaagaagaacaggcacaaatcacttctcaagtaacaggacaaattggttggcgccgagaaggcataaaatacagacgcaatgaactctttttggatgtcattgaatatgttaacctcctcatgtcgcagcagggtcaggtgctttcatctcatgttgcgggaaaggtggccatgaagtcttatctcagcggaatgccagaatgtaaatttgggaataatgacaaattgacgatcgaaagccaaggcaggactggc

SEQ ID NO: 49412 - DNA, 654 bp, Heterodera glycines
gtcacctttcttcacacgctgttagaggccgaccatttaaaaccacagcttttgcgagtccaattatccactgccggctcgcaggagccccaatcgcttctctcccacttaagtcgtatgttgtgcaattgtgggcctcgtaaattgcaaattcgttgtggccttttgatgcttttgtctgtgtggacaaataattgtacgcctgcgattgaattattcttgtcgcctttttgcacaaattctgcttccgacgatcacaatgtcgtgcattaccttgtctcccaattggttgaccaaaacactgagataacggaggcggaaaatcacctcgtcaaaggattggtcgcatttctcgtcggcatttgtctccacagttgggaagtgccggaaggaaaggcggacaaaaagaatcaactgacacatttaatcgaacgaagagtcggtcgtgaacgaatggccgagtacattgaaggcatttccaaatcagaattttacatacgagcggcccaacgccctcagccgttggcaaaaggcccttccgatttgttgttggattatcaattcaccaaattcttcaaattaatggaggggcatttgcttaagtttttccgtccaaacggtgaactttcttcttctgtaatacacagcttgaag

SEQ ID NO: 49413 - DNA, 421 bp, Heterodera glycines
tacagataatcatcgcttttccgacccagaggattttgtagacgatgttgaggatgatgaattgatcagagatttgctttacgaagagccaagggaatcgcaataccaagaatgctgtattatggtgttcaatattcctatcatttcctcggatcgattgccaaaactgcgcaatgtttcttcctgtgtcttctccgttcgaaacacttacaaatataacgacaattctccgctggacggtgaaggacataccaaaggcttttgctttttggagtaacaaacaaaggaggcggccaacgcagttttggccatttgcgatggacatcgccttgacaaataccacacatttgccgcgtatccattcaccgctattccaagcatgaacgaaccggaaaaggactggcagaaaccggaaagacac

SEQ ID NO: 49414 - DNA, 403 bp, Heterodera glycines
cggccaactcgtttacaatggacaaattctgttgcccgattcatgactcgaccctttgatgggttccaacctttgggacccgacgctcttctaattgactaatggccggcctggccttcaaaggcgcacccatgccagagtgtttttttttctggcggaaaaacggcagtgctatttaccttactggatgatggttcaactcgatcggaaggagggggacatcatcagcgagcagtactaatagatcccgattgccgcttaccccaaggaccagccgatgctgaccgactattaccacatttaaaatccccgcgccatgcacgaggtcgaactgcgcaagttttccaggctgaccacaggcgatatcatcgcggtgcaccacgacgagcagtgtatcgacttc

SEQ ID NO: 49415 - DNA, 493 bp, Heterodera glycines
gtgcaacaaaaaatttgctgttctctggggggacaaggggtccggaatgggcaaggccgttttcccgggcaataacccccccccccgggtgtttccgtcattggggggcggcccccgccatcaggcggtctgggccggcttggaacaaaagaattcttattttgaaaacaaggcgcattccaacgtgggaattctgacgttaaagaccccaatggagcacggaatcgccaccaatgggaacacactgaaaaaaatttggccccccaccttctacaacaagttgttggtcccccccaagaagaaccgggggttgctcacaaaggccccgctaaccctaaaggccaccgaaaaaaagaggacccaaatcatgttggaaacgttcaccaggccggccatgaccgtgccaatccaggccgggctgacctggaacccctcgggccgtaccaccggtctcttgttgaattccagggagggggcccccccaccgggccca

SEQ ID NO: 49416 - DNA, 607 bp, Heterodera glycines
aaagaaaaaaagcggtggattcaacactaagaagattttgttggacctctgatccggcggaactgctgctgcagtctccaaaaccgctgctgcacccatcaagcgtgtcaaggtgttgctgcaggtgcaatatgcttccattctcatcaccgcggacaagcgctacaaaggcatcatcgacttcctcatccttgttctccacgatcagggctttctgttggagtggcgtggtaaactggccaacgtaatcagatactttccgactcaagcactgaacttcgccttcaaggacacttataagccagtcttcacgccaggagtggacaaggagaaacacttcttgaagatcatcgccatgaatttggcttcgggaggagccgctggagccacttcgctgtgttctgtgcaacctttggactttgcgcgaacgcgtttgagcacgcatgttggacagggccatgcccgtcagtgcaaaggcctgccagagtgcatcattaatatcctcaagtcggacggatccatcggtctctaccgcggcttcttcgtctccgaccaggggatcgtcatttaccgcacaagttacttcggatgcttctacaccacaaaa

SEQ ID NO: 49417 - DNA, 661 bp, Heterodera glycines
acgtggcaaacgcggcagcagtgaaccgtcgatggccgaagaaatggcattggcaccttcctcctcgtcctccaccgctccgccctccacaactgctggtggcatcgcttcctcttcctcatccgtctcctcctcatccgtcgttggcacctgttcctcatcatccggtggcattgtgccgtccatcaaaatgatttttccgggcgaagtttggtgccaaagtggtggcacggcgatgatcatcggcgaacagttccacgagggcatgcaagtgatggtcggcggcacgctcacttggcccgagatggtcactgcccacgcgatcaaagtgaatgtgccggcccgggcaagtcccggcgccgtggacgtggtcgtctgctccccgaaggggcaaccaaaagtgcgctccaatgccatccgattctcatacgtttcgctgaccgagccgagcattgactacggatttcaacgactgcagaaattgttgccaaaatatccaaatgatccggaacgattgcccaaggaagtgattttgagaagagcggccgaactggcagaagcattgtacaaccggtacagcagcccggcggagcagttgagccactatgcatacagcttcgactcggatttggttgcggattacgcccgcgtgcacacatcg

SEQ ID NO: 49418 - DNA, 490 bp, Heterodera glycines
aagacttgacgtcttcaaactgacggactatgacgcaatgaaattcttggtgagccaatctgacatcgctaccagaaagagggactaccaaatggagcattatgcgcggaatcgcccatcagacggcattcacatcatcaacattcgcaaaacgtgggagaaactgttgttcgccgcccgagccatcgcggtcattgaaaatcctgccgatgttgcggccggctctgctcatccgtacgcccaacgcgctgagctccagctcgctgctcccatcggtgccactccaatctgtggccggtttacgaccgggtctttgaccaaccatcttctgaagaattgcttggaacctcggctgctcgcggggtccgaccctgaggtgcaccaacaggagggacgcgacgcgtcctacgagaacactcctgggattgctccgaccaacacagactcgacgttgagatttgtggacattgccgtcccggcaaacaacaag

SEQ ID NO: 49419 - DNA, 630 bp, Heterodera glycines
ggattgacgtgactctgagtgagtccggccccgacgcccatcacccggtcattcggaccctttatgaccacctcgatgtgacaacaaaaacactttacgaagaatcgttggtctttttgctaggaagtcacttgcgttgctttccatccccgcgagtccgtcctcctttcgggcagcaacgattttacgctgaaaatgttcgattattcaaaaactgcggttaaaagggcaatgaaaacgatcacggaggtcgagccgatcactgcggtcagttttcatccgagcggagagttttttctatgcgcaactcggcatccgaccttgcgtctttatagtgccgaaacacagcaatgctttgtttctacaataccgaaggaccaacattctgattccattacggatgtgtgctattcggaaaatgcgcgaatgtttgtcacgggaagtcgtgatgggaatgtaaaagtttgggacggagtttccaatcgatgcattgagacttttacccgcgcgcatgacggagccccgatttgcagtgctcagttcactcgtaatggaaagtacgttctcacagtaggaatggacagtgtgcccaaattatgggaattgtccaccaatcgctgtttgatcgct

SEQ ID NO: 49420 - DNA, 534 bp, Heterodera glycines
gttttcgccaagtgttctttagacataacgaatttacactgtcactaaaaatgcacatttcctttgtttctcgacaagcgactgcctttttgggtgttgccagtagaaatgcattgccacgagtcgccgcagaagcaccgcctgctccgcttacatatcttagcgaggacgaagtcgcacttaagcaatcggttaaacagttttctgagagtgtcatacgaccgcttgtgaaagaaatggatctgaaatcggagatggacaggcgagtgatcgaaggcgtatttgcaaatgggcttatgggcatcgaaatagcagagaagtttggcggttccgagtccagcttcttcaatgtggctttaaccgtagaagaattggcaaaagtcgacccatcggttgcggttttggtcgatgttcaaaatactttagttgcaccattgattatagaaaatggaacggaagagcaaaaacagaagtatttgacactaattgtgaaagattggattggtgccttttgcctttctgaagctgggagtg

SEQ ID NO: 49421 - DNA, 202 bp, Heterodera glycines
gtgcgacgaagaagttgctgctctcggggtggacaatgggcccggaatgtgcaaggccggtttcgcgggcgatgacgcgccccgcgcggtgtttccgatcattgcgggccggccccggcatctcggcgtcatggacggtatgggacagaatgactccttcctgcgagactatgcgcgatccaatagtggtattctgatcctg

SEQ ID NO: 49422 - DNA, 573 bp, Heterodera glycines
gtcctgatgcgcgtcttgacgtacaaagtttgatcgcattgatcaactcgggtaaatattgatcataggccccaaactcaaaaatgcttaaaaacagtcagaatcgatgtaaaaaggtttgaaatgggttggaaaaatagaattaggggcgcgcttgccctttttcaggatgaaaagtgccgaaaatggagtgccaaactcagctgggactcaagtgaccgtgctatataaagcactcaaaagttcattgtgggccgcccccgtcatcagggcgtcatggtcggcatgggacagaaggactcgtacgtgggagacgaggcgcagtccaagcgtggtattctgacgctgaagtacccgattgagcacggcatcgtcaccaactgggacgacatggagaagatctggcaccacaccttctacaacgagctgcgtgtcgcccccgaggagcacccggtgctgctcacagaggccccgctgaacccgaaggccaacagagaaaagatgacccaaatcatgttcgagacgttcaacacgccggccatgtacgtgggcatccaggccggggtgcccctg

SEQ ID NO: 49423 - DNA, 229 bp, Heterodera glycines
aagcatttacaactcgaacaaatgctaccggcaaccgtcggacgcggaacgcgtccaaaaacgaacttcgatgcctctttatgatttcgacaactatttgtttgaccatttgccagagacttgacattggcgcgatgatgacgcaatcaactacgcgtccactgatcgcaaccaacacattcctcaatattgtgcctcatgctggccaatgcgtgtcacttcttcactg

SEQ ID NO: 49424 - DNA, 504 bp, Heterodera glycines
ggttgtttcaattattgttaatttaaaaaatcaaaagaaagttccaacatgaaagacgtgctcattctgcacaacattaatcagattgttcaagtggtggacgatgatcggactttttgtttattgggtgatcaaatggggaaaatcaaaataatggaatcagatggccacgaattggccattctttgcatcgaaggacgaattgagcaaattggcatttttgaagagatttcttcccgattcatctctaaagaattgaccgatgtgacgagggtggactgtgggggagggagtgttctgccgggcatggcggacgcccattcccacccggtgttctctggcgatcgggtgcatgaatttgcgatgaaactcgctggcgccacttatatggaagtgcaagcagccgggggcggaattcccttcacagcggaaaagacgcgcgaaagcaccgaagagcaattgctggaggactttttggacattgctcgggaaatgctcccgtcc

SEQ ID NO: 49425 - DNA, 539 bp, Heterodera glycines
cccgcgtcagcgtcactcattaccatccgatgtggccacccactgacccggccgttcaatgccccaagcactggttggaaaatgtgctgttcatcaacagtttgacagacaacaggtgccttccgtggacatggtatatcggcactgaattcatcttctacttgctctcccccgtgtttctactcgcccttcgccattctgctctttacggcctttctctggtgggcctcgtctccgccgcgtcggcgcttgccaatttgatcataatgctccaatataatttccctcccactcaaatgttgtggaaacagccgtcaaatttttctcccgactttatcaaacaccatttggtcatttacatcaagccatggtaccgcattggtccttacttggtcggcctcgtgcttggctatgttttggcggtgcattccgtgtccccacagcgaaagcgttcggacggaacgcactccgcccgttttgtttgggtcggatgggcaactgcgggctgtgccggcttttggtcggtgttcgggctatac

SEQ ID NO: 49426 - DNA, 364 bp, Heterodera glycines
accaaaaccatccggcatgcgggcgacgaaagcggggaagacccccaaagaggcgcgaacgggcgacaggaaaaggagtaaggctcgcaaggagtcgtactccgagtacatctaccgcatgctgaagtgggttcacccggacaccggcatctcctccgaggcgatggccgtcatgtactcgttcgtcaacgacgctgtcgagcgcgttgtcgcgggagcctctcgactggtccactacaacaagcgatccaccatctcttagtgcgaaatccaaacggccgtccgtctgattctgcctggcgagttggacagggactccgcgtccgacgggaccatagcagcgacgaagtaccgcccgtcaaag

SEQ ID NO: 49427 - DNA, 334 bp, Heterodera glycines
accatcttatccgttggcttctctctatgtcggcgatcttcatccggatgtcactgaggccatgctctttgagcgggtcagcaatgctggtcctgtgctctccattcgtgtttgacgtgatgcaattactcagctcggttcgacttggatatgcctatgttgaattttcaacaaccgcgcggatgctgaacgtgccttttggacaaccaatgaacttttgacctgaatcctggaacaaagcccaatttcgcctttatggggataggcacggcggaatactaagcaatccctgcccattggggggggcctggggaaaaacctttttttcaaaaaa

SEQ ID NO: 49428 - DNA, 262 bp, Heterodera glycines
tgatcagccaaagatgccggaaagcgaacaccacttccatgaggaggcgcccaacgcctccatggagaccaaagtggcgggcggtggcgcggtgccgaagcgagtcgggtgctggacgttgtcatggctgcgccagatggttagcatcatcacgtcccaggacggttggaacaagggagactcgcagaagttgatgaccaactttggtacgccgcgtaacaccaccaccaaagtcaaagtggagaatctggccgagattcca

SEQ ID NO: 49429 - DNA, 412 bp, Heterodera glycines
taccacggacaagacggtgtttgtggtgtcattacgaattgacaacaatctgtgccactttcgcctgaaacgagaaggccgtctgtttatggtcgctcagcgaaccttcgaaacgctgtgccatttggaggacttttacgcgtccactccgttcgtccgtggcgtttccctaaaatttccggtcaatgagcaaacgatcagccaatacactgatcagaatgatggccaactgcacttggactgtttttacattgacttgaacaacctggacaaagagcttctcgttgaaacaatcgaatccttcgatggcatcatcgacgattgccaaatgtcgaaaaatgatcagctgaaagtgtttcctccgctcagttttcctatcggtacccaaatcactttgctgtccatggaccaa

SEQ ID NO: 49430 - DNA, 649 bp, Heterodera glycines
agtttgagatggacttcgaagtgtgttcaacatcgagtggtgatgaatttgtggatcttgatctggaattttcgtccgctgatgaatcgatccatgattttggtgatagtagcatggacaaaaaaccactggagagacttttgagggaaattgaatcggagagtcaaaaggaagtcgaagatgctgacaaagtggcctatcggagggttgggcttcccaacgtcgggccaactgcgcaaccgaagacactttttcccgtttgggtgactgagtcgaaaagattttcggcccaaattggtggtgatactgacaatgagcaaaaaggcattggcttgcgactggacaacctcagaccggaatttttacacgtccttcaaaagtccataagcttttggttccctgttcaacgatttgttcttccgactctgcttcaaatggccaattccgtcctgcccccacgcgatttggtcatttgctcaccaaccggcagtggaaagactctttgctatgtgctgcccattttaaatgctttgcgaatttgccccttttcgacttcgtcagtttttgctttggttgttgctcccgtcaggaatttggctgaacaaatatttaaagaatttgaaaaactgaatctcttcggtgctgccat

SEQ ID NO: 49431 - DNA, 656 bp, Heterodera glycines
ttgagatatgagtcgtcaacagagggacagcagtagttcaaggtctagtgactcatggtcaaggaaatcaagatcgagatccagagcaagctcaccttctcgttctagcagttctccgcacgaccgtgattggaggtttagaagcaggagtggagaaaggaataaacggcgatgcagacacagccgacagtcaccacctcctagaaaaagggaacgaagccgaactccgttctcacgccgacgtttttctaacgaaactaagccttcaaataaagttatcttgacctcgttgccaaattatgctgacaaagatgcgttgaacattttgctggcaaagcagggatttcatcccatcgatattagagttgttaggcgtaacaccgacagcggctccgttcgaatttttggttttgttgaattttcggatgttgaaacagcggaggattggatacgtcataaccaaggctttctcaaaatggacgatggttttcaagtacgcttggagtattcacgtgaagagttgaaccgagaaaggccgatttataatcccctaacatcggattggacatgttccaagtgcactatcaacaacttcaaccggcgcacaaattgttttaaatgcggtacatctagaaaggactcagaagcgcttgatg

SEQ ID NO: 49432 - DNA, 650 bp, Heterodera glycines
atttatttaaaatgtcttcgcataatacttcagttattgatgaaaatcgacgatggagtgacttacgctgtttaacagatagggcgtctacatttgccaattcaggattcgtccctggaatcaagaatttgaaagaagttcataaaatgccggtgctagttgttggtgctggtgggcttggctgtgaaatccttaaagacttggctttatctggtttccatgacattcatattattgatatggacattaatcgatctctcaaatttaaaccgacaatttctctttcggttttgatctctattattattattattgtgtgtatttattattattattgtgtgtattttttttagtgaaaatgacattggacgctcaaaagctgaggtggcggctgcctttatcgagaaaagggtgtttggctgtaaagttactccgtatgattgtttttatcttttctaatttgaacctggactaattttaaaccagtattgcttgaccaaatccaggttgccgaaaaatggctagctggacctgtatgaaaaattcagccataattgcaaaatccaggacaaatctctcgaattttatcgtaaatttttcattattatttgcggacttgactccattgaagctcgccgttggcttaatgc

SEQ ID NO: 49433 - DNA, 645 bp, Heterodera glycines
attttattttttcccacgaattgttcattctcagaattccgaaagtaagtaaaaatatatgtattcatttagggaaattcgtcagcacatcaccaagcgacagtgaatagtgtggggacagtggcgagtggacaaatgaagccatccgtgaaggatctactggaccgggtgttggacgagtacaaccatttgcagcagcaattgcacaatgttcgggttgagctggagaagagccaacaggagagggacacgctgcaccgatactcactgatgtactccgaaacgtttttcactctcaacttcgaaatgctaaaacatggtgaaattgttaaacgtctcagcggcatcctttcgcatgtcatccctctccttccccaagaacaccaagcaccggcagttcaggcgattgagcgtgccaagaccatcaaccaacaagatgttacttcgattgtcaacggccaagtacagcagcagcagcaatttgcttcgattctgcccgggcttggttccatgatgaatccgacggcatttgggaatccgatgggggcgatgatgggcatcaaaccggaagacgcgatacaggcggcggctatgttcaacaatttgttaaaaaacccaatgcttggtgccaccgcggctggactt

SEQ ID NO: 49434 - DNA, 625 bp, Heterodera glycines
gccaaattatatggaaatcaagacaactttcgtgtgaaaaaagttctaattgcggccaaattgtccgggaaggatattaaggcgattcctcagcttcctccaacaaatctcttcccattgggacaagcacccgctttcgatgatggaaaagtgtgtcttttcggtgccgaggcaatttccaaatatcttttgggcactggttcaatttatttgccacagaacccggaattggaccaatggattgggtaattgctttgtgtttttgccttctttttttaccatttttacttttagttggactgcttcttctttgcaaccaaatgtcctttcctatgttttgccttgcgtttccgctgccaaaattgaccaaaatgctttagagacggcaaagaatgaattgcttgcccaactttctctcttcgaccaaattctccttcccaaaacttttctcgttggcgagcgtttgtcccttgcggacatttccgttgcgattgatcttctgccggcttatcaatacgttttgggagaagaagctcgcaaaggccttgtgaatgttaaccgatggtttcaaacggtggtcagtcaaccaggaatcagagaagtgctcggggagttcagcttcatc

SEQ ID NO: 49435 - DNA, 659 bp, Heterodera glycines
agggaagcaatgtcttcaacattggaaatgctctcgcggccttttctggcgcagttcaaggccccgtttcgcgtggacgtgttcagcaagtcaaagtgcccaagaaaatgtccttcaagccattgtctcgcgcactcgccgagcccgactttatgatttgggactttgccaagttcgacgaacctgcacaacttcacgccctttggcaggctttgtacagttttgaggagatgaaaaactacagccctttgccccgttccgatgccgacgcaaaattgttaaaggaaatgctgccaaaagatgcgcccgaaatgccggactcactgctcttaaacttctcttaccaggcgtgcggaaatctccaacccatcgcttcgctcatcagcggtttggtggcccaagaggcgatgaaggcagtgacgcaccacacgactcccctcaagcagtttctgtacaccgattctcttgaggcgttgccgggcgcagattcgacctttgacgccgccaagttggagaagaacgattgtgcaccgcgcaacaatcgctacgacggacaggcggcagttttcgggtgggcctttcaagaggcgctgcagcaacagaaatggttcattgttggcgccggagcgattggctgtgagctgctgaagaacatggcg

SEQ ID NO: 49436 - DNA, 661 bp, Heterodera glycines
gaaccggtgcctcctccgagcgaatgagtgagctgaaagccttgcagacagtcgcacccctccgcctccttccgcacaacgtccaacacattgtccaccaattcggctccctcggtgtaatggcccttggcccagttgttgcccgctccgctttgtccgaacacgaagttgtcgggacggaaaagctgaccgtaaggtccggcacggattgagtccattgtgcccggctcgaggtccacaagcacagcgcggggcacgtacttgccacctaaattcgaagaaaaaagtatgcattacaaaataacattataattagtaaccataggcctcgttatagtagacattaatccgttcaagttggaggtccgtgtcgcctttgtaagttccgtccggttgaattccatgctcatcagaaatcacttcccagaactgaagtctgttgtgtgaaagacaatttccaaaacaataaattaacctttgaaccgacctgatttccacattgaccagcttgaatatggacaatttcacgcatttttaaaataatttgtatttattctaaagacaaatgtggaagtaatatgagaactcaaaaaataaaaaggaagaacgcaggatatgaaatatttggaggaaggaaccaggaaacaatatttatcatttt

SEQ ID NO: 49437 - DNA, 646 bp, Heterodera glycines
cattggccaattatggtcaattagcagcctaatttcacaatgattaggtgtataaaacggcaccgccgcgctttcattgtgaggcgggcacaattgaaatgccaagggaaatccccgcaagcggcgaaatggtgctgacgctgaggacggacgcatgtacgggttcaacaacggaagtgaactttttggagcatgtgcaggccatcgtgtcgctgaacagctcgcgtcgggtagacacgacgctgtgggggagggaacggtcaaaggcaccgcttggacaaatgctttaggtacctcatctcgcccgccggcactccttcgatgattctctcgagaaggcctaaggacgacgatgccaaagacggattcaccaattggccatttatgacaactcacacgtggggagagaaccctcgcgggcgttggcgtttggtggtgcgcttccaaccaggcaaatcgacgccgaagggccataaataccgagggacgctgaaaaagttcacgctgatgctgcacggcacaaaggagccgccttatcgcggcattgagcccctgcagggacacgccaattccaagctgagtgtggtgcaaagtgcgcacaaacggatggcaaacaggcgatgatggcacgacagacgaatggacg

SEQ ID NO: 49438 - DNA, 208 bp, Heterodera glycines
aaacaagaagagcggtggattcaacactaagaactttttgttggacctcatatccttcggaactgctgctgcaatctcaaaaaccgctgttgcacccatctagtgtgtccagctgttgatgcacgtgcaagatgcttgcattcacatctccgacgactggccctacaaaagcatcctccatatcctcatacgggtctcccaggagcac

SEQ ID NO: 49439 - DNA, 541 bp, Heterodera glycines
atttaattattcttcccggttatttttagtaatccaatttttaaaattgtataagctttttaagatggcccgtcgctatgatactcgtacgacaatcttctctccagaaggccgtctctaccaagttgaatatgcaatggaagcaattggtcaggctgggacttgtcttggaattcgagctcccgatggcattttcattgctgcacaaaaactaacggcaaacaaattgcttgatgatcgagtgttaaatacaagtcatttgaagcagatcattgcaacagttgctttaaaattttactgaaatccaagcgggaggcgcctttttagtttacagaattttttgtcacaataagtcaaaatttattttcggtaattccgtggtctctttatcaccttccattatttttgaacgaaattaaaaaaaaaactgcaactagtggcgcgaattttaattataattatactttgtattttcagatcatgagcgagaaaatctaccaggtgtcggcgaacatcttctgcacggtggcggggatcacca

SEQ ID NO: 49440 - DNA, 648 bp, Heterodera glycines
gttattaagctgcactcatcccgaatttccatacaaacaacaggatataactgcatattcttcgacattgccaaacgtgctttacgcgggtgttgatccaacagctgacagccttcaccttgggaatctcctcgtgctcaattccctgattagagcttccttttttggttgttctcctattttattaattggaaaagcaacagcttccgtcggagatccgagcgggcacaaaagagacaggatattgttattacatgaatttatctatgcgaattcaaaggcgttgcaaatacaggtggagaaaataaaggcgaatgtttcatcattgtatggggaagacatttctctcgaaattcgaaataatgcagaatggtataaagaggtgagtttggctcgtgggtctcttaattttcagctttttattagatgcggattttggactttttcgaatcaacaaaaagatttcgcatgagtgacatgctgaagagtgggccgatcaagtctcgtttagacgactgtgaaacattgtcctacgctgaattttcctaccaaactttacaagcaattgactggctaaaactttacgaagaaagaggctgtctttgtcaaattggcggaactgatcaatttggaaatatgagagccggt

SEQ ID NO: 49441 - DNA, 433 bp, Heterodera glycines
gataccctccgccatcccattacgttcaattagtacgacttgtaccgcgcgtaatagcatctcacaatcccactctggaaccggaggaaccgcaactttctctatttgcattcttccacgcctccataacaatgcacccgatgtcccaggacttctaatagcacccactcattatttaggcgcacatatacgacttgatattgatgcacttggcgagtgaccgccgatcaagtatcacgctcgcatcttggcgacgagtgagcccgactaccaacgcaccttggagcgcaccgatcccgtgatcaacggaactccgggactagacgatgaattgatcctcctcggagccctcttgaattactatatagtcatgtttgtgcttgactaggctcacgagatgtcctaccacgaggtcaatcacaaactctacgac

SEQ ID NO: 49442 - DNA, 523 bp, Heterodera glycines
gttctctgtccactactgattcgaggcgacgctccagtacaaaacgctgacatttgactggctgcacctcggcgttgacgagctgaaaatggccagctgcgacaaggagaacatccggacggagtccttcgacctggtgctgaccaacgcgcactcgaaacgcgaatgtgcagtgggcgaattggagccgcgctattcggctgtggttgtgccgccaattccgcgccttgatgcgcaaaaattgcccaaagtgcgtgatacctttactaacggaattggctgaagacacttgtcgacctaccagctgaacagcgcccactgctacattaacccggaggactttgccggaatgagcgaagaacatctgctggtacgcatcacaagagtgtctccggataactacagctcgacaaattatcacgcgacgcaccggctgtataatgacgggcccctccgccagtcacgtacgtgatgctaccgttgcggccagtccgggcgttggtacaaaggctgtacactgcta

SEQ ID NO: 49443 - DNA, 509 bp, Heterodera glycines
gaaatggcccactgatgatggaattggccacttaccggtactacggtcactccatgtcggaccccgggacgagttaccgtactcgggatgagatacaggaagtgcggaagagcagggaccccatcaccagcttcaaagatcgcattgtcacggcgggacttgtcactgtttgaggaattaaaggacattgacaagaaagtgcgtcaggaggtggacgaggcggtcaaagtcgcactttcagacgaagttttacctccggaagcgctcttctccgatttgtatgccaacactccgccgcttgcggtgcgcgggacgactgccgacgcaaccgtcacacagccatttgtgagcacggcggaagtgttgagaaaaatggggagggagccgaagaattattgagagaacgaatagccaaagacgcattgatagttaggagaagcacagaataattaattgtttcattatatttattcgaagcaaactctcagaggaagaaagagattcctttt

SEQ ID NO: 49444 - DNA, 590 bp, Heterodera glycines
tgctgatcaacgtcatccgcacattgaccacgacggtatcaaatgatcagcgccaattggagaagcagcgaattgagcacggctacaaacagtcggaacagaacattgacaaactgctgaaagaacaccgatcggatgctctccattgtctgaacactttccaatcggtgtccaaggagttgacgagttgtcgagaacaaatccggaacatcaagagttccctgtccctttgcaagtcttttcttcagtgtcgccgcgacgatttgaacaaattttggctcgaaaatgctcaacagaaaaaggtgtgcgacattctgcagcaaattcagcaaataaaagaaactgagaaaaacatcgatgtccaattggccagcggagaatacaaagaagtgattcgagtgcttaaggatgccgatgttttgctgaaaggaccatttgagaaaatggatggcatcagtcaactgaaatttgtcgtctccgaaaatctgcagaaagtttttggccaaattgtcaccgaccttctccaatgtacttttgatgaaccctttgaaattcagactttggaagcggtgaaaagtggaaaattgatc

SEQ ID NO: 49445 - DNA, 663 bp, Heterodera glycines
ctgcgatccaacgaagtgaacacgtcgacgactttgcaagagcttggttttggaccggacgaggacgacgatttgcacaatgccagtcacttttcacaaccgactccggcgaatgcgatggctgccagtgccagcgcgggttacgatattccgcagcgtttgaaaacgctccacaatttggtcattcaatacgctgcccaggggcgttacgaagttgccgttccgttgtgcaagcaggccctggaggacctggagaagaacaacggccacgaccaccccgacgttgccaccatgctgaacattctcgcattggtttatcgtgaccagcgcaagtacaaagaggctgccgccctcctcaacgaggccttggccattcgcgagcgatgcctcggcgaggaccacccggcggttgccgcaactctgaacaatttggccgtcctttatgggaagaggggcaagtacaaagaggcggagccactttgcaagagagcgttggaaatccgagagaaagttttgggcaacgaccatcccgacgtggccaaacagctgaacaacctggccttgatttgtcaaaaccaggggatgtacgatgaagttgaaaaatattatcgtcgagcgctggaaatttacgagtcgaaattgggaccggacgattcgaatgtg

SEQ ID NO: 49446 - DNA, 654 bp, Heterodera glycines
ctcgcattttgtgccgagcggaagcccgagagagccggttctacttcgaagtgtctgaagtcgcctttccttggctattatcagaagcattgccaagttctgaacgcctgtgacacggaggctgctggcgcggagtgtgtggagactctgcgcacttccaaggcgagcgtttgcgaatgcatcgacgaggcacgcgacgacctgaagcgacggatcgccggcatcgcggaggccattcaggaagcggtgcagggcgggtcgcgggcggcgccatccatcgggtcgaactcgaaagtggaccaatgcgtggccaacatcaagaaacagctcataactccaacaaatgattgggcttccaccattgacaatgcactgaacaattgcatcaagaataagccgagctcccaaaacttaggcatcgattcgttgcttaatgtcggctgtcgaaagattatcgccgattcctccggcgccgctcaagcacagatcaaaaccggattcgagttcgtcaacaacttgatcgacgcgatggtggaacggtcgcgtcgcttttgcggaggcgcccattgcggcaattaattgggcggatgagttggaagggaagaagatggatgggaaggcgcactccactccttcagagaatggaagaaagag

SEQ ID NO: 49447 - DNA, 302 bp, Heterodera glycines
atgtctttggtgtggcgcacatttttgcgtctttcaatgacacttttgttcatgtgaccgatttgtctggacgtgaaaccattgtcaaaatcaccggtggaatgcgtgttaaggccgaccgagacgaggcaagtccgtacgctgctatgctccccgcgcaggatgttgctttaccgttgtagcagggttgcattaatgctcttcatgtccaattgcgtgcaaccggtgggaacaaaaaccaaaacgcgcgggcctggtggtcaagcagcgcctgcctgcccctccttcgttcgggtttgaag

SEQ ID NO: 49448 - DNA, 639 bp, Heterodera glycines
cgatgctgaagcgtccgctgatcaatctcaatcttgagaaatggaaaacttacgtacagtcgtcgccacgcaattattcgatgattgtcatgttcactgtgctttctgcgagcatgaattgccccatttgcaagccagcttatgaagagtatctgatactggccaattcctaccgttacacctttctcaactcgaaatcgctttattttgcactggtcgattatgaggaagcgccgcaggttttcaatttgctcaatttgaacacggctcctgcaatttatcattttccagcaaagggagcgcgacgcaatcaggatacaatggacttccaacggatgggcattgacgcggacgcaatggccaagtttgttcaggacagaacggacatccaaattcgagtccttcgtcctccgaattatgctgcgcctgtggttgtgctgctgctcgtcatgttggtgctcggcctcctctacatgcgtcgtaataacctcgagtttctcttcaatcgcactttttgggccttggtttgcgtgggcatcgtattcgcgttcatgagtggtcagatgtggaaccacatccgtggcccgccctttgtgatgactcacccccaaacgcgtgaaacttcgctggtccacggca

SEQ ID NO: 49449 - DNA, 657 bp, Heterodera glycines
gaaaagtgccacggttgcacgacaaagcagtgcttgtcaaaagtggcaccaaatttgtggacggtcggaagcaggagttcgttgtgggcaaagagattggacagggcggattcggacggatatacgagggcgttcagagcggttctcgtcatgccgtggccatcaaaatggagccgccgtccaatgggccgttgttcaccgaaatgcacgtgtacatgcgcgtgctgaagcctgaacacttggacaaatggaagaaggacaaagggcttaaattcctcggcttgccccacttcatcagcaacggctccttcacttacgaaggccaacaaattcgctacttggtcatcccaaagttcgccctttccttggaatccgtccgcgcggcgcgcactccgtcggcggtgctcagttggaccgaagtgtccgccgtggccaaaacggtggtgcacgcgttggcgtacctccacgaccagaattatgtgcacggcgatgtgaaggcggccaatctgatgatggagtccaaaagtgatttttcccgggtcgtgctcatcgacttcggcctggccaggcgattgcccgacgcactggtggagaaagagaacaaaaagcaagctcacaacggcactccgctgttcacttcctgcgacgcccaccgcg

SEQ ID NO: 49450 - DNA, 331 bp, Heterodera glycines
aatgactggggggaagcgaatccccgcttccggagtccctatgttcgaaatgggaccgccggttacccatactaacattggtcctaaccacattcatttggtccgtcgcctcgacggcgacattacatgtaccgaacttcttcttgataccggagactttacttcgccttctaaacgctgcgctcacaccacgcgcttcatcttccctatctacaacgcttccaacagacacttggtgcgcaccggaacttctaaccagggcatgatcctctcaatcgatggcactcccttccgcccatggtatcaagcgcagtacgcactgccattgagc

SEQ ID NO: 49451 - DNA, 648 bp, Heterodera glycines
atcaattccatctccacttcgtcgccatggtatccccaaggaggaaaaagtggcgccgttttttcccgcactgacgacgaacgctttgtgctgaaaacgttaaaccgtttcgagttggacgcgttcaaacaaagcgcactcaaatacatcgattacatttcgatggcactgatggagggcaaactgaccgcgctttgcaaaatttttggtgctttttccgtaaattgcactaataaacagacgggccattcggtgaagagtgatctgatcgtcatggaatttctgttctacaggaaggacatcaaacagatttgggacctcaaagggtcactaaggaatcggctcgcctccacaaaaaatgacaacaacggcgcctcttccgtgctattggacgagaactacattcagaacatgtggcggaaccaaatttatattacaactcattcgaagacggcactgagtcaggcgatcatcaacgacagccacttcctggccgaccagggcatcatggactacagtctgttggccggaatatgtcggggggaggaggacgaagtgatcgtcggcatcgtggactatatgaggacattcacttttgacaaaaaagtcgaaagtgccatcaaaaatgccattcctctaaccaattcg

SEQ ID NO: 49452 - DNA, 586 bp, Heterodera glycines
ggctgactttgacaaacacgctgcccaacgcgaggcagagtctctccgcactttggccttcttcggagtgtgcctgtccaccgtggccacggctatcaatgtgatttccgtgacgttcgcctaccagcacttccagcagcttggcacccaaatgcagaacgaagtggacttctgcaaaatgtgctccggcaacatgtggtgtgaggtcaccctcacccagacatactccaaggtgtggcccgacagcagtcacaagcgtcaggcaagaggttgctgtggctgcagagtgtctccgccgggcccgcccggaccccctggcccatcaggacaacccggctgaaaccgacaacccggaggctcatgacagcccggatcaccaggccaggaatctcctctcccgtacccgcccagcggaagacgcgtgccgcactgtgaggccgcccagccgggactccccggcccgccaggaccacccggaccctatggagacaacggccaacccggacagtttggaccggatagatctcctgaaaggcaaagggcccagggagctccaggacacgatggacagactgctcaccccgga

SEQ ID NO: 49453 - DNA, 502 bp, Heterodera glycines
  unsure (1)..(502): unsure at all n locations
caaaccactgcagattgaggaatatgataccagcgacgaacaggatttacgcaacacaaatggcaatattccggtacaatggtacaacgactacgaccatgatggatacacatcaagtggcgataaaaacgaaaaacaggccagtatattttacgaaagcgacgcgtctttaccaaaagaggaagactcttactatcgccgtaaggtcctcgaccgacagtcaggacagcaaatggcactcactgaccaacaggtggaaaaactgaatgccatcgcgcacaaccggttcccggaaataaggtacaatacctaccctcctatattggacattttcccctccgaacgcgagattcgcccaatttccaacacgaccccccgagaaacactctntcggtccctaggggcgatgaacgtcggaatgacggccgaatggtccccggcattaaaatggggctgggtaaaaaaagaaagaaacccccccaaacggtcaaagaaccaggaa

SEQ ID NO: 49454 - DNA, 331 bp, Heterodera glycines
gcctcccccaccgatggccaaaccggggcgtattcggatgttccgctcgcttaagcaattcgtgccgaccaaggctggtgagttaaaattgtacggggaggacattgtctatgtgaaggaagcgcctgacgggactacaagttgcgaatccaaaagtgccacggggtacaccgaatgaattctgcctaagcaattcgttgaacaacacatggaactcatcgaatttccattacacggggcggcgatggccggagatttgagctttttgagggagtgtatggactacaagatgtgcgtctatgggttggacaggtccagctccaccgcgttg

SEQ ID NO: 49455 - DNA, 652 bp, Heterodera glycines
ctgattcccatttattataacttaattaaagtcaatttgttgtaaattactgattttcaaaacactgatatgagcaccactttgcaaccataccttgatgcggttcgtcggtccctggaggcggcactctgtcttcagcagtttggttcacaagttgttgaacggcacaacaaaccagaggttgaagttcggaccagcaaagagctgctgttgacgccggtgatggtgtgtcgcaataaacaggaagccgttctgattgagccgtccataaattcggtccggatgagcatcagagtcaaacaggcggatgaaattgagaaaattctgtgcaacaaattcacgaggtttatgtgccaacgcgctgacaatttcatcattttgaggcgcaaaccaatgcccggctttgacatcagttttctgatcaccgcaacacatacccaagtcatgtacaagcacaagttgatcgactttctcatccattttatgcaagagattgacaaggaaattagcgaaatgaaattggcactgaacgccagggcgcgaacatcggctgaggagttcctgaagcggttcaactaaattattcagcttgaaataatatgcatgatagtatgagggtagccgggctctgtttttcaactggttaggcttc

SEQ ID NO: 49456 - DNA, 650 bp, Heterodera glycines
ctcatttgccctgcatttacctctgcgagttttgtttgacctatctcaagagtcagtcggcactcgccagacacgttaaaaaatgcaacttatattacccgcctggaaacgaaatttaccggaaagattcaatttcattttatgagattgacggtcggaaaaataagatttatgctcaaaatttgtgtctgctggcaaagctttttttggaccacaaaacactttattacgacacggaccctttcctgttttacgtgttgaccgaatacgaccagaagggctttcatatcgtaggatacttctccaaggaaaaagagtctgccgaggagtataacgtcgcctgcattttggtgttgccaccctatcaaaaacgcgggtacggccgtttgttgattgaattcagttacgaactttcgaagattgagggcaggacaggatctccagaaaagcctctttctgacctcggattgctttcttaccgctcttattgattccaaacaatccttgagacaatgcctaaaattgtgagccaacaaggacggcccatttcgtcccagggcgaggacggcaaggaggaagaagacacgccagtgtcaccggccatcatcgacctttgggaagtgaccagcattcgcaaggaggacgttttg

SEQ ID NO: 49457 - DNA, 208 bp, Heterodera glycines
aacacagctctcccgacaacagctgagctcatccgaggggttgggcgaatactccgcacggcaattgttggagcaacgggaaaagttggaacgggccgaacagaatatggacaccgttcaccacaccactcagcacacacagcgcatcctgaatagctagaagtcgtggttaggtgggctggtcacaaacaaactttcaccatcgccg

SEQ ID NO: 49458 - DNA, 166 bp, Heterodera glycines
agcttactaccttttgtacaaacttctgttgatcggccactgcggaatgggcaaaacttgggttttgtacagattcctcgacgatgcctttaacacatcatttatttccaccattggaattgacttcaaaatcggcacgattgatctgagatggaacaaaatgaaa

SEQ ID NO: 49459 - DNA, 532 bp, Heterodera glycines
agggttggcaagtgtgacattgcgccggatggacaccgtccgctcgcggctggcagccgccggttcactcgtccaattccgtaagcatttgcgccaggcgctgcgccaacgcttggaccgtctgtacagtgacaaaatggcacgcgcagacgtggcatttgacaccgatgccgcggcaagggaaggcattgacgaagtgttgcgcaattacatggatgctcaatattatggtgacatttctattggctctccaccgcaaaacttcaccgtgattttcgacaccggttcctcaaatctttgggtgccgtccaaaaaatgctcatttttcgacctcgcatgccgctaccatagtaaatatgaccacaaaaaatcgtccacctatcagccggacggacgcgaagtggcaattgaatacggtaccggatcaatgaaaggcttcgtctccaaagacacggtttgcattatggacggtatgtgtgtggaaggtcaggaattcgcggaggcgacaagtgaaccaggcgacacttttgta

SEQ ID NO: 49460 - DNA, 561 bp, Heterodera glycines
ctaaaggttcctattgataacccaaatgaacttgaagaaatttacgattcgatcacttacgcaaaatcaaattcaatcattcggatgctcttcaatcatttgggcgaagcgactttccaaaaggccattcgcgattacttgaaaaagcaccaatacgcaaatgcagagaccaacgacctgtggaagagtttgtccgacgcttctgggattgatgtcaaagcactgatgtcaaggcgcttcgcacacgacggaggaggaagggaaactttcctccgccaacttcggctcctgctcgccgccttccaactccgtgatggaatgctcaacaacgacggagcaacggccgggcaccagcgaacacattgacaacgacgaccactgctcatcgccgcccgttaaaccgttgacttatgcgcaagcagcggccaatagaccgagaagaaatactgcgagcaatttggatacaaaatccttccctttttccaacgtcaaatgattgaatttccctataatttctgattttttccatcactgattgctgattgtgagataaacaaatcg

SEQ ID NO: 49461 - DNA, 528 bp, Heterodera glycines
gttctgaccccgccttggaccccgtacttcgcgaacttgacagtctccccgcttttcagtacagacatcagctgaccaaattctacaaaccggagaaggccctgagaaatgtttcgaatttgtcgttgttttgccatttacaattctcagactctccgatcacttggctcctccggcaaagtcgaacagattgaacacgtggtggcccgtctttattttgccatgaaatctgacgaagtgcactgggctctgagcactctttcggcgttgtattggcgggtgaagggcgacccggtgaatgccattaaatgccttcggcactctctgcacaaatcgccaaatatattcaaagtgccatttccaaattttgttcgcaccattttgccttatctaaggacgtccctctgatttcgctggccaacatttaccatcaagctggcttccttcacagtgccctaatcgtcggacgaaaagcattggaagcgggcgtcgacgtggtcgctttgcacttcactttggccaacattt

SEQ ID NO: 49462 - DNA, 225 bp, Heterodera glycines
catccactcgataccgaacggagactgtgcttcgcgcaaccaaccattgattgggcccctggtgataacccttgcgaagatctggcgtcctgcacgtttttgctgcgctccttgtggagcattccttgaaaatcggaattttttcgagcggctacgaaaggcgtactgtgacagctattacaacgctttcttttcacctcggagttccaactgtaacgggcccat

SEQ ID NO: 49463 - DNA, 651 bp, Heterodera glycines
gtcgccgcatggctgatgcggcggtcgcctcgggcaattacaaagaggcgcagagggtactcggcgaatcgctgaagattctgcagcgtccgttgccctccggcggaagtgtagacgaatggatgtcgctgaccttttcggtcattcgccacttccttaacggtctttggattggccgatggttcgcgcgccgtcgtcgtccctccgttacgcatcaatcggtgtgccgaagtcatgcggagactgcgctggtttaccaccaactccaccagctgcaccttttggatgtggacggaattagattgagttcacgcggtgcgcttaatttggcactgttggccaccaatttggccgagtcggcgggctccccagccattccccactcattccgtgccgaaatttacctttgtgccgcgctccgttccgtcctgtgcatgcccaagtgtttgcgtcgggtggtcgccgcttatttcttccgccgggcaaagcgtcacctacgaaagagtgccgccctcgagggctgtcgcgtgccgaactccgtccaatgggtgttccatccgctcgcccggcatttcctttcgtgccccgtgcgcgtcggcacaattctctcacaaagcggcgtgcaaaagacgccgaactttcccttctccg

SEQ ID NO: 49464 - DNA, 217 bp, Heterodera glycines
ggccggtatcccaccaggaagactgacggaggagcggatagcctggcgcacagaccacccattcggtttcgtcgcacgacagtgcaaaaaggaggacagcacattggacctgaacaattggatctgtgccattcccgggacctagtcgaccatttgggagggtggcctagtaaaattgcgcatgatcttcgaggacgacttcccatccactccgcca

SEQ ID NO: 49465 - DNA, 635 bp, Heterodera glycines
ttcgcttccgctttattttcttctattttaattttgatgcttcgaaaaaatcaatttgccgaattaaatattcgccacagaggaaattccgagcgaacacttgccacagtgcgacgagcagttcgaatgggatacgaatctgttgcaattaatgttgacataggaaaattcggcaaggaatcggacataatttggtcagacgaagaggacgaagtcgtatcgaagaagagaaaacgtaagaaacagaaaaagttgcacgatcgaaagagtggcgatggcaacgaaaggaccagcgaaagtgaaattgtgcctgatccgtttcttgtagacgagtccaagttggatctatcggcttttgcagttaatgggaagcgatttcgtcagtttagtcgtttgacggtttcaattgatgcggattctattcaccatctccaacacaataaaaaagtaaagctttacgatattattgcggttcgtgtccccgatgaacagattttgatgacattgcaaagaaagggtgacttcgttgacctcgtctcattggatgccacggcgatggaaaagggccgtctgtcgtggctatttaaacaaaaaattgtgcaaagttgcatcgccgccggtctcacttttgagct

SEQ ID NO: 49466 - DNA, 623 bp, Heterodera glycines
caagtttgagatttttacaaaaatacacatttaattgaattggcaaatgtcccttcgcttcttcggtttccacgattcggtcagcgaagggaaatttctgtgggagattctcacgcaactgagagggctcggagttggacggtgtgtgaccaaaagcgaatggatgcgcagatggcctgaccaaccgtcctacatgagaatagtcaaggctcgtccgacgatggaccgttggctgcaggagggaagcctttgggccgattggaccttccgcggcaaacatttgggcgtgtacgaattcggcacggacctgaacaggtccgactgggtgctgatccataagcacgaggagaagaagttcacggagaacaggcagcagatgggcacgctgaacattcccagcactttccctgtgcctcctttgcagcaattgctgtccaaaaaatgggccgagaaatgcggcggctccgaggcggcggtgcaccacaaaaaaagggcgccactggacgtctgtctcgacccgaactttgaaatgtatcgcaaattcatcaaacgggtggagccaaagaaaatgtccgtctcaatttacgacgaaattgaccctggcgtcttcctcgacctgtacg

SEQ ID NO: 49467 - DNA, 647 bp, Heterodera glycines
cgacgacacgtgcaggacaaaacaaggcttttttgtggttacggctccaaagtttttccgggaagtcagccggtttcattggaaggaccgcaggggaacaataacattgagtttctggcccaagagccttatatggtctcgtggaaagccgacggtgtcagatatttggtgttgattgacgggaaataccaagtgtacgcatttgacagggacaacaaccccttcttgatacggagcatggcctttattcgacgcccaagacaaaaaccgctagaagacgatgattttgtccacgacacgcttgttgatgctgaaatggttatcgaccagaatgaaggccaacagatacctcgtctcctaatttacgacctcgtccgatttcaaggagaagatttacgtcaaaagcctttcaatgtgcggtttgagatgatcgaaaatgagctgattcgaccacgaacggaggccttcaaagctggacttttaaaacgggaggaagagccaatcggagtgcggaggaaaggcttttggaacattgagtccacgcggagactcctcgaaccgggctttttgagttgtcacgaagttgacggattagtttttcagccagtgaacggaggttatgtgtctgggagatgtgacaaattatt

SEQ ID NO: 49468 - DNA, 636 bp, Heterodera glycines
actccgccgagggatttgcactcgcatggtctccgattcgtctcggcacacttgcttcaggggacctccacaacagaatatttctttggagaatgtcggagggcggccaatggttggtcgaccaacgtcctttggcagaacaccaaagttctgtcgaagatttggcttggtctccaactgaagaagcacttttaatgtcctgttcggcggaccacacattgcgcctttgggatgtccgagcctcccacaaagattcgtgcgtttgtacggtcaaagaagcgcacaatggcgatgtgaatgtgatcagctggaacagcggcggcgagcctttgatcgtttcggggggagatgacgccaaactcaacatttggtctttgaagacaattcaatacaaccaaccagtggcacaatttcaacaccaccaaaagccgatcagttcggttgaatggaacccgcacgatgggacagtgttcatggcatctggggaagatgaccaaataacactatgggatttagcacttgaagatgacgaattgcatggggaagtcgaggggggagaggagaagacggccccaaatgtcccttctcaactgctatttattcacatgggtcagaaagaagtgaaggaagttcatt

SEQ ID NO: 49469 - DNA, 442 bp, Heterodera glycines
accaacgagtaaaaaaacgcgaaaggctgtcgaaaaggctgtggacgccaagaagaagctggccaaaggccagcacattgtgcgcaaaacaaacatgcgcacgtatgtgcactttttccggccccggacgctgaagctggctcgttctccgaagtctccacgcatatcgctgccgaaacaaaacaaattgcattcgttttcgatcatcaaacactcattgaccacatatttttttatgaagaaaattgaggacacaaactccttggtgttcatcgtggacgtgagagccaacgaacatcagatcaaaagtgcggtcaacaagctctacaatatcgaagaccagaaggtcaacactttggtcacacccgatcatacaaagcaggcgtatgttcgcttagccgccgattatgatgctttggacgtggccaagcacattggtatt

SEQ ID NO: 49470 - DNA, 466 bp, Heterodera glycines
gcaagctgaacgaggccgaggacaatatgaattgtcagatgagtgatgtgacggtaactcttcgcgatggtcgcacccaaacattggataatgtgtttatacgaggctcacagatccgttttttggtccttccggatatgcttaagaacgctccgatgtttaaaaacatcggtcgtgcgcaacgtggtgcccaaggcatgggacagggcggtgcgcctcgcggacgcggcagtgcttttcgtggtggtggtcggggcggcggacgaggccgtggcggatttggacgcggtggtaggggaggcggtggtggcggcggaatgcaattccaaggctgaaagcggacaaatccattgaatcgttggagtgtttgtgctgtccgtttcgatcatttttatttgttttgcacacactttttgttgtttggtctcactgcgattgaatttttttataattaagtgctgacaaa

SEQ ID NO: 49471 - DNA, 640 bp, Heterodera glycines
gtttcgcctccagcggatgctccgccgatcgaaattttgcggcattttcaaattcgttgccaatgggtggtcaaagtgagcagcagcattttggagaattggaagtgaaaacggcggagaagacgagcagagacggagaggaaggcaagcggaggacggaggacagacaacaaaaagtgcagagagagcacagggaaaacagagagcagagagagtacagagagcacgcgcttccctttaagggaatggtgggcaacgacccgagctttgagcagatgcgtcaaattgtgtgcgttcagaaactccgtccaccgatggaaacccaatggaatgacggcgccaatcccataatgcattcgctttacgttctgatgacggagtgttggagcgaacattcgctgagcagacacacggcactgaaagtgaaaaaggaattgggggcactgagcgaacaaggcggggacggacgggggaaagagacaaattagcaccgaataaaagtgacaaggaacagcagcagaaagaagaagaaagaagcagaaacagaagagacttttgaaaaaggaaatacccatctttggccttcgagatggcttattcatatgcttctgataaagatttgcgatttaaaaaaaaaaaa

SEQ ID NO: 49472 - DNA, 653 bp, Heterodera glycines
taattatgaatgaagaacaaatttctgctgatgatgctattgtttctgccacaagtgatgacaaattagagtccttttcgaaggaaatggctggtttaataatttctccgcatgatggagtaaaaatacaaccaaaacataaatatgcgattgtttgcggaaagtacgcttattaccattatgggcaacagaatgttgatgacattggttggggttgtgcatatcggtcttttcaaactgtttgttcatggctaaaatttcaaagttacattgatgcgacaaaagcaattccatctcatcaacaaattcagaagtgtctcgttgacatcggtgacaagccgtcaaattttgttggcagtaaaaaatggattggatcattggaattgagcttttgcttggagacaatgttcggcatcaatgccaaaattctttcgtccaaaagtggtgctgatttggcagaacatgcccgggctctcatttatcattttgagaatggcggagcccctgtgatgattggcggtggtcaattggcacacacaattctcggtgttgattataatgtgcggcttggcgattgccaatttttggttttggatccgcattacacgggaacagaaaatttatcggaaatactgaacggaggctggtgtgct

SEQ ID NO: 49473 - DNA, 628 bp, Heterodera glycines
gtccaattaagtaggaaatgagttattattatcaacaacagttaaagagacaggcattagccaaaaacgacagaaatccatccatttcacctgagaatcaccaacagcaacaattcatcaacggagacgtgtcagcgaacacgccgaatagttatgtgacgatgacttacaagccgtacttgttaagggaggacggggagcaaaaaataccgctatttctgatcaaactttggaatattgtcgaggacccgtcgcattgggaagtgatccgctgggacgagagtgggctgagcttccacattatgaaaccatatgtgttttgcagcgacattttgccgtattattttaaacacaaaaacatgaacagcctcgtgcgtcaattgaacatgtacggattccggaagaacacacccatcgagcgttcaggtttggcccgtgctgaatcggaccaggaccatttggagttctttcacccgtttttccgtcgagaccaccctgaactgttggcaaacatacatcgcaaagtgccaaactccgccagacagcaagggcaccatccgcttcccacaccgcagcagcaacaacaacaactgcaatttgttgccaatgtttccgatgtcattggtag

SEQ ID NO: 49474 - DNA, 533 bp, Heterodera glycines
tggaatggcttggctttgtcgaaaaatatgcaaatgtcccttctgtgtgcactttgaatgtatcttcgcttacggataattcctacaacaattggctccaacgcattttggtctccgctacgctttccatggacgtccattccctccacaaatggaacctccgatgtccaattctgttccaagctgagaaagagataaaagtcaaccaacaaactgagaattcggcggaacctgccgttcttctgccaaattcactcactcataaactcattgtttgtaagcaaaacttcaaaccattgcttctcttcagagagatcgacttaaattttgacaaatggaatagaatcattgtttttgtcaacaagaaacaaaccagtcgaaggctctcctctctcatggaaaccttgagcaaaaaaaagctaactgtagccgaattctctgccgatttgttcaaaagccgcagaaaaaaattgttgagagaatttcaaagcggtgcggtccgtgtgctgatcgcttgtgatgtcctttcacgg

SEQ ID NO: 49475 - DNA, 638 bp, Heterodera glycines
tcgagtttttttttttttttttttttttttttttttttcattcgctttcctttactcatcaaacaatcaattaaaacaatggacataactttgtctgctcggaaattgctgtcccaggaatctgtcccagccgtccttccatctcttcaaatgtcctcatcatcgtccgggagttcagcgcttgctgcctcggccacttcttgctcgtatttggcagccaaagcgggatccatttgtacttcgggtggagcgagtgccggcatccccacaaattcgaggttggggtcgccgatcagctttcgtgccaaataaaggaagggcttctcgaaattgtagttgctctttgcggaaatgtcgtaatactggagatttttcttgcggtgaaaagtgatgcttttcgccttgactttcctatctttgacatccactttgttccccaccagcacaattgggatgttctcacaaactcggaccaaatcgcggtgccaattcggcacatttttgtatgtgactctggcggtcacgtcgaacatgacaatagcacattggccttggatgtaatacccatcacgaagtccaccaaacttctcctggccgggtgtgtcccaaagttgaatcggatttgacctccgcgaatg

SEQ ID NO: 49476 - DNA, 205 bp, Heterodera glycines
aagaccacaggcctctgtctctgctacgggtggcggatcatcgacgggcttctgtcgagttgtgatggaattgtttaatgacttcgttcccaagactgccgacatttttccggctgtgtgtcctgtcaatttagggatggacaacagcggcaacccctttctctacgaagggtcgaacttccaccacgtcattcctagtctcttg

SEQ ID NO: 49477 - DNA, 490 bp, Heterodera glycines
  unsure (1)..(490): unsure at all n locations
ggcattggctctacgcaatgtttgggcacacattttggacgacgaatttcccccactgtccgacctcctcaactactatcctttcctggtcatggacacagaatacccatgcgtgattttgtccccggcgggccatttctgcattttggaggacttcacttctcaacgcctgtggctcgatgtggactgcttgaacctcatcctggacagcttcactttgatgaatgagaagggtcagttgccgcccgcccgtgattttttccacttctctttgcacttaaatacagaccccgattctttcgcgcactattcgttggaactgatcttaactgctggttttgacttctgcatgcacctccnagatggcttcttgttggaggactttggtgagctgctgaccacttccgggctggttgttgagccgcgcatcacctgggtgacctttcacagctgtttcgacttcggctacctcatcagagccattatgctg

SEQ ID NO: 49478 - DNA, 640 bp, Heterodera glycines
gtttgagcctttgcatttttaaatggtattcaatcgtatcaaccccattttccttgcggccggcacttcttcggcagtcgcatttttcatcggttctcaatgctcaaccaaagaatggttgaatttggttgggatcaaaagtgcccatgccgattcttccgttgttgttgcgcctcccattccgtccagtgctgctggacccaaaacgccttacccattgagagtcaatgaggatgatgcgcttggcgctgatgtttggctgaagccgtcccgtgcatcggaaattatgcgctttggctacccgggctttgacaacatacgcgcatacgaagattttgtggtcagctatgaccagcgtaatcgtacagcgcattgggtgatggagcatttgagccccgcgcggatggcatacaacgcggaggtaaaccgaggcaacagcattttcaaggaggacgagtccatccatccgtacttccggtccaagaacgaggattataagcggagtggctacgaccgtggacatttggcggccgcggccaaccatcggaccacacaattggccatggaccagacctttttgctaacaaatatgtcgcctcaagtggggaagggtttcaaccgggacaaatggaacgatttg

SEQ ID NO: 49479 - DNA, 631 bp, Heterodera glycines
attcctattaatcaaattttcctacatttttgggccttccatttgtccacaatgaatgtgcatgaggaagacatcgtggaaatctcacgcaaattgaccaaaatgaccgatggttcgaaatcgatggacgacgccgttgaattggtcactgccctggagaacatgcgggtgaacatcgacctgctcagtaaaactcgcattggcgctgttttgaacgaattccgcaagaaaatcaaagacgaaaaactagcaaaacgttgcaaggcattgatcaagcgttggaaatcgttgctggacgagaagttgagccagcgctccaagtcgccggacgaccgtcagcgttcgtcccaagaaaagtcggcaactccgccgccgacggcgaacgccggcaccaaacagtcgacgatgaacaatggccaaggccaacaatcgaacagaatggcaaccaccacaactgcgataccatcccagcatcaccaacagaccatgacaatgtccaacaacagagcgacggcgggggccggcggcaacgacgttcggggcaaaagtgtgcaaatgttggccaatgcgcttacaagtggtggaatgcctcaaggcgctcttgacgcgacagaagttgccggacgagtgg

SEQ ID NO: 49480 - DNA, 625 bp, Heterodera glycines
gtttaaagggtcacatgctcgatgccacagacgttgactcccaaaaattgcgcatcatcgaatggcaacacttggacttgctcaagttttatccgatggctttggccacttcgtgcgcagtgcgcggctttctctacccgttaaatgttgtcaaagcacggctacaactccagaaacagaacaatgtctattctgggatgagacatgcgtttgtcgacattgttcgaaacgagggaatggtggcactgttcagaggcttttgggtaacaatgcctcaacttggcgtcagtttcatctactccaccatttacgagaaattccgaaatgttcttcatgttaatgccaatattcaatccgcgcccgttgtctctgctttggccggcggattttctagcattttcactcaaataatattcgtccctaccgacatcataagtcagcatatgatgatctacaataatcccgcaaaatttttgggctctgctaaaaatgttgccgttttggacttcctgcgaatggatggaaagtcgggccgtttgacctttgggcttcgaattgttcgagcggtttatcacatcgatggtattcgtggattttaccgtggctttttctcctcacagatgct

SEQ ID NO: 49481 - DNA, 226 bp, Heterodera glycines
cgtgcatggacaccacgcagtctattatgggccgccgattacctatgactaccctcctataccatctcaaccttataaaagagtctataaggaactgaagtacaacttcatcatgcatttgccgatgagcttcgtctttatcatgttttgctgttacgatggctattccactgatgtgctgggacactccgcttggaaacttccgggcagctaccgtaacagaaaa

SEQ ID NO: 49482 - DNA, 418 bp, Heterodera glycines
atttttcgccgtttcgttgcccccgcacccgttgcgcatcattctcttcgagctcggtgccttcttttggctctgttctctgctcttgtccgccggcgttatcaccatgtaccgccaacatctgttgctggtcgcccttttcttctccattctgttccaaaaagtggcacgagcactcttctatctgttgctgtacaacacccacagcaatttggcccgactgatggccgccgacacgtaccccaccggatcagtgtccaccatgcgcttgctgtactcggcacggctcattttggccattgtcggtggcctcgggatgggcaccgctgccgcactgtatcatctggccaacttgttggccgcctataggaacaacggcattgtgggcctgcctggcgctgtgacagcaaatcgtatc

SEQ ID NO: 49483 - DNA, 370 bp, Heterodera glycines
cctggaacgcttcatcaacgacacaacgccgcgctccgtgcaggacctgtgcagcgaattcaccaaactcaacgcagcgccacgaccggagccatcgcctgagtttacacggaacttggaatgcaaccgctaccgagatgtgatctgcacggaaatcaaccgggtgcgactccacagaggacgctacatccacgccaactggatcacgaccttcgacgagaaccgcttcatatgcactcaaggcccgctcgagacgacctgcgacgacttctggacaatgatcgtgcaggagaacatcgaaggcattgtgatgctctgcgacaccatcgaacaaaatcggatcaagtgtcatcagtactggccgaccgtg

SEQ ID NO: 49484 - DNA, 363 bp, Heterodera glycines
cgtgcttcatgtccgctcgccaacagccaatacgcaacagtccgagaagagaacggcgtgtgtttcctttttatgaaagtggccgaacggagtcatttcccgggcaaactttgggagaaggtgaagctgcacaggaatttggccaaggccgttgaacagatcagcacgcatttgctgcattggagtgaatacgtccgcaaaaagtgcaaagcgcggcttatgcgccaccaccaatgtgtgaacagaatgcggaagatggagctgaggggacgcactgcgaaagtcatcccattgcacaggaaagtcgaagggggggaacgccgcatggaggaagaagcagtggccgcggctaaattggaacaa

SEQ ID NO: 49485 - DNA, 529 bp, Heterodera glycines
ccatgaagctaaatacttggaaatgtgtccaccccctatgctgcagacacaggacgaatgtggctccacccatttctcccagaattactacggctagaccaatttcctatctcgagcttctcaactgaagctccaaacgagcatggactctttgggacattgatattgcatttcccatccttaccggaatgatcagacatgcatacgtggccctttagccaaatattcgcatttggatgctgattatcaatctctccccttctcagatatgaaggggcactgtggagaaacgacttgtgacagagacaacaaatcgtggccccatccgacaaaccaacatcttatccatgagcaacgattttcggaatcccaatatgatgtcctccctcccgaacgaccttctcttcggatgactgatgcgaaggcaattgaatggcttcaaaataatgaagtgatcaactaacaggggaaacccttccaattccgatacgatattccctaatgacccgaacgagttatcacccacaca

SEQ ID NO: 49486 - DNA, 386 bp, Heterodera glycines
ataagttatgatgaagaagactttgccgattaatgatgaaatgatttcggaaagaatagaagcggaaagggaacgacttcagcaggacaaattgcgaaaacgctatgcatatgaagcaatttgtgctttgaccgacactgtgaacgaatcggaactgcaacgacatctgtccgttttggatccaacttcctggtgtgaagtggtcgaggaacgttttctgggccgtttgtgcggttttcccctttgtgccaaaacaatcactgtcgacttccgcaaaaagcatacaattgtgaggcggttgaatgaatccacaagaaaggaacacaaaatgattgtgcccactgaatcggagcccgtgaaattctgttctgatcgatgcatgggaa

SEQ ID NO: 49487 - DNA, 274 bp, Heterodera glycines
gttgaaaccaaacgttggcatcaacggttttggacgaattggacgcttggcattgtgtgcgacgattgaaaaggaccctgtccctatggtggatgtcgattacccgttcttctgactcgactacatggagtacttgatcaactacaactccacccatggctgattctatggcaaaatttcctctaacgccggccatttggtgatggagaaggaggggaagaatgcgctcaccttctattagatcaccctctttgacccggacgacattttatgg

SEQ ID NO: 49488 - DNA, 421 bp, Heterodera glycines
gggcaagccgactagtgtgaaggacgttgaccaacatgatattgtccagtcggtggccacctttctgaagaagagtggcaagatcaagttgcccgactgggtggacttggtgaagttgggcaaaaacatagagttggcaccgatcaatcccgactggtactacgtgcgcgtggcatccctcgctcgacgtctggacatccgttcaccggcaggtgtcagctcgttccggaacgggtatggtggaaaaagtcggcgcggtgttgcacccagacacttctccaaagcgtccggggcagcgattcctaacgtattgcaatcgttggaggaaatcagatgggcggataaagaccgaagtactggtggacgcaaactgaccaaacagggccggaaggatctggaccgtattgcgtcacagctgcga

SEQ ID NO: 49489 - DNA, 340 bp, Heterodera glycines
gtccccagacgaatttgttgcacctgtgggagacgtgcatgcgtccgtggtcaaatgtatgcaaaaagtgagcacttacggggagcacgccgcgcaattaccggaaattttgttggatgccgacatcggacctcattacagccatggcactaaccgcctatgcatttacattgaggacgtccccactggcggaaaaggctacggagaacagaatgcgttcaagaaaaatgaagctaccccttgggtggacggctgctatctgcttgacaccgacgtcaggaatttcagcactgaaatggccatgaagtcggtactaagagcacataatactgctgggtgg

SEQ ID NO: 49490 - DNA, 634 bp, Heterodera glycines
cctcgtgccgcgagaatctcgaggattggacttcggaatcgcccaacaaattgcactttatccgacagcctcagaagtgggccctcttcaggcatccacagcactttctgatcgctgatcggaatcgaaacaacgaatttccgccggtggagagcattggcgaatgggatacggaacagaaacagcggttgctgaacgcgttcctcagggaggacggaggaacgcgagtgcccgaattggaggggtggctgatgctgaaggcggacggcaagaagtcatggcgacgacacttttttgtactccgttcctcggggttgtattacgtgccgaaggcggggaagccccgggggcccgccagggatttgaactgtctgatgagcgtgttcaacaaccaagtgtacatgtgcacggactggcgcaaaaagtacaaagcgcccaccgaattcggatttgcaatcaaacatccgcgcatccaactgaaaacctccaagtacatcaagtacatttgctgtgatgacgagttcactttccgccaatggctgacggcgcttcgaataacaaaaaatggctgtcccgcgctgtacaaggacttccgtgccgctcagtcgcgcgagcgtccgctcgtcggccccgc

SEQ ID NO: 49491 - DNA, 616 bp, Heterodera glycines
cattgccaagaagttggaagcaaatgagaacaccaacaatttgaatacgtccacttcatgtccgacgagtcccgcttccaaattggaacagcagacgaagaaacaaatgatgagggtcaaatcggacaatgcagtgaattcgttggctgattttgaccaagtttgcgcatttcgtaagggactcgctcctctagcaaaattcggccacaaacagcaggtgaatgtgcttttttcttgtgtccagcccacttccagttgtgtgaaacggtctcgtcgttacgttgcgaaggatcccgagagaatgttggatgcgccagatttattagacgatttttattcgaatttgattgattggagcaagactaattgtgtcgccgttggcttaggatcaaaaatttttcaatggaacgcggggaccggtgccgtggatgagataaaagatttctctgaaacgcattcgcatccaactctcgtcaaatggtcttgcgaaggacaatatcttgccgttggattcaatgacggacaattaaagttgttggacagcgccaccaaaaaagtgctgagaacaattcacacgacggcaaacatgcgattggcatgtgccacatggacacac

SEQ ID NO: 49492 - DNA, 560 bp, Heterodera glycines
aggacagccattctttgccggatttggcaatcgcgaaacggacgttaaatcgtatcttgcggtccaaattcccccggaaaggatcatgattattgacccgcaagggtcgctcagaagggcggacaacaaagcgggtggttacgtgtccgattacccaaccttggccatggacagtgtcgactacgtgttcccgcctcgggtggacatggacggcatcgacattaggacgaaagaggacggcattttgagtgaattcgtcgcatggcgaactgacgctgaacaattcgatgcgctggtggacgcggaattggaacagtacgaagaaaggagcaaacgagcgaaagcaattgtcgcggggacgacggatggacgaggggcggacggaaagaagaaaatgtataggaacggaagacgggcaaagtgatcagagcaaaattatggatgattaattgacgaccataataggcggaatgcgggagaccaaccactcttttgtttggtttatgtaattaactagcctttgtgtcaactgttcaaatggatttgtctcatatcattaa

SEQ ID NO: 49493 - DNA, 641 bp, Heterodera glycines
cttcctttccctctattattacgctgcacactcgtcgtccaattgtgctgccatcagtttcattgccccccatggctgatgatgttgctcctcccgctccttccgttgccgtcgatgactttgcgcagcgcaccggccaattcttcgacttcatccgccagggaaacatcgaccgattgcgtgcgctgatcgattcgctgagcgtcgatgagctgaacaccttgctgcagatgagatacaacgaacaacaatttgcgctgctggtcgcagttatggaaggacaccccgaaattgctgcacttttgttggacaaaggcgcggacgtgcatcagaccactgttggccgagtgaacaatgtgaccatggccgttatgcccctgtggattgctgtcaatatgcgccacttggagatgtgccgtgtgctgatcgctcatggtgccgacgtggacttgggaagcgattcctcctttacaccgctactgctcgcatgtgccaaaggcagcacagcaatcgtcactcttctcgtggagagtggcgccaacgtcaatctcggggacagcgaaggagtaacgccgataatgatcacttctcgtttttgaaggggcgaacctgtgcacttcttactttctcacggtgcaaac

SEQ ID NO: 49494 - DNA, 641 bp, Heterodera glycines
tgatgaagcgctgaatttgaatgatttggatgaaaaagaggttcttggtgatgacgaggaggaccaacaccaaaatcaacacacaacaaaagaagaagtggaagacctttacgacgaagccatggctccgtccggtgcactctctgaaaagcgcgagtcggctgaagttatttcgtcgttgccaagttcgattcagcacaaatcgtcgtttgccatgcctatgatgatcaaatctgagcccggcattgctggcgggtcgcaaagtggcaaacgctactgctgctacattggcaatatgacttggtggaccacagacgatcaactccagaaactgattcaaaccctcggcgtcgacgatatgattgacgtgaaattctacgagaatcgcaacaacggacagagcaaaggttttgcgctggcagtgttcgccagtgaaccgtcggtgaaagcggtgatggagaaattgccaagcaaaaagctgcacgaacaatcgctggcggtgttgccgtacactaagcagtcgttggccaagttggaggaggccaccaaacgctacgaccagaaaagtcagaaggacgataaagtggtcaacattggcacagtgcgcattggcaccaatggcgcgcccgttcctcagttga

SEQ ID NO: 49495 - DNA, 337 bp, Heterodera glycines
gtgcgacgaagaagttgctgctctcttggcggacaatggatcctgaatgtgcaatgccggtttcccggtcgatgacgcaccccgcgcggtgtttccgtccattgtgggccgcccccgtcatcagggcgtcatggtccgtatgggacataaggactcatacgtgggacacgaggcacaatccaaccgcggtattctgactctgaactacccgattgaccactgcatcctcacccactgggacgacatggagaatatctggcaccacaccttctaccacgagctgcgtgtcgcccccgaggagcaaccagtgctgctcacatgaggccccactgaaccc

SEQ ID NO: 49496 - DNA, 626 bp, Heterodera glycines
gcgttcagtgatcgacgcggatgagagggaacgcgtggtgggcgcggtggcgcggacattcgtcgaaatgttggacctgcgcgaaattcaaaatcggccccacccttacgcttcatccctcgcccgtttcaacccaattcggctgatgaatggccatttggtctgttccctgtatttgttcaccaaagtgtgctattccgtcaacattatgctccaatttgctcttctcaatgccgcactgacctcaaaagaccattttctgtttgggtttcaagttctgtccgacctttacgagggaaaaccgtggacaaagtcgggccattttccacgagtgactctctgtgacttcgaagtgcgttatttggccaatttgaacagatacactgtacaatgcgctctgatcattaacattatcaacgaaaaggtgttcgctttcttttggctttggtactgtctgcttttatgtgccacaacctgttccgccctgttttggctcagcaacattctgttgcacatcgcccgggtggactacgtgctgaagtttatgcaaattgctgaacacagtgaacaacagcgaagcagcggcagaacgccaaaactatcgcaacaaaagtgggcgatggtgg

SEQ ID NO: 49497 - DNA, 653 bp, Heterodera glycines
ctttgccggagaacacgcacaaaattgttattttggacgaagcggacagcatgaccgaaggtgcacagcaagcattgcgtcgaataatggaggtattcagttccacaactcgttttgcgttcgcgtgtaatcagtcggacaaaattattgaaccccttcagtcccgctgtgccttcataaaatacggaaaattgacagaccaacaaatattggaaagacttgtttgcgtctgcaaaaaagagagtgtccaatataacgcggagggcctcaatgcgatactttacacagcacaaggggacatgcgacaggcactcaacaatctccaatgcaccgctgcgggctatggaactatcacaaaagactatgtgtacagagtgtgcgacgaaccacaccccgagaaaatgtgtaatattttcgactgttgcatcaacggtcgtacccaagaggcgttcgatttaattgacgagctttgctgtttggggtattctgtcgatgaccttgttggcgttatgttcaaaacggcgaaaatagcggatattcccgaaattttgcgtttggaattcattacggaaattgggaaatgtcatgccttggtggtgcagggggtggccactcgactgcaactcgccgggttattagcgcgtttgtcacaa

SEQ ID NO: 49498 - DNA, 624 bp, Heterodera glycines
ctcgtggtcacttcagtggcggaagagggtgtcaacatcgccgcttgtaatctgatcatcaagtacaacaacgtcggcagcgaacggcaaatgatccaacgaagaggccgtgcccggcagaagcacagcctgtccattctgttggcgctggacaccggcattgagcagcaggagttcagcaacatgcgcaaggaggccatgatgatgcgctgcattgaggacatgcaggagcaagatgagcagacactgcgcaaatcgattgaggaaaaggccttcgaattggccgaacttcgcaacgacgagaaaatgaaggtggagagcaaacgggcccagctgatgggcaaacgtttcgatttgaaatgcgcctgcggcactgtgatttgctgcagtgaccgcgtccgatcggtgatgggcactctgtttgtgtgctgtgaccccaaagtgtggaggcgatcgaagcacacgctgacacgcgccccaacgaaagagaaattctacacaaactgtgcccgttgggagtgcgcaaattgtggcgaacattggggccaaattgtcaaattttccaacgtgtttttgcccgaaattcgcgtccgcgcattcatattggagcgagtggatgaacaa

SEQ ID NO: 49499 - DNA, 632 bp, Heterodera glycines
gcctcgtcctggccggaagtgctgattttaagaatgaactcgcccagtccgacatgtttgaccaacgattacaggcaaaaataatcaaaactgtcgacatatcatacggcggtgaaaacgggttcaaccaagcgatagatttggcagccgatgctttggcggatgttaaattcatcaaggagaagaaactgatcagcgcctttttcgacgagatttcccaagacactaacaaggcaatttacggggtaaaagaaacactgacagcattggaaatgggcgccatcgaaactctgatttgttgggagaatttggatctgataagatacgcattccgaacaaccaatggtgaaaaagtcgttaatctgaagcccgacgagaaggaccggtcgaactttgtggacccggagactggaactgactacgagattgagtccagcacgccattattggaatggctcgctaacaattacaaacgattcggtgcggcacttgaaattgtcaccgacaaatcgcaggaaggagcgcagtttgtacgcggttttggaggactcggaggtgtccttcgttattcggtggacattccgcagttggatgagctcgagaacggagtagacgagatcgacctcagcgag

SEQ ID NO: 49500 - DNA, 292 bp, Heterodera glycines
tgttggggaattgtccatgccctagacaaatcgggacgatctcgcccgagccgatctgaaggcttcttctcggacttccactctgcttgccggcttctccatgatcgatctcatggagctgcggtaccatgagtcgaccccccagtcgccgctgatcatgctcgtggaggtcacttatctgatcctctgcgttcacctgctcgctcagatgatgaccacctggcagttgccgtacatctagggagagggatggacacaagactcccctcaactacaattgcccttttacatc

SEQ ID NO: 49501 - DNA, 509 bp, Heterodera glycines
gatttttgatcacaaatttgatcggctggaaaaatttttcttcatgccgacctgcacattctaattagtaccaaactaattaattggtactgcattaaatactacaactattatattcgcaatccgtaaaatttctaaaaaaatttttttttctgacgggacgacggggagccaattacatcagcggcggcaacggtggcatgtcaccgtttggtgcccaagtccgtgactcgcgggaccgggagaagaaggaactcagtgatctgaacgatcgattagccaattacattgaaaaggtccgtttcctcgaagcacagaaccgcaagttgaaggcggacctggacatgccgcaaggacgccgcggcaaggacaccatcaccatcaagacgatgtacgagagcgagattcagacggccaaaaagttgatcgaagacacgggccgatcaaagcacgagttggagcaggacgtggccaaactgcaacgtgacttggacgaacagcgccgcaaa

SEQ ID NO: 49502 - DNA, 562 bp, Heterodera glycines
ggcgaaaccaaaggttggcatcaacagtattggacgtattgtacgcttgccattgcttgcagcgattgaaaaggacactgtacaagtggtggcggccaacgaccccttcatcgaactcgactacgtggtgtacatgttcaactacgactccacccatggccgtttctagggcaaaatttccacaaacaccggcaatttggtggcggagaaagacgggaatatcgcacacaccatccaagagcccaacctctaagacccgggcgaaatcagatggcgcgaatcatccacggaatatgtgatctaatccacccgagtgtttaccaccattgagaaggcctctgctcatcttaaatgtcgtgtcaagaaggtggtcatctccactccttctgcggatgcgccgatgtacgtgatgtgcctctacgaggacaagtacgaccctgctcatgacaacgtgatctcctatgcgtcgtgcacaaccaactgcttagctccgttggccaaagtgatcaactacgagcttggcatcatccaacgtctgatgaccactgtgcatgggctgacc

SEQ ID NO: 49503 - DNA, 428 bp, Heterodera glycines
gaattttcctcttccgcctcgtccctccggcaaagtaaaaattacgagcggtacgtacggtgccgaggacgacggcaaagcttcaaatgccatcgccaccgcctttgctccaattgcaccatcatcaccaacatcaccaccaccttcagcatcaacaacaccaacaagagcaacaccaacgagcactgtcttcggagagcgcacttcggcttggcattatgccgccgggaaacgatccgtcgatggcaatgcatcagccgatgcgaccgggctcagaaatgagagcgcaaattgaagtgatcccatgcaaagtttgcggcgaccaatccttcggcggtcattaccgcgtcatcacttgccaaagattgaaaggctttttcccgcgttctcaaaatgcccccggtgaattacaatgcccgccgcaaaaa

SEQ ID NO: 49504 - DNA, 606 bp, Heterodera glycines
cgggtgatcagtcccacccaagtgcacatccaccagaacatccacattctgcaggaaattgttggcatttcttccctctcctggagtcaggacagtcgctacttggcggtgaccagcactgagcaggccaacggagtcgggtgtttcatttacttcgtgccaagaggtcgtctcgtcaaggagtacgtccattacaccggcgatgcctttaccaccgtcgcctttttcaaagacggctcccacaaattggcatgtgccggcgaaaaaggccattttcatgtttatgacatccatcggcccgaggacagtgccaaaatgttcgaaggttttcgaattcgttgtttatacgcgtgcatggacgggaaaactgttttggcagcggacactcacaacagaataagggcctacgatttcgaaacgatgcacgagcaaacgctgattcaagaggccagccaaatcatcactttttgcgttgaccgaaaagagaagtattgtctggtgactaccaaaaccgagggcattcggttgtgggacttgcggacaaatgacctcgtccgctcttttttcggctcaaacacaacgaatttgtgatcacttcttctttcg

SEQ ID NO: 49505 - DNA, 181 bp, Heterodera glycines
taacaaaatgaagaaactgcaacaaaatgctgaacatgcgcccactggtggaaacggtactgctagaaggaataacaaagtcatgcacatcactactgccatggacgacgaacagctacttacgaatctgaccaagctttcccagactaacattcctggcatcgatgacgtcgatatgatc

SEQ ID NO: 49506 - DNA, 616 bp, Heterodera glycines
taaagtggtcgaattgcttgccgatgcgttgctgaaccaaaactttgacgcgtccaaaattgaggagcaacgcgccgaggcattggatcgactgcataaggccgagaagggcgacattcgcgggtcagtgctcgacaatttgcacgccaccgccttccaaggaacaccgctcagactgtcaccacttggcacaacaaaagcattgaactcattgaccaaagaatccgtgtccgaatttgctgacgacattttgaaggccagcggaatggtgctgacggctgttggtggagtggaccatgagaaaatgagcgatttggccgaaaaacactttggccaccttggcaattcgtacaatcgcgaagtgcctccacatgtggcgtcagtgaacaacattggacacgaacaaatccgtccaaagggttatcggttcactgccggcgagttcctctaccgggacgaccattacccgctgatgcatggcgcaattgcggaggagggcattggcagaaaccaccttgactacatcgccatgctggtaggaaatgcctatgttgggacatgggatcgttcctttgccgcatcgctgaacgctccgaagtccacggtgcagaagatg

SEQ ID NO: 49507 - DNA, 157 bp, Heterodera glycines
  unsure (1)..(157): unsure at all n locations
cgcgcacgacaagagccgcaaccaggcgcngaccgacccggcccagagggagagagggaaagagcgcagcaacaaaagcgcgccgaacaaagccgacaagacactgaccaacaacgacaccggcaccggcaagaccaaagcggaccccgccaacaac

SEQ ID NO: 49508 - DNA, 585 bp, Heterodera glycines
caaaaggccacttcggctggtgatactgttgagaaccatgtcattcctacaccacaagtgtcaacgattagtgatgatgactacaatggaatataccaagacagacaacttcccaaggggaaacgactcatcacattcgatgatcacgtgtccttcttcctcttgcaaggatcttataatgcagactccgaagatgaggaatggatgtccatcaaccgaaatgtcaacattgatgattttgagcatatcatcgaaaggctcgaaaatgcttcacgcactgacataatccatctcagaaatgccagggcacttttgcaacggtttgaccctggattggtggacgatgtctacgactattggttacaaaagcggaagcttgccgcctctcggaagagcaaatgtacggctctcattcccatattatgcactgaacaacgccgtgacgaaaaaacgctggtcaatccgtacatcgcattccgaagacgtctggacaaagtccagacgcggaagaagttgaaaacggacgtgctgacatacgagaaaatgctgcagttgaacttggcgcttaagcggtccattgttttg

SEQ ID NO: 49509 - DNA, 582 bp, Heterodera glycines
ggaaatttctacgagtcgctcattaattccggtctgttagacaactttttgagtgaaggaaaaaaggtaaaaaacattttattcagttaccgattcatttttttgatttagcatgtttttttgagcaacatcgataatttgggcgctaccgttgacccaaacattctcaattacatggtggccagaaaggcggaattcataatggaagtaaccgacaaaacgcgggccgacgtcaaaggagggacactgattgaatacgaggggaaactgatgctgttggagatcgcccaagttccgcctgactatgtggacgagtttaaaagtattagcaaattcaggtaatgcagggaaaaagagtggattttagtgttttttgaaaatcttaagaatttttaacactaacaatttgtgggccgaattggaagcgatcaagcgggtggtactgaacaaagagctgaacatggaagtgatcgtgaaccccaagcatttggatcgcggtgccaatgtgattcagctggaaacggcggctggcgcggcttgcaaatgctttcgtggggcctgtggtaaaattcattcatatgg

SEQ ID NO: 49510 - DNA, 608 bp, Heterodera glycines
cttcttcggcgtgtgcctgtccaccgtggccacggttatcgctgtgctttccgtgccgttcgcctaccagcacttccaacagatcggcgcccaaatgcagaacgaagtggacttctgcaaaatgcgctccggcaacatgtggcgcgaggtcacccgcacccaggcctactccaaggtgtctcacgacagccgtcacaagcgtcaggcaggcggttgctgtggctgcggagtgtcgcccccgggcccgcccggaccccctggcccatcgggacaacccggccaacccggacagtcggcaccacccgcgtctcctggccgccccgggccccagggacctcctggacccgatggacagcccggcaaccccgggagagtctgggcaacccgggccagcccgggaaactcacccagggaccgcgccgtcagtggaccagcggggccccatagagaacccctggggcagtctgggacggacctgggaaaaagggcacatcccggcgcgatccggggagaagccgcgcgccgcgagggaatactccgagaggaatgatcgtgaagacccccagcacaaagagcaagtagattttgaacaggaaacaatagtcaag

SEQ ID NO: 49511 - DNA, 526 bp, Heterodera glycines
cgccaatctgatcctggccaaggtgtcgattctacgcatcaaatttatcgggactttccaccacatgacggatgacctgaacgtaaacaactcggtggccattcggaacacgcatttgatgtggtactacagctcttttgactggcgtgtccggccgttggtgatggaggttaaagaacgggcaaagcgacacggaatcaacgactcaggctgctcctccttcacatcgcactcgctggagctgatgggcatccactatttgcagtgcggcgcgcaggcaccggtgctgcccaatctgcaggaaatgtacccgaaacggttcaacgtacgtgcggatgtgcggactctgaacgagtcgttgccgctcaagccaattccaagcgagatgggctgggatgtcaaggacgacgcgacgctcaacgagttgctgctcggcttcctccgctactacgccttccaattcgactttgacgcggacgcgataagcattccaatgggaaaaaagggcaacagggcacatgtggca

SEQ ID NO: 49512 - DNA, 562 bp, Heterodera glycines
aaaagcatcgacatcgagcggaatgggaatgacaccagtgggcagcgaaggcacaaatcccaccggcaacaacggcacgcaacccttccgattccatcggcgcgacctccgcgtcttccgcatcgaacggctcttctgcagtcccaacggccaccgcttcattttcggctattactacgcgcgaccgcacgaaaccttttgcgattcgtcacgcaccttttatcgtaacgaattgttctggactccgttgttcgacacacttccgctcgattcggtggacgaacgatgtttggttttggagccccaaatttgggcgatgggaaggccaaaatcaccacgttatttggaggacgatgtgttcgtgtgcgaatatcagatcgatcggaaccagcgcagctttgagaaaatccccccgaagaatcgctactacatcaacactgagccatttgtgttcaactttttcgagaagaaattgacgatgaaaagggattttacgcctttcaaaatcaccgcttcttccacccgaaaacaaacttcgtcctcatcaactgctagcagggac

SEQ ID NO: 49513 - DNA, 618 bp, Heterodera glycines
cctcgtgccgaattcggcacgagggacatttttaccatgggaatgacacggccaatgttggtttctgccgcaatggatgccaccattcggatttgggacgtggcatcgcagaaacagttggaggcactcccctacaaagaatcccaggtgaacaacatttgcattacgcccgacggtgcccaactgctcgtcggcgcatggcaaaacattcgtttttacgatttgcaatgtccaaccgcgcaaggactacacacattttctgtccatgagaaaaatgtgacttcggtcggcttccaagtggacggtgcgtggatgtacacgggaggggaggattgcatggccaaaatttgggatatgcgcaacaatcagctgaattgccagaggatattccaagtgaacacgccggtgcactccgttgtgctgcatcccaaccaagtggagctgatcgttgccgactccaccggcgccatttatttgtgggatttgcgctccgatcgggacgattcgctgatcaccgaagtggacatgtccgaatttgttgttcacgttgacattgaccaagtggggcgacagtgtgcggcggtgacaaaccggggcaatttgtttctgtgggacgtc

SEQ ID NO: 49514 - DNA, 642 bp, Heterodera glycines
agcaaccgccccctttggatttgtcctcgaaaagtgacgggggaagcgccgctgagcacgcgcacgagcgacaccatcaaaaccataacctacagcagcagcagcgacacccgccgatctcatcctcacaactgttcgacccgccgcaactccaccaaactttggcaccgcctctcttctcgcccccgttcgtgcccttctcccttggccctccctgctcctcctcttcctcctcctccgatttgctttgtgtccgtccaatgccaaacttcgacatgaaaccaaattgcgcttcaccacagacgacgcaacagaacgaagaggacgattgggaggcgatgatggaaataagcaacacggacgagcaagagaaaattcgcgagttggccggcgaaaacgcattgccaacgacggacccaaatcaatgcattatctgtcggagggtattgagctgcaaaagcgcattgcaaatgcattaccggactcatacaggcgaaagaccgttcaaatgccgaatttgtcagagggcattcaccacaaagggcaatttgaaaacgcacatgggcgtgcaccgttccaaagcgccgctgcgtcatcagatgcaccatttgctgaacaacggcatgccgaaggcggaaaatg

SEQ ID NO: 49515 - DNA, 499 bp, Heterodera glycines
gtgtcgcgaggaggaaattgctgctctcgtggtggacgatgggttcggaatgtgcaacgccggcctcgcgggggatgacgccccccgggcggggcttccgcccattgtgggccggccccgtcttcaaggcgacgtgtccggcatgggacacaaggactcgtacgtgggagacaatgcgcagcccaagcgcgcgattgtgaccctgaactacccgattgggcacggcatcgacaccatctgggaccacatgtagaacatctggcaccacgccttctacaacgagctgcctgtggtccccgaggaggacccggtgctgctcacagacgccccactgaacacgaccgccaacatagaagagacgacccaaatcatggtcaagaccgtcaacaccccggccatgtagtggctcaaccacgccgggctgtccctgggcgtccccgggcataccgacggacgtgtcgtggactccggggatggcgtcaacgacaccgtgctcatc

SEQ ID NO: 49516 - DNA, 638 bp, Heterodera glycines
gaaaaaatgaaatgacaaacggtttaaatagtggtgtcactgctaatcgatcgatttttgtctaacatcaccaaagagtcacattctcccatcaccaccagcattattcctccgacaggtactggttgattgaatttgatactcaccgctgtggtcccattctttatcaggtcaaacagtgccgcttggtcatccccgctgtttgtcagattgaacacgtaaatgcaatgagtttttccgtattgagcaaaagttatcccattgctctccgatgaattggcgaagcccaccgcttcgttcatgtcattgaagggccgaacatattttccgtttctgtaatccaaatcatagggtgcttgcggatacgatcgtccatttgcaagaatggaaatttcgcgcacattaaatggttgaaaattgaatggactgcgcaaaattgtcccaacatagtcagtattagccaccagacccattgtcacacgacgaggaatttggtccatgaacatattggcagtaaactcatatcggccctgactgatgaacatcgatttcatcattgtcttccgcacagcataacggacaggtttcacctccagctttcgcgcaatgtctagcgccaacccatccatcagagacac

SEQ ID NO: 49517 - DNA, 655 bp, Heterodera glycines
gttcaatattcctatcatttcctcggatcgtttgccaaaactgcgcaatgttctcgccggtgtcttctccattcaaaacacttacaaatataacgacaattatccgttggacggtgaaggaaatacaaaaggcttttgctttttggagtaccaaacaaaggaggcggccaacgcagttttggccatttgcgatggacatcgccttgacaaaaaccacacattttcagcgtatccattcaccgctattcgaagcatgaaggagccggaaaaggactggaagaaaccggagagacaaccttatgtcgatttgggtgacccatggtcttggctgcaaaaccccaagtgtttggatcagttcggtctcctctatgaatcgggccagggtggcactctccgtttggatgtgttttggaacgtcagaaatggcgagccaacgcccgtggacaatgcttctcgagaaaattggtccaatgaccttttcaaatggtctccccatgggacttatttggccacgatgaacaatgacaagcggaatcagcgactcggagccgtaatttggggcggcgaaaagttcgacagatttcaacgcttttcccacgagggcgtcaattaccttgacttttcgccaaatgagaaatttcttgttacttatgct

SEQ ID NO: 49518 - DNA, 599 bp, Heterodera glycines
attggactggtgtccaatcagaattacattggccataatcagaagaatcccttctattttaatcaccacaacgtgagtggcaaatggcaactgcttgtgaatcagattattcaggtgcgggacattgagcttacggcctctggcaggacatatccccagtacccgtacaacctggactacaagaacaacaggtacgcaagggcatatcacgatgcccaagagcacctcggcatggcgtgcaaacggagagcaacggaatcagctacagcatgttcaagactgcctattgcctctatgtcttccaaatgaccaacgcgcaggaggactcgccaggatttgagctgatcaaagagggctgtactgcagtgaacatccgattcactgaagcagtacccaacgagggagttacattgattgcgtacggagaggcagacgggctcattcttattgatcgtaaccgttcgatcactagtgacctcacagtatgagtcagaattattactctgaaaacattctgatggacacgcctccgagggacgggataatgatgtgctttcccgatgttattgaaaagtcgccaataaactttctcttctgcc

SEQ ID NO: 49519 - DNA, 572 bp, Heterodera glycines
aaacaggcattcgaattcaatcatttgaaatgggtattgcctctgccgttctttccgttccccggcattttttttgctcgttagggccattaaacatttaagccgaattgaatttcttgcagcacaatttgtgcgtttgcgcccgaaagtcggcgtgcccatcagatgcttttgtgcatgcaatcgatgcttccccatttggtccggcatatggaagaggagacaaatcagcgacaacagcaggcggccaacgcgctcgctgcgcttaaattggagctgtccgcttatgccacgctgagcgtggaacttcgtgctttggtcaacagttgcgacgtgctcgcgcgtgggccgacccggtcctttgatttggccgcgagcggcggaggcggtggaacggccggtggcgcttcgctggcgccatcctccgcaaatcgtccgcacgcgactgacccgcgtcgcggtcgttcgcttggcggtggtggggccgactctccgcaattctttgatccgccgacaattgtggaggacgaaatgagtcgccagcagcagtcgaccgcctcagcgaagactga

SEQ ID NO: 49520 - DNA, 582 bp, Heterodera glycines
cttcgaatttggccgcgcgatattgcgggactgtggcaccaaatgtgcagatcagtctgcacaatttgatggttttggtgttccattctcgggttggtcgatcaacggaccgggactttcgctctcggcggcactttcgaattcatttccgaggcgccctttttgccgggatctccactccccgggggcccaaaagggtgtgcctttttgatagagccaaacggagccaacgacggcaccggtgtcattttgtcgcccacttaccccggcgtttatccaatcaatttgcaatgtttgtttctgctgcggggcctcgaccaccaacggatccgtttgttcttccgcaatttcgacgtgtatttcggcggcaaacactgtccctacgattcttctgacaatttacgacggcgcctcaacttccgatccgatcattcgaaaactctgtgggctccaacaacgacttgaactgttctcattcggacacgaactgttgctggagtttaacaccaccgaagtggaggggaaagtgggcgacaggggctttcacattgagtaccaattctcggataaattcgtggacat

SEQ ID NO: 49521 - DNA, 481 bp, Heterodera glycines
tcagaagtgggaccgtatctgagagatttttgccacggagatgccctcgacgcttcacgttcaacgaagccttccggagagggattgccgtgtcaatttccttgaacaacacttttgcaagcaaatcgcttccattgcggcgacttccgatagtgaccgagatggcattcatcgcgcaaaatctgtaccttttgtgccctatgcctaccaaactaggatgccgcgctcgatggtcagacggcacccaattctagatgaataccacgagttgttggtcaatgacactgaattggagaacctgaccatacacgacacgagcatcttggacgcaccacttttgtaggatgatcgaccccaccgacaagtgctggacgcctgtgctgtcccgggtggcaaaaccatgcaaataattgagctgatgcacgagcactgtcgctaccccaaatgcttagcgctgggcaatgactcacactacaaacag

SEQ ID NO: 49522 - DNA, 253 bp, Heterodera glycines
  unsure (1)..(253): unsure at all n locations
gatttnncccggaaagaggaggacccncgaagnggaggcgagcgacaccancgagaaggcgaaggcgaagagggaggacaaggaggggagacaaccggaacaaaagagncgcancggagcaggaaaggagcgggaggagggacgaaaccnagcggacaacaacaggcagaaggaggcnacnaaacaaccggggcaggggaaagggggatttttgaagatctttgagaggactctgagcggaaagatgattacc

SEQ ID NO: 49523 - DNA, 385 bp, Heterodera glycines
tatggacctcgacgaacacagtgagatcagaaaccaggatctgaaaggactgaacgccacactcgcaaacgtggcgatggactcccctgtggacaacttgctcgaggaagaccctgggacactcgatgacgccgactttcataccctgctcgcacaacaactgtgtggacctgaccccgatgccacatatatcgaggcctatactgtgcccgacaaatctgactgcgagcgcatcgcagaaaagatgttcgaggtggttctgcacacccgacggagggaccccttgacagtggacgaactgaaacgcatgttcaagagggaccctctcattaacgcaggcaatgcggactacgatggcttcgcgcgttttatctccacaggcgca

SEQ ID NO: 49524 - DNA, 642 bp, Heterodera glycines
gatcagtgagttggagatggtcgcgttcatttgccaggtggaccatgtcgctggggaaggagggacgaattttcggtatgcgaccggccgggatgtgatgggcagatgcagtcaggattgctgagcggaggcgtcgttcgccatgaacactacttcttccatcccaatgggccccgttcttccgtgcattggccaaaacaataaaaagtatgaagtgatgaaaaagaagaaggagaaaaatgacgagaaaatgaccttggaaacgaacaaaatggcgggtgaaaagcgaaaaaggccgccgagtttgtccgagaaaagttttccatacaacgccggactggaaaggaacaaattgtttgtgaagaaattggattggtcgtgtacgggcgaggaactcaaaaaatttttcgagaaattcggaactgtagtggacgcgcgaattgtcaccaaatgggacggtcgctccaagggttgtgcttacgttgattttgccgacgaacaaagcgcttccgccgctttgatgggggcggacggaacggagataaggggcagaaaaatttccatttttttgagcaatccgcctacaaaacggatgaaaaagaacagtgatgaaagtgataaactcaaactgggagcccaata

SEQ ID NO: 49525 - DNA, 367 bp, Heterodera glycines
gtgcgcacaagaagatgctgctctctgggtggacaatggggccggaatgtgaatcgacctattctcgtgcgatgaggcgccccattcggcgcttccgacaaatgcgggccgtcccctgtatcagggcctcatgggcggtatgggacagaaggactcgggcatgagagacaaagctcatcccaagcatggcattctgacactgaatcacccgattgaagatggtctagtgaccacctgccactacctggaaaacatctggtatcccaccgtctacgaccagctgcgtgtcaccctggaagagcaccggttgctgttcgcaaatgtgccactgattccgaacgcccatcgagacaaaaggatgcgcatc

SEQ ID NO: 49526 - DNA, 136 bp, Heterodera glycines
cgggaaaaaaaggggagaaatggaaaaaatctggcacggaaccatgtacaacgaactgcgtggaacccccgaaaagaacccagtggtgatcacacaagtcccgctgaacccgaaggcgaacatagagaagatgacc

SEQ ID NO: 49527 - DNA, 367 bp, Heterodera glycines
atcggatgcgacgaaaaaggctgagaagatttcctttggcaatttgaacgactctgatcggattttcactaatctttacggacgatatgactatcgcctcaaaggcgctttggcgaggggcgattggttcaaaacaaaggaaattattctgattttttttaaatggattctcggtgaaattagcacttccgggttgcgcgggcgaggcggggccggctttcccagcggaaagaagtgggggttcatgggtaaaccgttcgatgggcggcccaaatatttgggggtcaatggaaacgagggcgagtccgggacatgcaaagatagagagatgatgagacgcgagcctcacaaaatgatcgaagggtgt

SEQ ID NO: 49528 - DNA, 552 bp, Heterodera glycines
cgggtcacattggtcgcgactgtcctaacagtggcgggggtggacgtggtggaggaggcgatagcgtctgctacaactgcaacgagccgggtcacttctcgcgcgaatgtccgcagggacgcggagggggcggcggcggatcgcgcggtggtggaggcgacatcgtctgctacaactgcttatgagtcggggcatttctcgcgtgactgtacgcagccgcgtggcggtggtggcggagggtcgcgcgggggaggcggtgacagtgtctgcttcaactgcaacaaaccgggacatttctctcgcgagtgtccgaacggtcgcagcggtggtggtggaggccgcggctcgcgtggtggcggtggcggcagtgtttgttacaactgcaacaagcctggtcacttctcgcgcgagtgcccggaggagctcgttagcggggaaggagaggaagagaaagcgatggcattggtggaattgttttgttgaccggagggagacacggccttttgactttttcatgcccatctcacttttccatctattgtttcaatcatc

SEQ ID NO: 49529 - DNA, 645 bp, Heterodera glycines
ctcaaactcaaaaaaaaattgcctttgtttcctcgtcattttgcttcatatacaaaaaatttatacgcccttcgttctttcgtcaccaaaaacacatttaaccaaacaattatgacttgcgggttggctgtgaaacgtccgttggaccttggacaggacggcagtttggtggacgtcaagcggccgcgccatggcggcgcatcgccacagtgttcaccgtttcgaccacagctcggcattctggccacttcattgatgcaatccgtgccaccaaaggtgcctagtcctcctgctttcactggtactgcttccgccggcgttggccccatcggcaatccgtcctcaccatttgcggacgtgtccggccgttgtcgcttgtccagcacccagctggactcgtacttgcgtgccgaaatccaggcgctgaaacggcgccggctgatcccgcgccgtcagggcaattttccggaggaagggttcccgttgagcaccaccaacgttgtcgtcaatgccaacaaaggcactgccaccgctgtggcggcgcccaccggtggcattgttggcacgccggtgagcagcaccagtggcaacgcgtttcgcaaggcgacatctccgtcttcatcaaattcctccgactcggagggt

SEQ ID NO: 49530 - DNA, 651 bp, Heterodera glycines
caattaagatcatcggcacacgaagcgatgatgaatggcgattttcttggcaaaaattttgcgctcgcctacccggaggagcgcgagtgttgcctggacagcaacggggcagcagcgacatgctgcaaattcaaccggtttggcactctgatcgcggtgggcagcacggacggccgcctgttcatctacgactttatcaccaaaagtgcggtcaagacatggaatgcccacgtgaagccggtggtttcgctgtgttggtcccgcaatgggaaacgtttgctgtcctccggcgtcgacgggtcggtcaaagtgtggacagtgctggacaccgcgcaacccgtgcaccatttccagttcggcatcggctgcaccgcgcaacaggcgctgttcaacccgaggaatgacaaccaattgctcgtttaccttgtgctcgtttcggccaacagttgctcaagcccaattgtcaaaagcctcgaggacggcaccgaggcacggctgcagctgaaccatggcaacattccggaggagtcggtgtccgccgccgcgtacgaccggcgcggcgagtacatcatcaccggcagcaaccggggtctgattgtggtgtactgtgcccgaacactgaagccggtgtcctactgtcggcagaacaca

SEQ ID NO: 49531 - DNA, 178 bp, Heterodera glycines
ctcgaacggataccgtcccggcactcgttacatgttcctgcgcccgttcggcaaggaccgcgtttacccgctttctacattctaccgcgtgaacaatcggtgcgacattgtcaccatggacgggaacggcaccttcacgatcggcatgcccttcaaggtgtaccacggaaagaccggc

SEQ ID NO: 49532 - DNA, 298 bp, Heterodera glycines
cggtgctaacaaggacagctctatcgacagtgcttcagagctgttgggcctaatgcacataacttccaccgccgcttatggaattttggcccgatcttctttggaccaacaatctaatacagaccctttggacgatagcaaagctcctatgctttcgagggtgggcgaattgagagaacactattgcacatggattcaccaacactactactgactgcttccgcttttccaaacccaccttttggagcagatgactccgactgaatggcgacttattcccctcatttgccttcccatc

SEQ ID NO: 49533 - DNA, 629 bp, Heterodera glycines
tccgcgttggtcattcactcgcgcacgcatactggtgatcgtcccttcaaatgcgaggagtgcgggcgcgcgttcacaacccgaggcaacttaaaagtgcacatggggactcattcggcccctcagaacccttcgaggcgtggccgtcgcattttcgacatggaggaggtgttgctgcccgccttccgctccatttcgtcctctgcccaccatttgcgcgattcgcccagcgacccgtccccgcacctttcccccgaatccccggacgcgtcgtgcgcccccgcctttctcgccaccgatccgtcggcgttggccgcccaaatcgcaatgttcggaccccaattgtttctgcagcaacttctcctccagtggggcgcccaattggcccccggggcgtcgacggcggaagaagcggcgcaattttccgcagagaatgccggaggggtgacggaagacgcggccgaatcaccggcagaggacgcgcgggagactgtcgcgagaatgacaacggccgcatgaaatgccaaggcacattcagtctgtcagctttaaccgggaactcagctcgagaaatattgaagcgatccgccaaatttgatcacaaaatttcatgcgaatttttgcttttt

SEQ ID NO: 49534 - DNA, 443 bp, Heterodera glycines
  unsure (1)..(443): unsure at all n locations
gttaatataagcatagaaaatgccggaacgtttgacttacttttagaccgctttgctacaacacaaagtccaataaaacgaaagtggtgaagacgcccgggggacggaatgtgttccactaccgcaataagcttggttcaatcccaaaatgtggcgacaccggtgtgccgttgaaggggattaaagctgtgcgttcgcgtcaattggccaaaatgacanagcgtaagaagacggtctcgtgcgcttacggtggttgtctcagcggtgcgcgatgtccctgacgaatctctcccgcctctttgagggcaggggagtaaatgtgcgcgtcacaattgcatgggaggacatcgtccgctgcattatgaaagtgtcccattgcaaccattacaaggcgcgttcgatgactcttctttttttcgcttcgcttggccgtttgatattcg

SEQ ID NO: 49535 - DNA, 542 bp, Heterodera glycines
agcagttcagcctcaaaagccgtgcccaatgcattgttgacggacgaaatgtggacacttttgacggctttgccttcaccgccccgctctcctccaattgcttttctgtgctggccaaacactgcagcagcccaatggaagaacagcatcagcagcagccccaatttgttgtgatgctgaagaaagtgccgggcaaacagaacgccaacaaatcggcacaaaaagcggacaaagtgctgaaagtgatcactgctgagcaacagatcgaatgtcagcccaaaacagcgcagggcaaaaagggacaaatgatttgcaaagtgaacggacagccgatcagcggggacgagcagtgtcaggacgagctgcagcaccagcagtgcgtgcagttcaacgacccacgccagacggacgtgaccattcgcacggggccaatcgcagtgcgattcaacggacgcaaggcgtggctgaaggtgtcccaggcgtacaagaacgcccagtgcggactgtgcggacactacgacgacgcggacgagcaggagcag

SEQ ID NO: 49536 - DNA, 409 bp, Heterodera glycines
gaacggggcaaatccctccgcggaggaacttgtcgacggcactgaacaggcggtggaacccgccattgactttgtgctcaaccctctactacacgagatgaattgcttccagaacctcccaacctttttgggctacctccaggacttctgtgacaacatcattgcccacgtggataaggagccaacatcagctgactaatgtgctgccgtcattaatacgatcacccggctggcgctgcctcattgctggtccacacaccggttcctgaatctcgcattctttatcggggacaacctggccgatgtggagggcgaaagacacgcgtgcattgttgagtagcgtcccgtcaatggtgaggaacggaccactatgatgctgatggaagacgaactctttgtggacaagtgc

SEQ ID NO: 49537 - DNA, 406 bp, Heterodera glycines
atccggaaaaactttaagaaaacacctcgatgttggacggaaactcccaactgacaatgacccaaatccgacgctgcatgaaaagatgatttgtgccagcaaccacctcgatgctaaggctcgcttctggtacttcactaccgtgttgcatcctgttaaaaaaacacacggagaaattatttcatgtcaagaggccttccataaaaagcctggctccgtgaaaaactttggcatttggctccactacaatgctcgtactggacaccacaacatgtaccgccagtatcgcgatgattgcgaagcgggtgctgatacgcagtgctatcacgacatgggcgctcgacaccgcgctctagcggatcgcattccgatcgtcatagtgcaaaccatcgacgcggcggactgc

SEQ ID NO: 49538 - DNA, 615 bp, Heterodera glycines
aattcttattttctcattctcctaaatgtggcacacttgccccttcgtgcctattttgcttctgtaccttgtccttttccttgatgccctattctctcgtcgctactgaccccaacattctactttccgacttgggaagaaaccacgacactgacgacaaaattgcctgccccgacgcgaatgcacctgcaccggtgtgccccttctaatgtcccacggtataaacgcttgatcacacctccttcaacgggtgcgtgaggaggaattgacgacatgacgacttccccgtgaaggatacgagaccaccccttccatgtcactttcgtgctccagatgttgtcctgcgctggtgctgaccgtcttcagacgggaatgcgcggcgcctttgggaaaccccaagggttggtggcgcgtgtcggcatcggtgatatgctgatgtcggttcgtgtccgtgaccagcatcaagcccacgctcttgaagcattccgtcaagcaaagttcaaattccccggccgtcaatacatcgtcatttcgcgcaaatggggcttcaccccttttgaccgcgaagtttacgagaagcaccgcaaggaagggcgagtcattccggacggagtc

SEQ ID NO: 49539 - DNA, 607 bp, Heterodera glycines
  unsure (1)..(607): unsure at all n locations
gtgtaaaaatgtccantcggaaagaatgacgcgcctgagaaaggctcaggaaagcctgacaaatccaagaacattatgcgaattgtccgcattcgcaaattgtgtttaaacatctgtgttggagaatctggtgataggcttactcgagcagcgaaggtgctggaacaacttacaggacagcctcctgttttctccaaagcccgatacactgtcaggtcctttggtattcggcgtaacgaaaagatcgccgtccactgcaccgtccgtggacctaaagctgaagaaattttagaaagaggattaaaggtccgtgagtatgaattgaggaaagacaatttctcagacacaggaaactttggatttggtatccaagaacacatagatttaggtattaagtacgacccatctattggtatctacggtcttgatttcttcacagtcctaggacgaccaggttttaatgtatcgcaaaggaaacgaaagaaggccaaagtaggagctcctcatagattgactaaggaagacgcaatgaagtggttccaacagaagtatgatggtataattttacccagcaaaaagtgaggtgttggatttcattgttaatgtc

SEQ ID NO: 49540 - DNA, 169 bp, Heterodera glycines
gaactgtgggatgtggctccgctacgattctcgtactggacaccacgacatgtaccgcgagtatcacgatgtatgtgaagcgggtgctgttacgcagcgctatcgcgacatgggcgctcatcaccgcgctcaagcggatcgcattctgatcgtctaagtgcaaaccatc

SEQ ID NO: 49541 - DNA, 544 bp, Heterodera glycines
aaaaaatcgtccacctatcagaccggacggacgcgaagtggcaattgaatacggtaccggatcaatgaaaggcttcgtctccaaggacacggtttgcattatggacggtatgtgtgtggaaggtcaggagttcgcggaggcgacaagtgaaccaggcgacacttttgtaaacacaaaagctgacggaattctcggaatggcttacccgggaatttctgtgcagaaattgtcaactgttttcaacaatttggttgagcagaaagaagtggaggagccggtgtttgcattttggcttaatcgagacccttcgtacgaatttggtggccaaatgaccgtcggtggcatggacaaacgccggtttgtggaaccaattaattatgtgccggtcactcgccaaacttattggcagttcaaaatggactcggtcactggcggacaaaatggcaaaagcaaaattgcatgccgaaacgggtgccaagcaatcgctgacacgggcacttctctgatcactggacctcagaaggacgtggaagccatccacaaa

SEQ ID NO: 49542 - DNA, 618 bp, Heterodera glycines
gtttgagccaaaaatgagcgtcgacattcatgaaagtgattgcctggacgacattaaggaagtggtcgatttctacgacacaaaaggagacggacgaatccgcgttgaccaattgggcacgtgtttgcgctgcttggacttgtgcccaactgaagcgcaaattgtgcagctcagtcagcaatggacggacccaagcaatcgcctgacggtggagaacattgcgcccattgtgaaggatctgcgcaaggagggcgtccgcgaccgatcggaggctgaactgtgcggctttttggagaacttcgactgggacaacagcggcttcgtcagcaccgccgacctgcgccaccttctcacgcgttgtggcgagccattgagtggcgagcagtacgagcagctgatcagagaggagcgagcggaggagggacgtgtgaacatcgcggaattggtgcggaccatctgcggaaaagcggaggagagagcgcacaaggaacagagacgggagggaggcgagtgaaagacagcggcggaagaccaaacgatcggaccgatcaatcggccgacagatcgatcgatgtgaaagggacaaaaagcgcgaaactaagcgattaatcaacaaca

SEQ ID NO: 49543 - DNA, 510 bp, Heterodera glycines
gcacgacaacacattcctgagccggcaattttcacttatgcatccaaagatgccattctctacgccttaggaattggtgccaacactgccgaggatttgcactatgtttatgagggccatcccgactttcaagtgtttccaacctttgctgttgtgcctgggatggtggccgtttcattgtcggattggcctggcattcaatttgatctgagccgggtgcttcacggcgaacaatacattgaactgtacgcaccgtttccggccgacggtgcgcgactgcgctccgaaatccgagttgccgacctgttggacaagggggcgaacgcagtgatcatctccgaggtgacaacattcgacgatcagtctggcgaaaagctttgcattcaacagtttgccatttttcaaggcggcgccggcggctttggcggcattcgaacttcgccgtccgagcgcaaagtgccgccggtgccgcaggggcgtgagccggacgcggtgttggagcagcgtacg

SEQ ID NO: 49544 - DNA, 238 bp, Heterodera glycines
gatgtttcgtgaagcgggagctggtactcaatgctatcttgacttgggcgctcgtcaccgcgctcaaacggatctcattctgatcatcttagtgcaaaccatcagtgtggcggactgcaagccagccggggtgaagcaatttcagaactccaagatcaagtttccgcttcctcaacgtgtgaattcctagccacgcaatgtgactccattcacgacacagggtccgacaactcatttt

SEQ ID NO: 49545 - DNA, 614 bp, Heterodera glycines
atatgcttccattcgaagtccaacatttttccactggaactgcggacacagcgccgtccttccacgccgacactatccatcatgttgagttcgacttttacggccaacgcgttgcaacagtgtccagtgacaaaacggtttgcatttgggacaaggacacacagaacggcgcgtggaggaaaagcgcgtcatggaaaaaacacggtggtgccgtttggaaagtgcgttttgcgcatcccgagtatggccaagtgttggccacctgttccttcgacaacaccattcaaatcttcgacaaagacgctgccgatctgtccgaaatccgaccgatcaccggcgccgactcgtccaatgggtgggcatgtcggaccgttttacgacaaagcaatgccagcgccagcatcactgacattcaattcgcgccgcattatttgggccttcaattggccgcttgcacttcctctggtcgactgatcatttacgaagctgaggacattatggcactggacaattggaacgttctccacgactatgaagtgacaaagaatcggcttagttccctttcgtggagcacaaatcgatttgaccctcctcatattgttgtcgcgtccgat

SEQ ID NO: 49546 - DNA, 632 bp, Heterodera glycines
cagaacacaaacggccaaaaattcaagttggaacgctttatgccttcccagggcgctttttgtgccactctttttgcccccgtcacttacccaccgacgaatgtcaccgttttccttgctcacaattcacaacccgcggaactcgtggcgtatggaattttactcaatgtcaaccccgaccgcatagttctgaaacggactgttttgtctgggcacccgtacaaagtgaacaagaggacagctgtggtacggtatatgttctacaacagagaagacatcgaatggttcaaaccagtggagctttacacgcacgaaggcaggcgaggccgaatcaaacagccactcggcactcacggactggtgaaatgtgtgtttgaccaaccgctgagtgtccaggactccgtgctgatgaatctgtacaagcgtgtgtttccaaaatgggactacgacgaccgattggaagggacaaatgcgacgaattcggacggaaggaattccaattttgaggaggaggaagaaaaagggggaaaaagagggggaaagacggtgactttcctggagaaatgataatcgaataagccattcgattgattgccaccatttttaaacatttatttttgttatttgttgaa

SEQ ID NO: 49547 - DNA, 250 bp, Heterodera glycines
tcgtgagctgcagaataatatgatcgggtgtcctgtcatcttcattgcctagcgtaggattttgccaaaccctcggcttggtaaaaaccgtaagccattgggacagaagcgtcctcgttcgcgggcgctcactgctgtgcatgactcacttctcgcagacgttgtattcccagctgaagtggttggcaagcgaactcgagtcaagcttgacgggaaacaaatcatcaaagttcacttggacaaggcacaa

SEQ ID NO: 49548 - DNA, 634 bp, Heterodera glycines
gtattcttttaacatcaattttggattccaacaataaaatgattggggaagagcttacggatgttgacaaggctcgcattgcgtcagacattctgcttcagtcgccgccgggcgagttcaacgaggtgttcaacgacgtgcgcactttgttgcagaacgacgcacttttggaaaagggcgtctgtctggaggcggtccggcgctacaacaaggcacagtttgtgccggtcaaccccgagccgggcgctgaacacccgactttgatcaccgaacacaacgaattgccggacggacgtttcgtggacccaaaaacgggccgtgttttcaaatacgaccatttgcgaaaggaggcggccgatgcgcagccgtcggggcccaaggaaattgacgaaaaattggagccatggcgaaaggcactgcaaaaagagttggacgagtacatttacgagcatttccatctgaccggcgtcgccactgttttcacgccgttgcagcaccaaaaagagccgaaactcattctatgcattgagtcccatcagttccagccaaaaaactattggaacggtcgttggcgttccgaatggcattttcccaactttgacggctcttcaaaaacggcggggactctccaaaa

SEQ ID NO: 49549 - DNA, 403 bp, Heterodera glycines
ttccatcacatgttcgaccccaaaagctgacttggacccgtacgcgtccgcactagagattatcctcggccgtgctaaacggctttctgatgtgataaatacccaactccggccaatcgggactctaaaaatgcttggctcctgctcgggttaccttgatcttactgacgacgggcatgctttactccctgaaatgaaaatccaacgtccaactgcttcattgatcccctaggggtgcaccgcgttgaataacctccccggcgactggacctctttgaccattcatgctgattgcctaactgctcaaacagggcgcacaattacagtcagctgagggtagctccacccccatttggtctccccgggtttccagttggcccctgaccgtttgctcccactgttg

SEQ ID NO: 49550 - DNA, 301 bp, Heterodera glycines
catcacgaccattgaacatacttcctaagttttggttgtatctgctcaactctatgcccaaagctgtatgctctatttcgccgctcacatcagtgccactccgatctggggccgctttacgcccggctctttgacctatcaaattctcaagaatttcctggaaccgcatctgctcatgattgccaacccacagttagaccacactggcgtccgtcaagcgtcctacatgaacacgccagtgatcgcagtggccaactcggactctccgacgaaaattgtggaccttgccattcccgttaac

SEQ ID NO: 49551 - DNA, 473 bp, Heterodera glycines
tgctttttcaaaaatgccatctaaagctaatgcaattggtatttacctcggctcgacttattcctgtgttgtattcttccaccactcaaaggtgtacatcatcacgaaccaccaaggacaacctcaccactccgtcctatgtcccgttcaccgcacacccaacgtttgatcggcgatgcgaccaataaccaggatggcgatgaacccatccaacaccgtgttcgacgccaaacgtctcatcggacgcaagttcaacaacccggcggtgcagtcggacatgaagcactggccgttcaaagtggtgcagggagagggtgctcgtccgaaagtgatggtggaagtcaaaggcgaggacaaagcgttcttccctgaggaggtttcgtccatggtgcttatcaagatgaaggagacggccgaggccttccttggccagactgtcacggatgcggtggtcacagtgcccgcttacttca

SEQ ID NO: 49552 - DNA, 576 bp, Heterodera glycines
ctcaaattcccccatctctaatggcatcactttttcgcccgtttgcattggcacagcgtttggctgtgcttggccgtcgttcgctgcacatttcggcatcattcaatgcgctggacgaagcggcacgcgctcggatcagcgaatgtgtaaattctgcgcctgtggtcgttttcatgaagggttctcagctggagccaaaatgcggattcagtcgaaatgtcaaattggtcctcgaccttcaccatgtgccatttcgggactttgacgttctcgaggacgaagcacttcgccacgacgtcaaggagttcagcgattggccgacaattccccaagtgtatgtgaacggcaaattcgttggcggctctgacattgttgtgcaaatgcacaaggacggcgagattgacaaattcttcgatgaggagggaatttcgtcacgtttttcgcaaaaatttaaacagcaaacagaagggggagaagaaggaggaggaggacagccggagaagagcaacaaatgattggatatatctaaaagatagaaaaagcacaaattaaatttgttttgtttttgaaatattt

SEQ ID NO: 49553 - DNA, 370 bp, Heterodera glycines
gactgcttcacggatcgccaaggagtgaaccgcgcagaccaacggcaccggcgacgggaccacgacgaccgttcagctgattggcgaactgctcacacaggccgagaattacgacagcgagggtgaccacccccatttggtcaccgagggcatccaactggcccatgaccattggccccaacggtgggccgcctccaaaaagaccgtgccaatcgaccggccgctgctcatcgaagtgggcaggacgacgtggcgcacaaaatggaaccagaagtgggccgaccacggcacggaatgtcggggggacgccgttatgggaattcctcggggagaaaacgacgcggaggccgacttgcatatgagagaaaat

SEQ ID NO: 49554 - DNA, 286 bp, Heterodera glycines
ggatggacgaacagccgatgaggcgatcgttgccactgtgagtaaagttggcgagaatattcaactcgcccgagcatcagtcatttcttcttcaccagcgaccaaacttttaggccaaacccatccaaaagaagaatttaacggcgttcaattgcgacgttttatttccctggtgtctttgggtcacaaatcagatgacagtgtttctgactttacaacagcgcaactaggccaagtgacatgtcaccacatcattggaatggcgccggaaagactgggtgaacca

SEQ ID NO: 49555 - DNA, 406 bp, Heterodera glycines
aaatctgttcgtggggtttttcctcaaaaaagagatgccctttttgttggttggcgtggaccctgatgcacacacgaccgttgtgcacaaggttaaaacggtttaaactgtcaccactatggccacaattggtatcgaaatggatacagatgtgcaggcaaacatgttcaaaggcgcgtctgctacctctgtggacaggacaaaatttgatcggtatacaacccctcgttccatcaatacccttggactaattgtcgtcgtgcacagcaacgtccgctaccctgcgcactacgcgcgtgatgaaatgatgcaaatgtttgtagagaaccatctgcgcaactcggtgctgttgggctttgcgtacactccgaggtaaccaaaagctacgcacgaccaaataattgac

SEQ ID NO: 49556 - DNA, 241 bp, Heterodera glycines
acggacacaagtggatgaagttgccggcgtaatgaacgcgaacgttggcaaactgatagatcgggaccagaagctgtcccaaaaggaggaccctgctgatgcacttaaacaacgtgcttttttttttaagaaaacgacaacgacgatcaagcgcaaatgttgggggaagaacataacgatgatcacggtcatgcgcgcaaaatccatcccggtgatgaggagcagggccatgagggctgga

SEQ ID NO: 49557 - DNA, 484 bp, Heterodera glycines
ggcacagctgatccgccacttctacgcgttgggatggatgagagacaacggcgccggcatggcagcgcgctttcgctgtccgaagacgggagaaagtctgatttataactcgtcaaactcgttggccaaggagatattcgccgaaaatgagcattttgtgatgaaggccagcggtacagttgtaaaacgcccgtcagacccggacagaacgccgacggcaccgttttatttgctgcgcgataaccccgatttggtctgcatcattcacacgcacacaaaatgggccaatcttatcacacaactgatcagcggggatgaatttatgatttcgggccaagaaatgatccaaggctgcgagaatcgtcagaccaagcgcagaatggaaaacattgacactgtggttgtgccgatcatcgagacggaaatcagcgaattcgttctctgtcctcagctgatgaaagttctgcaaaagtaccccgagtcg

SEQ ID NO: 49558 - DNA, 314 bp, Heterodera glycines
  unsure (1)..(314): unsure at all n locations
aaaataagtccgaaggtggtttctgccaagaagaagagcggtggattcaacacgaagaagtnaatgttggacctcgcatccggcggaactgctgctgcagtctcaaaaaccgctgttgcacccatcgagcgtgtcaagctgttgttgcaggtgcaagatgcttccattcacatcaccgcggacaaacgctacaaaggcatcatcgacgtcctcgtccgggtntttttttttttttggctttctgtcgttgtggcgtggtaacctgatcaacttcatccgttcctttccgactcaggcgctgaacttccccntca

SEQ ID NO: 49559 - DNA, 190 bp, Heterodera glycines
ggccgacgacgacgctgagacaatcgatcttaggcgcgtacgtaacactgttctgcagatgtggcccaaccgagggtgtttggatacccgagacgagggggaccagacactcgaccgattcaaggaccaattcggacatcgacccggcaaacggtggcccggcatgggcgagctgacctttttggttggc

SEQ ID NO: 49560 - DNA, 223 bp, Heterodera glycines
gatgcagatgtgccacgaccgacggcatttggttacgcaagatcatttggaccgatggctggctcaactcaagggccaattccgctatagacgcagcggacaaaggcccttcaggtgcgagctgagtattttggcgagacttaatgactaccctactgaccaaatgctcctgtgcttaccagacgagccgaaaagatgctgcaaaactatcaaacaaatgtgt

SEQ ID NO: 49561 - DNA, 579 bp, Heterodera glycines
ctgcgcattccaatggcacacctcgtcaaccgcggataaattatctacaacttcacaattcaattccggatctctggcatggatgcacgggctcagcttgcaaagccatgcacaggtgccactaagttgctcacatagtcaaagacacgccggctaggtttctacagcagaaagggcatgcgaaaatggtgtttctccaaagcggcagctaaacagctaccccgattgatggccggtcctcactaggaacaaaaggagcatctccacacctaaggcattgattttgggtaccaaatgggtgacatttggcacaacgtaccatggtgtctggtggttggcgcttaaactatgagtcaggcaccatgttactgggcgcgtgctgacaacaattacggggataccaaacttttggattccatccaacgcgatggcatttcaacagcaatgctcggccaaccgatgggtgtttgtgctgagaaaacgggtgctgaatttggcttcacgcgtgagcagcaggacgcgtatgcactcgcctcctatgcacgtgcgactcgcgcgtgggcgggcggcgcatttggt

SEQ ID NO: 49562 - DNA, 331 bp, Heterodera glycines
gaaacatcaaccgatggagggaatttcgacgatggaggaccgtgcgtttcaaaagaaatgcggcgaaaaataaattacgagattcggaagaacaaaggcattcgaaaggacaaagggcgaaggaaagctaaacagcggcattcgcgggtgatgaagcgaacgcaatacgaaaaagcactgatcaagcgcaaatcgcaggtcccaaacatgcgtcgggaaatggagagatatgatggtgaaaagcgtggaattcgtatttctacaatccgttccacaaaattttaattttgattaaattctttcttgaaaaaaaaaaaaaaaaaaaaaaaaa

SEQ ID NO: 49563 - DNA, 343 bp, Heterodera glycines
  unsure (1)..(343): unsure at all n locations
gataacgaggaggtntaaagctgtgcaagacggaattttcaaggccgaattaaacaactttctcatgaaggagttggccgaggacggttattccggtgtcgaagtgcgtcgtgcaccttcccgtactgaagtgatcatcatggcgacgcgcacccaaagtgtgctcgttttttttttttngcgcatccgcgaactgaccgcactcgtgcagaagtcagttagctgttccgctggacagattgagctctatgccgagaaagtgtcctgccgtgggctgggcgcggtgggccaatgcgagtgctttgagttctactttggtcggtggggtgcgctcgtacgtcgt

SEQ ID NO: 49564 - DNA, 636 bp, Heterodera glycines
gagaaatgtccaacaaaaaaattgagacggtcgactttgaccaggcgtttgatctgttggaggatgcacgcgaccaacagcaatccgtggaagaagaaccttttccctcaacatcgactgacccatcgacgattgatcttacgattcaaaagcatgtccattcaattgtggaagagcaatcagagcagatttatttgtctaaaactaattttgaaacggacaaaatggtatccgcctacgaatcggaagaaattgaagtgaaacgaagaaaaattgtggtggaggaggacgaatcggaagagagcatcccgacacttccgccaaagttggacgaggagagcgaattgtcgcgactgaaacttcagctgctgctatcgaacttttcgcaagaacaattggaccggtacgaagcaatgcgacgggcgagtttaccgaaatcgatcattcgacggttgatccatcagttcactggtgtgaccgtcaaccaaaatgttgtaattgcaattgccggtatggccaaagtgttcaccggcgaactcattgaagaggcattggacattcaaaaggcggagagagaggcgaacactgacaaaaacaatggcagcagagagaggcagaacggggcggcagaagatg

SEQ ID NO: 49565 - DNA, 648 bp, Heterodera glycines
caaaaaaggcataataatgtcaacgtagaagcttcaaaccatttgattaatatattggaactaatgcgcagaaaaaaggcatatgcctcaaaatacgttctctaatgattagatttgtaaattcgaatgtcttcgctggctgattttgtaaatgaacagcggagtaaggcgaacagttcgtccggtcgacaagcctatttcaatgtggccactctcggctcaaaagtcagcaattcgttcacagatttcttcaaaccaagaaattcgaatggtatcgacgacgtacagcgactcactgaagacgccgacgcggcacaaaacggacaattgccgtccaacaaaaacagaaagtacagctggatgagcttttcgtccgtttctgcttcggtgtctcccgactcgaatccctgcggtttgacgcgttttcaacgaatcgctgcgtttttcctttgcatttttgctgctggcttttgcttcacaacggctatgatgctcatccccgtcctcgtcctccaaacgcgcaaattcgctgctctgaataccctcggatctgtctttttcattgtcagttttggctttctgtggggtcctttggcgtattgtcaatttctgttctccgagccccgtcgcgtggtcaccgccgtttat

SEQ ID NO: 49566 - DNA, 635 bp, Heterodera glycines
gttcccccatttactacttgaacccctgcggctctttccatgtcggaggtcccaaaagtgacgctggccttacgggccgaaaaatcatagtggacacttacggaggatggggtgcccacgggggaggcgccttttcggggaaggaccccacaaaagtggaccggtcgggtgcgtacggggcgcgatgggtggccaagtcactggtcaaagcgggggtctgtcgtcgctgtttggtccaggtttcttacgcaattgccatttccaaacctttgtccatcacagtcatttcttatgggaccagcccactcactgagcaggaactgctccaaatcgtcaacgacaacttcgacctgcgcccaggcgtcatcatcgaggaactcggcttgaagcgcgccatttattcccgaaccgcggctaatggacactttggacacgccgatttcccatgggaaaaagcgaaaccgctcgaaattcgtcctgagctgatggaaaaactgatcgcctatagaaagtctgaacacattccgaatggctgcttcaaagggacgcacattcacgcgcaccactgaacaacaaattgttaaacgaaggaatggaccagtgacttatccgggggattgagcatttgtgtgggg

SEQ ID NO: 49567 - DNA, 160 bp, Heterodera glycines
aaaggtctttgaacatcagccggctgttgctctgggtcctcaggttcaagaaggctaaaatgtctttggtgtggcacacattttttcgtccttcaatgacactttactgcatgtgaccgatttgtctggacgtgaaaccattatcaaaatcagaggaggc

SEQ ID NO: 49568 - DNA, 606 bp, Heterodera glycines
atccatggcggtgcttatgaaattggctcttcggcacgttacacaaagtacgaagtgatcggccaacgatttgtgacagacgcaaattcgcgaggcattgtttttgtgagcattcagtatcgattgggagtgatgggatttgccaccaccggagatgaggaacttcccggcaatttgggcatttgggaccaaatttcggcacttcaatttgtcaaggacaacatcgcggagtttggcggcgacccgagccgagtcactgtgtttgggtacagtgccggctcgggaagcacggctttgctgagcatttcgccgaaaagccgagatctcttccagcaagcgattcgcatgagcggcacaccgttttcggtgtccggcagcggcacttttgtggcggaagagaccaaaaagttggccaaagcgatgggatgcgcagcgaatcggacaaagcaatgcctaagcgagaaaagcgtggagcaaattttcgatgggatagacaaaattgggcctgctccgctttcggtttacattgctaagttcagtccacatcgcttggaccgggaactcttcccgcaggattatcccgaaatgatcgccactgcccctccc

SEQ ID NO: 49569 - DNA, 589 bp, Heterodera glycines
acaggtggcggcctttgccgttgattcgacgagagtgctcttctacaatgcagttccagtgtgcggcttcatcttatgctgcttcaccatggattcgtccgtacagcttacctacgccaaaattgcttccgtcatttacgccttcataatgctggccgtccttatcgccaccacaaaccaaatcgtattggagacagtcttttcgcccacctccatgttcgtgttgggcatggtgctgatcttcttctttgcctcctgcatccacccgaaggaattcaccagcattatttatggttcgatcttcttcctgatgatcccttccacttatgtcttcctctcgctgtactcattgatcaatttgaacgtgattaattggggcactcgtgaagccgtatcaaaagcgacaggacaggcgacgttcagggagaatatagccaacagagtgctgcggcgagtggctaatctcaacgacgacgattccttcttgacgcgctttcttacgagagttcgcagtggtgaagaaccgagcgaagaaatacggacacttgaaaggaaattcgaacgcactgaacgattgttgatgagcatg

SEQ ID NO: 49570 - DNA, 241 bp, Heterodera glycines
atggggcaaggacggttattcccgtgacattttgcgtcgtgcaccttcacttactgaagtgatcgtgatgaggacgcgcacccacagtgtgctgggggagctttttgttcacagccgcaaactgatcgctctacggcagaattactttggctattccgcaggacaaattgggcacaatgcggacaaagagtccaaccgtgggctttgcgcgatggcacattgcgagtacaagcgtatcaag

SEQ ID NO: 49571 - DNA, 214 bp, Heterodera glycines
tgtgccgtgccgctttcactaagccgggctactctttgacattggcaagtacgaagcggccagcgccgagttggaggagctccgcgttttgtcgcccgacgaggcgcacgtgttcttcctgctgggccgggtcaaccgcaaattgggcaacatgcacatggcactgctgaatttcagttgggcagcatagattgacccgcgcggggagcagaac

SEQ ID NO: 49572 - DNA, 645 bp, Heterodera glycines
aagattgccacttcttttgctgaccattgaaaatgagtgaaaaattccgccaggacatgccgccccagggaggctatccgagcttccacgttcatcgcacgttaccaaaatcgttcctttcacctggtcgcatcatgcttttcggcgtcgttctgcccactttctatggttatttcaaaaatttctaccacgaccaagcggcaattgggaatgatgccttcgaggagcaggacctcattaacgccttggagccatttttgatggcggaacgcgacagatcggtgttgcgcatcatgaaacgcaatcgggagctggagaacgaggtgatgaaggatgtgccgggatggaagaccggcacttggtacggcgagccggtctatttcacgttgggcgacaaatggattgaaccgaatgcaatggaggtcagtcctcatttgtccttccgagactcggccttcaaccactattatcgcctcaatacgttgcggcctcagcgcaaatgttaaggtggagaaaggaaggaaggctttgtgactctgagtccatttgaacaaattagggcgtttttttgcggtgtgtgcgccacaaattaattgtgttggcattgttttgcataaatgttttgtttgtacatcatcatcatca

SEQ ID NO: 49573 - DNA, 347 bp, Heterodera glycines
gcactttgctattaaactacgatacagaggacggactgatggagttcagacaatactccataaagtcagtgcccgcgggcgtttctcgttcggccaaaaaactgatgcagagcaaagtgccatacctgtccaagtacaaagacatcagtgacttcatgctcaaaccggagcagttgagtgacagcgaatttgaaggcgaacagacggaattggagctcacgcatgattttggtggacggggcaaaaaacgaggacagcaaaccaaattgaggttgatggaaattggaccacggatgacattacgtttgatgaaaattgaggaaggcgtcgacgcgggcactgctctt

SEQ ID NO: 49574 - DNA, 630 bp, Heterodera glycines
atcaagtcatgcagaattatttgcacaaaatgttctatgcaatcactcatcaacaggtgtcgagcgacaataattgtccgactaaactgttgaacaacaacagcagaacaactgcaattagtcctggcacagcttcagcaatggtggcgactgagaggggcaatgccgccacttcgtcctcccttctgccgccgccgtcggccattttcgcgcctcccaacagtgccaacaacggccatctcccgccacttcccgccaacggtcttttccccggcggaattccttttccggtgttcggcataaacatcgaccagattctcaaaacctgcgaacagcttgaagattcgaaaaattatgaccaattggcccactttctcaacaaaatgccgttggcagtgcaaatgaatgtcgcgatgcatgagactgtcctcagggcacgcgctctgataagctttcatacgggaaatttcaaagagatgtacgccattttggaaagccacaaattctcacaagacagccattcgatgctgcagaaaatatggtgggacgcacattatcaggaagcagagcgaatgcgggggaggacacttggcccagtggacaagtacagagtgcgcaagaagtacccgt

SEQ ID NO: 49575 - DNA, 638 bp, Heterodera glycines
gttacgacctctcatcactgaaactgattatgaccggtgctgccccggtgggcaccgatctgttggacaaagtgaggagacggattccctcgctgaaacaaatctgccaagggtatggaatgacggagcagtcgatgtgttcgcatttgtcagtgttcggttcggacgattcgaaaaccgtcggtcgactaatttcgaattttgagatgaaagttgttgacatcgaaagcagaaagcctttgggggtcttacaaaagggcgaaatttgcacgcgaagcccaacgacaatgcttggctatttgaaccgggcggaagcgactgcggaaaccattgacgaggacggatggcttagaacaggtgacattggctttttcgacgaaaatggccgcactttcgtcgtcgatcgcctcaaagagctcatcaaagtgaagggttttcaggtcgctcccgctgaactcgaggatttgctgctgtcccacgcgggcatcaaagactgtgcggttgtgggggtggcggacaaactcgcgggggaagtgccgaaggcatttgtggtgagggcggatcagacactgaccgagtcggaattgaagcgatttgtgagggaaaaagtggcctcctacaaacagttgggctcggtc

SEQ ID NO: 49576 - DNA, 415 bp, Heterodera glycines
ccttttgccccatttgctgctttacttttgttggttcttttgggacttcgccaccccttcgcgcggatgccatttctggccgttcttttacaaatcgcccgtttggcgccatttggcctcttattttccgatttcggtgattcaaactgctgatctttccgcggatcgtaattatttgttcagtgcccacccccacggcatcgtcggctcaagtagtttcattttcttcgctacaaatggtgcaaatttcgcctctcttttccccggcctccgaatgcattccgtcactttggacctcaacttttggtttcctttgcgcacagaaatgataatggcctcgggaatgattccgagtgacagcaaatccatcgaatgggttttgagtcgccccgggggcggatttgccgttggcatt

SEQ ID NO: 49577 - DNA, 475 bp, Heterodera glycines
gaggatttggcctggcttcagttggccaatgagcgacggcaaaaaatcggagttccgccgattgatgacgacacattggagaaggccattgacatgctggagaaggagtcccactttcaattcacgcaagacgaacacggcactggcctagcttatttgacgatgattgacaacgatgcgccctgttgcatttgcaatgacggcgaggacagcaatgccaatcagatcattttttgcgatatttgcaacattgctgtgcatcaggaatgttatggcgtgccgtacattccggagggccaatggctttgccgtaagtgtcaaatgtcgccgtcaatccccgtcaattgtgccctctgtccgtgcagttcgggcgcattcaaacaaacatcggatggtcgctgggcacatgttttgtgtgccatttggcttaatgaagtctttttttgtgccattttttcgttcccataattttcac

SEQ ID NO: 49578 - DNA, 474 bp, Heterodera glycines
  unsure (1)..(474): unsure at all n locations
ctcataaattgtcttgcagaagtatttaattaaaatgattgaaacactcgagacgagcgaagtgttgaagcgggtccttaagtctgcgctgattgtcgacggagtggcacggggtttaaacgaagcggcacagactttggacaagcgtgaagcgcacttttgtgtgctggccaaaagctgtgacgaggcgtcctttgagaaattggacaaagccgaactcggtcaaatggttggccagtgcaaatacgacaaagacggaaaagcgcgcaaaatcgtcggctgttcggtggcggtggtcaaagactacggacgggacgaagaggcgaagaatgacttgcaggaagtgctgaagaaaatcagcgactgatgaggttcctatgtcatcatattgttgtttttgtttggttgttaccgcggctataaaagactcttctgtttaaaaaanannaaaaaaaaaaaaaaaaaaaaaaaaaa

SEQ ID NO: 49579 - DNA, 645 bp, Heterodera glycines
cctcgtgccgaattcggcacgagggcgatttgtgctcgtggcgctgcgggatattattaaattgaaatgaagttgaacgtagccttccccgccaccggggctcagaagcttttcgaagttgtggacgagcacaaacttcgcatcttctatgaaaagcgcatgggagctgaagttgaagccgacctccttggagatgagtggaaaggttatgttgtccgcatcaccggaggaaatgacaagcaaggtttccccatgaagcagggtatcctctctaatgtccgtgtgcgacttctgttgtccaagggtcattcatgctaccgtccccgccgtgacggtgagaggaaaaggaagtctgtccgtggatgtattgtagactccaatcttagtgttctgtcccttgttgttgtacgcaaaggagagcaggaaattcccggcttgacagataaatctatccctcgtcgtcttggacccaagagggccagcaagatccgcaagcttttcaacttgaccaagcttgatgatgtccgacagtatgtcattaagagacctctgccccagaaggaaggcaagaaacagcggttcaaggcccccaagattcagcgtcttattacccctcttgctctccagcgcaagagacacatgctg

SEQ ID NO: 49580 - DNA, 631 bp, Heterodera glycines
ctttcaacggttttgtgacagagaaagcgattatggcgaacccttttgatgacgacagtgacgaattcattcgcaaaatccgggccggccgtggaattgaaccgacaaaaagtttcacaacgcccgcagcttcgcaaaacattgaggaccaaattgccgctgatgagaaggccattgagcgttacttgcaggcgtcgttggacagcacacagcgctcccgacaacagctgagctcatccgaggggttggccgagtccaccgcacgggaattgttggagcaacgggaaaagttggaacgggccgaacagaatttggacaccattcaccacaccactcagcacacacagcgcagcctgaacagcttgaaatcgtggtttggtgggctggtcagaaacaaactttcacgagcgccaaaagggttgggcacggcaaatgtcaatgccaacaatcagcagcaacaacaggaacagaccgtgcagcagcaacatcagcagcgtccgctgcatgcccatttggtgcaatcgtctgctgacgaatttgccggggccatcggtggcggaggcggcggtgttcagcccccgcaacagcactcgctgaactcctcgtcacgcgcgtacattcagggcactcg

SEQ ID NO: 49581 - DNA, 632 bp, Heterodera glycines
atgtacataaaatagagccggttttttggcttcctgcgatttacacgtccataaattcacaactgtcttatcattgtcatcctctttagtatacatatagcaatatttcaatgttgcataatagtgaacggaaccctctctacaaatactcataccaaattccgggccaggaacgttcatacacttattcggtaccggccgaagagtttcaacaaaaggagcatgacaaagtgacaaatgggtactttcccaccaacggaagtgctgaagcggtgcttcctcatcattttgaacacagcgttaaattggacgatttgatttgtgttcgctgcaacgaaggctttactctaaatgagcaaattgtcaattcgggaggccaagtgtggcacgccgaatgttttgtttgcgtccaatgctttcagccattttctgacggaatttattttgaattcgaaggacggaaatactgtgagcacgacttccatgtactgtatgcaccgtgctgcaataaatgcaacgaatttataatcggaagagtgatcaaagcgatgaacgccaattggcaccctgaatgcttcacttgtgaactgtgcaacaaacaattggcggacatcggctttttgcgaaatgct

SEQ ID NO: 49582 - DNA, 265 bp, Heterodera glycines
atcccgaccatctatcaaccgacttcatgtgacactggttcacgtggatgaaatctgctgcatagtcatcgtgagcggtgaaatggtgtctgatcttgaccatgaactgtctccctttgatgatctcgctgatgctcatctggatagttcctcacaattcaaaaaatctgcctttactctgacgacccaatgttgctggaataactttacgattgtcgtgttcttgtgcgcaattgtcatcctgctgatcttgtcattgtcactt

SEQ ID NO: 49583 - DNA, 643 bp, Heterodera glycines
  unsure (1)..(643): unsure at all n locations
tataaaacttcttggttgaaagtccttcagtcacatgcgcgataagcaaaaggcgaaggctgctgtgatcactgagcagcatcgaattccgacaaaagtgacagcgacggaggaggagacggaaaacggttcggacaatgacgaaacgactgcacttataaaggagccacaaacctcaaagaagaccgaacgcattcctcttcttggcaattctgtcaatgctcattcggaccgcgaaagttcgacttccgctcgtgtgacaacggattgtcagccatcagacgaagaaatgcatcgcattttcaacgaacagtacggaagcacaagcggagaagacttcgccgcctgtctcgtcgaggcaatccgagccatcaatcgagggattaaccccgaacgaattcctcagggctcttcgggctcatattttgtcaaaaacttacaaggggaagtgatcggtgtgttcaagccaaaaaatgaggagccttacgggtcattaaatccaaaatgggttaaatgggcgcacaaattgctctgtccctgctgttttggtcgttcgtgccttgtcccgaatcagggttatctctccgaggcgggtgcttcgctggtggaccaaaaattgggcctggacattgtgccnaggact

SEQ ID NO: 49584 - DNA, 526 bp, Heterodera glycines
gtcaaccaattggacggattcgactcgcgcggggcaattaaggttttgatggccaccaaccgaccggacactctcgacccggcgctcgttcggcccggtcgcattgaccgacgcattgaattttcactgcctgacgtaaaggcgcgtaaaaacattctccaaattcacaccaaacggatgagcatcgagcgaaacattcgatacgaattgattgctcggctctgtccgaacacgacaggtgccgatttgcgcagtgtttgcactgaggcggggatgttcgctttgcgtgcacggcgtaaggttatcacggagcaagactttctcaaagctgttcagaaagttgtgaaaggctatgcaaaattcagttcgacgccgtcctatttgacgcacaattaattaaaggaattgaaagagggacattatagaaaggaaaattctgaattcatctaattaatgcgtcgatttgtttgttatatttattgtacaatgataggttttattttattttaaatttatttaactaaaa

SEQ ID NO: 49585 - DNA, 283 bp, Heterodera glycines
tgtttcactggatcctcctgttcgacaaggcgaagatggctttggtgctccacacatgtatttacattctttcaatgacacttttgactctggcgatccatgtggccggcactgtaaaccgttgtctgaatcaccacgtggaatgcttgttctggtccaccgatacgacgcgagtccgtactctgctatgctcgccgcgcacgatgttgcagaacgttgttagcacgttggcattaatgctcgtcttgtcaaattgcgtgctacccgtgggaccaattcaaaa

SEQ ID NO: 49586 - DNA, 628 bp, Heterodera glycines
caaaaatttttcttgtgtaaagaaaacaaaaaagatgtcgcaacaatttttctcgaattgcttaagagcattactgacaacgaaatggcgcccttttacgaatacgccgcccctcaactcggcgtgcccattgacaaggctaaactgcaaacactgaaggcacttaatgagcaaaaattggacgaatttgaccgaaaaataaaggacgccgaggaaaatttgggcgagagcgaagtgcgtcagtctcacttggccaaggccgagtatttgtgcaaaattggggacaaagaacgcgcattggccgccttccaactgacatttgacaaaaccgtgggcatcggttatcgcatcgatttggtgttcaatgtgatccggcttggcttcttcttcatggaccatcagatcatcacggaaaacattgaaaaggccaaatcgctgatggaaaagggtggcgattgggaccggaagaatcggctccgctcctacgaggctctctacaaaatggcaattcgcgaaatgcgcggggcggcgcttctctttttggaggccgtgcccacctttgacgcctatgagctgatgagctacgaagacctgaccttttacactgtgatttgctgcgtttatgctt

SEQ ID NO: 49587 - DNA, 526 bp, Heterodera glycines
ttactgcaagcgtccggacaacagctcaaagtcgtgcaaaactcgtggttcagatcttcgtgtccatttcaagaacacacacgagacggcgcgtgccatcaaacatatgccgttgaaccgtgccatccgctttctggaaaatgtacgggagaataaggagattgtgcctttccgccacttcaactgcggcgtgggacgcaaagtgcaggcgcaagcgtggggcacaacacatggacgttggccgaaaaagtccgccgagttccttctccaacttctcaaaaatgctgatagcaatgccgaggtgaaaggcctggacgtccaccatttggtcattgaccacatcctcgtgcaagctcccgccgaaatgcgtcggcgcacttaccgcgcgcacgggcgcatcaatccgcacatgagttcgccatgtcacatccaagtgagtctgacccagaaaaaggacctcattgccaagccggccggcttattcctctaagtgaagaaagagtccaacaagaagctgcgacggcaa

SEQ ID NO: 49588 - DNA, 241 bp, Heterodera glycines
ggagttgttcatccacgctggtcccgtgaccaacctggacctgccgaatgatcacatcaccgacgctcccggggcttccgctttgtggagcttcttgaccgaggaggacgctgattatgccctcacaatcttgaacctgatcaagctggtcatcaaacctatcagcctgaacatagcctctgcaaatgagaagaacatggacgtcgagacctgatttgtttgtgggcaattaggacccgag

SEQ ID NO: 49589 - DNA, 631 bp, Heterodera glycines
gtctggactacccaaaccttcctttgattgcaatgaattcgagatttgccaatgagaagcgagtgaattactacccaatcgaggttttggacatcattgacaatcagcgagtcaccactcagcaacaaactccgacaatgattcagcagtcaatcaaaaagtgtgccattccaccattagtcttcaagcgtcaggttcacaacactgcgaagtctattcatctctgggacagtgaatatctagatgaggcagggattaaattgactaccgagccaattgccctcagagctcaccagctcaaccatcctgaagtcaaagctggcgacggtaacatgcagaggccgatggtggaaggttctgctgcttggcgaatcaacagtgtgctggtccctcaatcggtgtttgctgacggtacttacagttggatgttggcgtgctttgttcaacttggtggtcgcggtcttagcgagccagaccttcacaaatttatccaactgcttgaagaccaggcaaaaagacgaagccttaaacttccagcccttccaagggaccatttgcgactggtgaatttccgatcaaaagaagacatttcagcgctgttccaagaggcttctcaatcaggaattgcttt

SEQ ID NO: 49590 - DNA, 609 bp, Heterodera glycines
gttgttgctcgttgcgttgtgagcacatcaaattgcacgatgatatggacgacctgaagtatgttgtggaattcgacttcctcggcaaagactccatccgctattacaaccgtgtgccggtggaaaagcaagtgttcaaaaatctgaagctttttatggaggagaaagacccgggggacgatttgttcgaccgattggatacgagttcgttgaaccaatacctgaaggaactgatggacggactgaccgcgaaagtgtttcgtacgtataacgcgtcgatcactctccaagaacagctggacaaactgacaaatccttccgattccgtccacgagaaaatgctttcctacaatcgtgcaaatcgtcaggtggccatcctttgtaaccatcaaagggcagtgccaaaaacgcacgaaaagtcgatggaaaatttggagaataaaataaaagagaagaagcaggagtacaaggagttgaaggatcagctgaagaagagcaaatcggtggacgagaaaatggcaaaaaaatacgaaagattgaaggaacagatcgccaaactgaacacacagcgcacggacaaggatgaaaacaaacaaattgcactgggaa

SEQ ID NO: 49591 - DNA, 508 bp, Heterodera glycines
tatgttatttcggtcgcttcccttcggccgctcctttcccccgtgtcttctgcgagggaatgcctcttcattcacaggccttacttcggaaaatttcatgaacagcccaaccaatgagtcggtgctcaaatatcgcaagggaagcgcggaaagcgacgctttggagaaggaactgcagaaactgtgggcagagcccatggaagtgccgttggccattggcggggagaagacatttcgcaaggaaaaagcaattatacagcccatggcgagtgcatttgaatagccctttgaccacaaccgtcccattgcgttgattaaccatgcaacaacggaagacattcaaaatgccattcaaattgggttggcagcgcgtcatcaatgggagcgacttccgcttataaagagggctgatatttttctgcatgcctccgacctcatggcaggaaaatataggatgttgataaacgcggccacaatgcttggccaagcgaagaacattcaacaagcc

SEQ ID NO: 49592 - DNA, 205 bp, Heterodera glycines
agtgaacactttttccccggagggccacagtttccaagacgaatatgccatcgacactgtaaaggttggttacacaaggatccgaattcacaccaaagaaggcattcttttggctgcggaaaggccttcaatgagcaaattggtggtggacaactcactgatcgcatgttcagatgttgagaagcacattggcgtagacctcgcc

SEQ ID NO: 49593 - DNA, 475 bp, Heterodera glycines
cggaaatgcatttgcacgtttggcctggcgaatttggtctgccatccgttgacatcgaatgtcttcaatttatggcggctgccaaattctgtgctgctccgatcgcttttcacgcgtcgactcagccgtggaaatcgccaaagggggagttgccatttttcaataacaacggggaggagcaaataacggactttggcgagttcgtggaatttctgcgcaacagtcgacaggacgtcgtgttggacaacgatttggtgccgagccaattgtgcgagttcgaggcgtacaattgcttactaaaacagaaactgctgcctgccctgaaccatttattttgggtcgacaaatgcaattacggcacaattgtgcaccctctctatgcccaacaggtcaccttcccatacaacatttattacatggaaaggagacggagacgaatggacacaacagtcagagcgatcaggaagaaccaaca

SEQ ID NO: 49594 - DNA, 631 bp, Heterodera glycines
cattagctgtgttaagagatgccaaagaaacaaatgcacaacggaggaggaggagaagccgaaaagtgccgaagtgccgccggaagcacagcagacgacgacgacgagcagcagcagaagcagatggggcctgagaggcttcagctatacaaacgccgaattcccgaaacatgggctttttcctgtcttttctatggaaatgccaacaccgccgaccaacgcatcgcatcgcaaatcggcggaaggcatcggcaccaccctccaggcgggcatgggctatggcacgcagcaggcggaggcgggcgagctgccctacgaggatatgaagaagtcggaggcgatcatcccgtcccaggccggatggaacaagggcgactcgcagaagctgatgaccaactttggcacaccgcgtgacgtgaagggcaaacatttgaagcgcatttgggaattggagtacccggaggaagccgaagtgtcgctggaccgtctctgatcagcgacacggattgaattgtgctgctgatcagcacatgaacgccggaggaaggaggcgtaggacaaatgccatcgtcctcataaagttggagcagtacacacccaccacaccgtcatcctttgccgtccggagagt

SEQ ID NO: 49595 - DNA, 639 bp, Heterodera glycines
ttaaaacactacttcattttgttttaaaaatctgtcaattttctccaaaaaatgggcgattttggcgagtggtatcgttccattccgttaatcaccagatattggttcaccggatcaacagtgatcccattgttgggccgactgggcattttccatccgtatttgatgttgctcagttgggagctgttcttctacaaattgcagttatggcgtcctctcagcgcactgttctactacccggtcaccccacagacgggcttccactggatgttgatgtgttatttcctgtacaattactctaaagatttggagaccagtcaatttgatggacggccagccgactttttgtttatgctgattttcaattggatttgttgcacgattgtatgtttcgttgccgaaatttacttcttgctcgaaccgatggtgctcagtgttctgtacgtgtggtgtcagttcaacaaggaccggactgttcagttttggttcggcatgcagttcaaggccatctatttgccatggattctggtcgcgttcagcatggtgttgcgtggtggcggaatcaacgaattggttggcattcttgtcggccacacctactacttcctggcattccaatacgcacttgactatggtggc

SEQ ID NO: 49596 - DNA, 486 bp, Heterodera glycines
ataaatttaaaagcctcaatgctgataaaacgcgcattttcattctcttctcgtgcattgcaacagcacagtgtcgtcaggcctcccgtccaagtgacaggcattgagggaaaatacgcgtctgctctgtactcgtccgggattaaggaagaaaagcttgaaaacatcgagaaagaagtgcgtcaagtgaaagagttgtacgaccccaccaagagttaagtcctttcatgacaccccaatctgaaataagcaaaaaaaaaggaggcctttaagatgtgcttaaaaaacaggcgtctcaccacaggtttaaaaattctttcggccttttggccgaaaatgggcgaaatcacaaaatgaacccgtgttgtgagcccccttgaaaaataaaagcgaggcatcgcggagaaattctcctgaaaaattcaagtggcgaaccccctcgacaaaaaaaacaaaaaaacgctgaaacacccccttgtaaaaatt

SEQ ID NO: 49597 - DNA, 403 bp, Heterodera glycines
acgatccgtcagggcaatgcaaatttctgacgatggcacttcattttatgcgaccatgtcgaacagggccgcctgtttgtatgacgttgagacggcgaagagagtgcgctgtattctcgaagggcacataaagtcgggccctagcgtcatggcactgctgccgggcgaaagaccgcattttgcaacaggtgccgaaaacggcgaaataaaagcatgagactttggacagcccaagccgaacgggcacacatttggcaagcaggcagacataatcaatgcgatgcacatttggcgcaaaaatatgctggccgcgagtggcaacagcactttggacggatacgacacgcacaaaggcaaagtgcgaattcagtccgagacaatgcacagagaattgctcagctta

SEQ ID NO: 49598 - DNA, 521 bp, Heterodera glycines
tttcacgacaatgattgatcgaaactcgccattgcacatgttcgtttttgctaatcggttagcaacttttgagggccgatggaactacaaagaaggatgcaccgctgaaaaaatggccagggcaggtttcttctgcactgagaagcgaaagaagccctctgacgcagcgaaatgttacatttgcctgcacgaaatgtattgggacccggaggacgaaccgtggttatttcaggaagagcacaaaaagcaccgcccggactgtcctttggtgaccatcggcaaacaaaatgaggaggaattcactgtgcgcgaagtgctccttttgcttgcatatgaacacagcacgaaaatgtacccagttgcggatgcgtcaatgaaagaattggacgtgttgatgaagcaattgttggcggacacgcaaaaggcagtggaagggatttgaaagcgaatgccacggatctcaaacaacaattctctcatcacttttgtgtgacattatttacgaaaaagtttgacctcct

SEQ ID NO: 49599 - DNA, 460 bp, Heterodera glycines
ctaaaatgcaacagactcacattattcttgggattgcctcggtgtgctctctttggctatcatcgccacagccgtcactctgccatctcagccctcggacatgagccaaatggacagcaaagtgcaccacggagttgaggccttccgcgtcaacaccgactcgacctgcactgacttgatggacgtacaagtggtcgtgaccccgccctccaagcccctggataaccccttcaactccatcttccgtgccaaacctcaactgcccggacactgccactgcgctggcctccaacagccaagctgtccccctggtccgcccggcccgtccggaccgcctggaacaggccggacagcctgaaggggcaggacagcccggacatgctgaacaggctggacaacccgctcctccttgcccgccccagaacatcccctggccaccctgccctgctgggccgcccgg

SEQ ID NO: 49600 - DNA, 441 bp, Heterodera glycines
tgcaaactttgcacaatttgcgcaaagtattcgtgcaagacttggcacagcgcatgaaaaagacgccgaccggacccgagggcgacgaagaattcttgtcaagtccgatccaaaagcagaagatcatcttcctggagaacaacttggagcagttgaccagtgtgcacaaacagctcgtccgcgacaacgccgaactccgctgcgagttgccaaaattggagaagcgataccgtgcgagttcagaacgcatcaaaagcctggaggtcgccctccgagagaccaaagagaacgcgatgaaggaccgcaagaagtaccagtacgaaatggagcggatcaaagaggcggtccgacagaggaatttggccaggagggggctgcaaattgcgaaacccatccgtcctggtcagcactatggcactgctcgccctgtgaacgcttcta

SEQ ID NO: 49601 - DNA, 244 bp, Heterodera glycines
gacggacgatgactcaatgaaatttttggtgtgcaaatctcgcatcatgaccaaaaagatgtactaccatatgcaacattatgtgtggaaacgtcgatcagacagtgttcacatcatcaacattcccaatacgagtaacaaactgatgttcgccgcccgcgccatcgcagccattgaaaatccgtccgatgattgggatgtctctgctcaaacggacgcccaaatggctgtgctcaagttcgcc

SEQ ID NO: 49602 - DNA, 589 bp, Heterodera glycines
ggcacaacagcaagcgataaccaataagcgtaaagctgtgcaagacggaattttctaggccgaattaaacaactttctcatgaaggaattggccgaggacggttattccggtgtcaaatggcgtcgtgcaccttcccgtactgaagtgatcatcatggcgacgcacacccaaagtgtgctcagcgagcgcggcaagcgcatccgcgaactgaccgcactcgtgcagaagcggtttggctattccgctggacaaattgagctctatgccgagaaagtgtccagccgagggctttgcgcggtggcccaatgcgagacgttgcattacaaataggtcggtgggctcgctgtgcgtacagcgagctactgagcgctgcgcttcgtcatagaaagtaatgcccgggggtgctaaattgtggtcagcggaaagatgcgcggtcagcgtggcagcgctatgaagcttgtggacggagggttgatccattcgggtaacccggtcaccgagtacatccgagaggggggtcgccacctgcaaatgcgacatggcgttttggacatcaaagcgaagatcatgttgtcacacgaccccaag

SEQ ID NO: 49603 - DNA, 304 bp, Heterodera glycines
tgacgctgacccggatgattacggttacttcccagacccttttgaacactcgtgcggcttggagaggaaaatgctcatcgctcgggtgaatggcgacgaccgctatgagccgaacgtgtctttctgttctgaacataccacccaggactatccgaatttgctgccggtcgctttgcaggacgaacacctcccgtggctttgcggagcggactcgcactacgcgaactattgcgcttttaagtaaagcctgatgaagcgaagctattgcggacattggttgaagggcgtgcaagccgaccctgac

SEQ ID NO: 49604 - DNA, 631 bp, Heterodera glycines
gagatggaatcgtatgtgcaagttgaagatcaagattcgagggactccggcatttcgttggctcaatccaccacctcgcagcaaagctgttttgccaaaatttattttccaactttgttcgacttcgggttcaaggttcgggaattgtattcgcttgacaccgttgaacggccccaagttccgcacaaagccttccgcagcattaacgccgatacgatggccaaccttttggggtttttaacagaagaacagttccaacggcggttcattctgatcgattgtcgctatccttacgaatacgatgcgggccacatttggtactcactgaatttgtgggagaccacttccattgagaagctcttctacccagaagaggaagaacggttcggcgaaattattgtgcgaactcccatcttctactgcgagtactcgcagaaaaggggacccaaaatggctcttgcactgcgagaatttgaccgggtccggaacgagtcgcgttacccatacgtggactacaaggagatttaccttctggaccggggctaccgatacttcttcaaggaacgcaaatttggcaagtactgtactccacaagcgtacgtgcaaatgtgggattcggcgtacacagaac

SEQ ID NO: 49605 - DNA, 604 bp, Heterodera glycines
  unsure (1)..(604): unsure at all n locations
aaaaattgctttgccggaggtggaggacgagtgggaagccagtacaacgcgctactctaagaaggatgcttcgactactcttcgaagtaatgagacaggtgttggtgaccacgtgatggccaatgtcaacgcaaagggcaacagattctacaaaattctcgtccgataaattcaaaggcctcaaatcggggacaaatttgcttcgcgtcttgggnaaaagggaacaatggtaatgatgtacacacaaaaggatatgcctttcacgtgcgagggtataacgtcggacattatcattaatacacacgctgtgccgagtcgnatgacaattggacatttgattgaatgcctccaaggaaagctttctgacaacaaaggcgaaaatggcgacgccacccctttcaacgacccagtcaatgtgcagaaaataagtgctttgcttgagggctacggctacccattgcgtggctatgaaataatgtaccacgaatttaccggggcaaaagttgagcaccccggggggttctgggggcccactttactaccaacgggcttaaggcaccatggtcgaaggacaaaaatattacttcgccgccgccctgagggg

SEQ ID NO: 49606 - DNA, 535 bp, Heterodera glycines
ggacaagaagttgggaaaccccatgagcggcgtaaagattcgaaaactctgtctcaacatttgcgtccgagagtctggtgaccgtctcactcctgctgcaaaggtcttaccaacaattgacctggcacaacctccgcgttactttcaaaggctcgttacactgtgcgctcgcccggaattccatcgcaatgaactattctctgtctattgcacagttcgtgcaccagaacctgaggaaatcattgatcgtggactcaaagccaaggaatatgagctttaccgcgagaatttttcggacactggcaattttgggttcggcattcaagagcacatcaatctgggcataaagtacgacccgtcgattggaatctacagcatggacttttatgtggtgctcggtcgtgctggactgcgggtggcaaaacgaccacgaatccaaggacgaattgccgcctcgcctcctgtgcaaaacgaggaagcggtcaaatggatccaacaaaagtatgactgcgttattttgccacccaaaccgaat

SEQ ID NO: 49607 - DNA, 522 bp, Heterodera glycines
ggttaatttcgtcttggcagagcgacaaaggctcttagagcaagtggaactgttgagggaggcggtggatgagacgggcgacgtgtcgtattcctgcgaaaccgcgggctatttcttccgctatacggtccaattgggaacagccgtttcctcctcccaattttattaataaagtttcattataaattcattcttaaaggagagagggaaacagcgaagagggtggttcatgcgaatgactcaatttgatatgcgagtgattgtctcaatttgtttaggtttgcaagacatgggaatattttatggagcaagtgcaaaccatgcaaaagcagcaccagcaaaatgcgttacccaaggaatttgtcgcggagcattttccgttttccaaattcttcgaaaatcgacgacatcaatccaatttactcccattgaaatttgaattacgtgactttgaagaagatttgacgattgcgttggacggatgggagcggataaaagacattttcaagaagttggaagagt

SEQ ID NO: 49608 - DNA, 277 bp, Heterodera glycines
ctgtgcttcgcgcaaccaagcagtgattgggcccgtggtgatagcccatgcgaagatgtggcatcctgaacatttttgctgcactcattgcggagattccattgacaatcggaattttttccagcggcaacgcaaagcgtactgtgcaaacgattaccgcgatttgttgtcaactcactgctcctactgcacccagccccttaaagaacactgcgcaaccccacttggcgggaaagaattttcccgcgggagcattcttgattgcaccgaatgcgat

SEQ ID NO: 49609 - DNA, 373 bp, Heterodera glycines
gaacactagcggtggattctccacaaataagtttttgttggacctcgaatcccgcggaactgctgctgcactctcaaaaaccgctgatgcacccatcgagtgtgtcaagatgttgttgcaggcgccagatgcttccattcacatcaccgcggacaagcgctacaaaggcatcatcgacgtcctcaaccgagatcccaaggagcacggctttctgtcgtcgtggcgtgggaacctggccaacgtcatccgttactttccgactcacgcgctgaacttcgccttccaggacacttataagcgagtcttctcgcaaggattggacaaggagaagcagttcttgaagttcttccccctgaatttggcttccggcggc

SEQ ID NO: 49610 - DNA, 349 bp, Heterodera glycines
tctcctgtcggacagtgcgatgggaatgggctgtgccaggttcgcttcccatgacacgacccgccccgcgcttcctttccttgcggtgcgccccccccctcacgtcgtggtggcctggatgggatggaacgactcgaatctgacatacgagacgcagtccaagccaggcattctgaccctaaactacccgattgaattcagcatcgtctcctactgggatgacatgaaaaagatatgatatcgcaccttctactacaaaatgagttgcgccccccacgagaagaccgcgctgctctgataagacacgctcaactcaaacgccaagccaaaaaagatgacccgaatcatg

SEQ ID NO: 49611 - DNA, 565 bp, Heterodera glycines
gcgcccaacgaccaccatggagaccaaagtggcgggctgcggcgcggtgccgaagctcgtccggtgctggacggtgtcactgctgcgccagacggacggcatcatcccgtcccacgccggttggaactagggagactcgcagaagttgatgaccaactttggtacgccgcgttttttcttcaccaaaggcaaagtggagaatctggccgagattccggaggacattttgctgaaaagtcacggggaggtgcgtctgcagtccggtaccaaccggttcgcctcccagaagggctttgtttccttctgtaccaaacgtgatgtgtgtcctgaaggtgtgaatgtgaacatcctgccggtcgacttgtagccgctgccggaggataatatccgcgccagtgaccgaattgtgcgtctgcaagccggtacgacccaattcgactcgcagaatggcatgaccctgttcggaacccgacgtcccgagaccaccacaatgagtgacaaccagaaccgggaggtctcgcacgagctccaatttgacaagacggagattccgcttcaaataggt

SEQ ID NO: 49612 - DNA, 337 bp, Heterodera glycines
ggtggggcaaactgtgcggtagggaaagacttgtctgctcatttcctacactatcaacaaatttcccaaccaatatgtgccgacagtgatccacaattatgcggtgactgtaatgatccgtggtgagccttacactttgggactgttcgacacggagggacatgaagactatgacagactgagaccgatctcctacccacagacggatgtgttcctcatttagatttcacttgtcacaccggcatcatttgagaacataaaaaaaaagtgggtaccctaaataacgcagcattgttcaaagacaccgtttcttttgggtgagacaccaatggacttg

SEQ ID NO: 49613 - DNA, 297 bp, Heterodera glycines
gataatgactgggtgctcaactaatgtgtccggccaaaatgagtcacaccaaatcgcgattaaatccgggatcccctaggccaggcaggcgtacactgtgaactaagagtgctcttccagtcttaaggcattgattttgtgtaaccaatcttggcagctgggacaacgttacatggttttggtggttggcgttgaaagtatgaatcaggcaccattttacttggcgcgtggtgatgacaattacagagatatcaaacttttggattctgtccgactgaatggcatttccgaacccaa

SEQ ID NO: 49614 - DNA, 476 bp, Heterodera glycines
ggaatgggcagtgagcagaacgacgctgcaacgaaagacgagagagccgtttccctcgcggcctctcataatcagttcctcaactgccctcactgttcctttcaaactcgtcgtggtccgcttcatttgaagcgccatgaagcagtcgttcattcgaggaacgttctctacgtttgcaacgtttgtcagttcgaatgtcgttggaaccgcgagttctacgagcacatgcgtcggttgcactttcctgggcccccttacagctgcgactcgtgcacttacgacgttgaccgactcactgtgctgctgactcatcgtttaacgcacacggacgaaaagccattcaaatgttcggagtgcacattccgaacgcggaacagagccaatttggtcgttcaccatcgtctccacacaggcgaaaagcccttccaatgcgaaatttgtggaaaacgttttgtcttaaaacgaactttggaaca

SEQ ID NO: 49615 - DNA, 638 bp, Heterodera glycines
  unsure (1)..(638): unsure at all n locations
gctcacaaatgacgcaacaattcatttatgatgaagagcatgacgaatttggtgatgagattgatgataatgatgatgaagcagcaacagcattgtcgtcgtcctcttcttttcgtccacaacaaattgtccatgtcgacatggatgtgttgcgcacaaattttgcacatcgttgtgaacagcagaggcgacagcggcgggagcacaacaatttgttgcggcaaagttgtggaggcaacgatgacggcggtacgcggttgcacgttgtcacaacttctgctggaataatgtcatctggaagtcaggaggaggagagggaggaagacaacgcgtcggtggaacaacgcttgtcaatgatgctgaacaaagcggattttgctcggatgcgtctgatcggccagttcaacaacgcgtttctcattgtccgtcttcgatcggacgtgttcatcattgatcaacatgcggcggatgagaaatacaattttgagcgtttgttggcacacaatgtgatcaaatcgcaaacactgatccgcccgaaacgnctacgccttggcaatgtcaacgcggcactgatgcgcgacaatttgcacgtgtttcctgcccacggattcgattttcaatcttacaacgggagcgac

SEQ ID NO: 49616 - DNA, 476 bp, Heterodera glycines
catatgagttgtgctgcgatatgattgatgtaacaattgacatttcatccatttatgggcaccggaatgagcagaaaaacttccgaccgattggctttgatcaggattcgtccgccgttatcactctccggaccagacaagttatttttttgcgccaaataaatgtttatttggcattggtttgtgtgatcaaagaagacaatttcgaaaagcaaggacttatcgatttcaatttcaatgtgtttaaacagggagtggaagatgtgttcgaattaggcaaaagacggttgccttccctggctgttggatgacaccaaaactcagcttctaatttttccgtttattcactggcattgtcttttatttttgttgccgcatagaccaaatttctatcaaattattattcaaatgaaatttataaagacacattcaaaaatacattcctaaaaaatgggacatcagccgagcggaggagc

SEQ ID NO: 49617 - DNA, 652 bp, Heterodera glycines
ctttgcttcatcacgaatcaaaacttaaagccggcttcgatttgttccgtcttttggtggctaccgctctttggtacactttcacgaattgttttgttaaattcgagcttcatactggaaaatgtcacggttctgtcgaatcggcgagggttaactgctatgaaaatggcgggaaatggataccaggttttgacatcagtggacacgccttcctgttgatctacagcattttgataatctgcgaggaatccacctcattccaaaattggccctcaaaacctcgtgttaccattcatcacgttccttcccgcaaggaatttgaactatttcaacggaataccaaaataatccagtggcttttcgtttctctaatgctccttcacttgctatgggatttgcaattgttgatcacttcactttattaccacgaattttggcaaaaactcattggggcaagcattggagtgttctcgtggttcgtgacctatcgcttttggttcgtcgtcggattcccttttttacccatccggcggcacatcaaaagtttctgacctgcgattatccgccgcttttgctcacttcatccgacccttttagaatgcctttgctaccgtaaattcctcaaacgattgaatagcttttgagaaaatgc

SEQ ID NO: 49618 - DNA, 426 bp, Heterodera glycines
aacattaccaaatatgcggaaatggcgcggagttgtggcgatcaaatgcccaaaaacttggctataatggaacaccaacgccgttttcatcccaacgacaaaacagcaccacatggaggaataactgcatttcctggcgaaggtggcaaagtgctaggcttacgtaacaaacggctgttacgcgaatacaggcctaagaagcattggtacgaatttgaggatgttgtgtttgattacgacgtgaattgttcaaagggaatgccatgggacccggaagttgccaaacgaatggacagttatacggaagtgaaatttgtcaaggatcacctcaaaaaatattgattccctttaatttttgacatttgtatgttttaaattttgtttcgaaagtaaaattacaaattaccaaaaaaacaaaaatgaaaa

SEQ ID NO: 49619 - DNA, 443 bp, Heterodera glycines
  unsure (1)..(443): unsure at all n locations
aaaacacgcccgatgatgcgaaagtgatgtcctgggtgggattatggctaccaaatttcggcaatggccaaccgaacgacaatcgtggacaacaatacgtggaacaacacacacatttcgcgtgtaggacaagcgatggcatcgaatgaatcgcatgcatacgaantaatgcacgaattggacgtcgactatgtgctggtcatttttggaggagtcaccggctattcatctgacgacatcaacaaattcctgtggatgggtccgaatcggcggttcgacgccggaggggcgacacattcacgaaaatgattactacacaaagaatgggagagtttcgcattgacaagnaggggttcctctacaatgctcaactgtttaatgtacaaattgtgctatcaccgcttcggcactgtgtacactgaacatggccgtgccaccggttt

SEQ ID NO: 49620 - DNA, 533 bp, Heterodera glycines
gtccaattaagctaaatatttataaaaaatggcttattctcgttcaccaagtcccaatagagaacgttcccatcgctcaactcgaaaacgctcacgcgatcggagcaacgagaggcgacacaaagcgccacgctcatcacacaaagaaagacatcgagacagggaccggcgcggagatagggaccgagacagagaccgagaaagggagcgccattccagtggtggagataaaaatcgcgagcaccggagcaagaagaaagacaatgtagctcacgctacaaagtctaaccctattaatgaaattgtcgatgttgatgaggacatgatgcgaatgatgggtttttctaattttgacacaactaaaaataaacatgtcgagggaaatgcctctggtgagtcgaagatcaaccgggcgcgcaaatatcgtcaatatatgaacaggaggggaggctttaatcgtccattggattatgttgcctaactgtacacgttgttttatgtaattgtttcacttttatatttcttttttgtga

SEQ ID NO: 49621 - DNA, 620 bp, Heterodera glycines
gtgaggagccgttggcacggctcgaacggcacgaggaccgcgtgccgagggtcgcctttcatcccagcgggcatttcctggccacggcatgttttgactcttcatggcgcctctttgacctggaaacgctgcaggaactgctctaccaggaggggcacagcaaatccgtctttgatctcgatttccatgccgatggctctctgatgttgaccgggggcctcgactgctacggccgcgtgtgggacttgcgcaccggccgatgcatcatgtttttggagggccatcagaagggcattcacacggtgtgctggcaccagaatgggttcctgatggtcaccggcagtgcggacaacacgtgcaaggtttgggatgttcgaatgcgccgtcagctgtacacaatgccggcccatcagaatttggtgtcccgcgttcggatggacccgtccggcgagttcctggtcaccggctcctatgacaacaccatgaaactgtggacatgccagggatggcagccgttgcgcgtgttcgacgcgcacaacatgaaggtcacatgtgtggacgtgtcgccggacgagaattggattgtcagcgcatgctatgaccgcacattcaaactgtgg

SEQ ID NO: 49622 - DNA, 639 bp, Heterodera glycines
atgaacagaggcggtggcttccatattacgattcaagcaccagtgaacatcgcactgatcaaatattggggcaagaggaatgaggaactcgtccttccgctcaacgattccattgctatcacaattgatgagctgagcgccaccacacacatcacaattgggcccgatgtgagcacggactcggtgacattgaacggagtcggcattgacatcgccggcagttcgcggtttcgaaacgtttttcagcaaattcgtgaatactcaaacagaaagcgaaaactgaagggcgagcatgcttcaaagggttggcacaccaagattgagtcgagcacaaattttccgacctcggcaggactcgcttcatccgccgccggttttgccgccattgcgtttgggcttggcaaaattttccgcttgccggagcgagacattgtcagaatggcccgaatgggctcgggctccgcttgtcgcagcattcagggcggttttgttcactggaaggcgggcactcatcagcaaaacgactcggactgtctttgcgagaaactggcgcccaccgcccattggccccaactccgtgccctggtcatcgtcgtcagcagcgggcacaaaaaggtgggcagcagcgtgggcatgcgc

SEQ ID NO: 49623 - DNA, 424 bp, Heterodera glycines
gatgttcccacaggacggcgaccgaccgcatctccagtcgctgagaccttgtcccgagtacacgggtgcaactcctatccatggagttggttcaatgtgccgtacggagggatactggcagacggttcacggagtacaggggctcgctgtcgggtcaatgcctgcccacgacctttacttcccggactaaatggagttcatgtcttcactgactggaaagcctcatggccatacgaatgcactgtcgtactcatcggccggaatggcggcgacagtggaccacgacatcgcgatgacctcggccgaggaggcccaatagcgcaagcaaatgctgtacgagtccgtcggaggctcattggaccgtgtgcgttccatctgtcagaaatagggaatgactgaatgtgataggtgctactgcacccaa

SEQ ID NO: 49624 - DNA, 349 bp, Heterodera glycines
agtcaaacccgatcttgtccatcgcggattgggtgccaaaatcattaggcggttcaagcatcgtgggtacaaattggctgccctgagagtggcccaggcaactgtcccccattaggaggttctcttccgggacctcaaagacaaacctttcttcgccgggctcgtctaattcatggcatcagggccgattgtcactatggattgggaatgtttgtatgtggttaaacaaggtcgcggtttgctcggcgctacaaatccgatggtctttgttcttgggagtattcgagggaatttttgcattgagatgggacgtaacatttgccacgggtccgatttggtggcttctgga

SEQ ID NO: 49625 - DNA, 316 bp, Heterodera glycines
gacactatttgccgggaaataatcgttcaacttgggcaaactgtgctccattgtcaaaaagtggcatacactcgttgagggcaacgtggcacagaacaccaccgacggattcttactccaactctttggcattggctttaccaaaccaaatgccgataaaatcaagaagacaacctatgcaaagacatctcaagaactgatgattcctgccaatgtggtggtaataatgaagaaagaggtctcttcccgtgacttgaaagacgcggtcaataagctgatcgcggactccatcggcaaagacattgagaaggagtgc

SEQ ID NO: 49626 - DNA, 584 bp, Heterodera glycines
aagctcgtctttggaagtgcacagccgcttccgccagcggttccaccaaaacggaggagcgttggctgtttgtgttcaacgatttgctgctgttggccagtgatcggagcgctttcattcgcggcaccaccggtgccggaaagtgcaaattgcgcgcaatttttgccgcaaaacacacccaaatttgtgaaggtgacagcttggagcgtgagcattcattttatttgcggggctccgattcgccgcagggccctcagcgatgtgtggagttgtgttgtgcttctcaggcggaaaaggatgcactgtttgacattgtttggaaagtcattcaccaggaaacaaattcaaaaaattcggcggaaacattggccaaaaacacgaacaacaatagcagcaatacagaacagcaacaacagaataaaagttgtgcacattgtgacactgattttggatggtacacgcgcccgttggtgtgccaacgatgccaacaacggttttgcaagcgctgcttcggccaacggcgcaaggagcagaaaatgtgcttggactgcttaaggacagcggaaggctatcgctccttttcc

SEQ ID NO: 49627 - DNA, 346 bp, Heterodera glycines
cacttatgtcaacatgatcacctctgacaacgagaagacccgccatgcccttgcgcacctggactttctggacattttccccctgcaaacgatgcatacaatttgcccgggcaccccacatctgtaactgcctctgttcgaccgcgatgagtaccaattgctctcaacccaccaggactgtttcatttacctgatggatctacatacttgcgacaccaaagacgacctgcatctgccggaaggcgaaattggtgaccaaatcatacaggcctactagaatgacgataaccgcattcctgtgtcgatggcgactgcgcgcctggatgacgccatactcctgtggaga

SEQ ID NO: 49628 - DNA, 301 bp, Heterodera glycines
agtccgttttctgcagcgtttcgtcaacaacaatccgcgcaatttggaaagagtgcgcctccaggggaagcccagcgggtgggaatttgagaagaatcgagcgcaacataacttcatttacagggtcgacttttgtccgacgaaaaatgcaattgctgcccgagtcgtccattaccaagatggaattgtgatcgaagcgtcaactcgcgagaagactggacaaagtcaactatacagtcagacggatgtctccgccgcttataacattggtcggactgttggctcatcgatgcaaaatggc

SEQ ID NO: 49629 - DNA, 293 bp, Heterodera glycines
gtttgagcaatcgctatgttttcatcctccaaaagtgccgcagttttgcgaatgcgcggcgccaccggcgcaatggcacggcggtggaagggcggtgacgagcagaaaaatgtgccggtgccgagccccaaagaaatggcccagcggccggcggagtttgacgagctgacgcacacgggacaggcctgggacattttttattggcgccgttctcgtttcgagtacatgccgaagcaagtgaacccgagcattgcggcccatttgatcgccgagctggcgcccgtgcccagcga

SEQ ID NO: 49630 - DNA, 427 bp, Heterodera glycines
taaagctgtcttttgtttgtcacatacaaattccgtctccgtccaaaaatgcctgagttacttttcaagaccatcacgcagcaatcgttcacaattgaagttgaggaaactgcaacgatcggcgaagtcaaacgaaagatccaacaggtcaaaggcgcagaatacccagcggagaaccaaaagctgatcttctttgtgaggatgctcgaggatgccatgttggtctctgagctgaactttgcggcgccgaaattcattgtcatcatggtcatgcgaaaacccgcgcaggcatcgtcaactgttcggtcagcaacatcctccgcatcgccacaaaagaacacatcgacagcggacggacaggcgccgaagtcggcggagaacaaagcgacgggggcgacttccaacacatcggtggcccagccgggag

SEQ ID NO: 49631 - DNA, 415 bp, Heterodera glycines
gcgcatggccaggacagccacggagtatggacatcgcgcattttcgacttcaggtgctgcacaagaactgagcagcgcgctggacgaggagatcaaagcggagaaggaactccttcaggacaaattgggaggcacttccgcgccttcagtgcccggcttctgaatcaccacgaaaggggccgaagtgcgactgagcaaaacgcacggaaaccaaaagattggagtcattctgaacgagaatcattcgatcgacatcgaagaggacgaggagtacgaagaccagccacaatgagaaatggagacagagtctgtgtccgtctcgttgccacgcttcgcccttaacatcacaaagaacaaccagagtatgctcttcgatcttgaaatggcgaagacggaggacggcggatttaacttc

SEQ ID NO: 49632 - DNA, 610 bp, Heterodera glycines
aattactagtaattagccggcaaaaatgtcctcttccaacacaattttgttggactgcagcgacgacagtggcgtcgtcgtcggcttcgagcagtgcgccaccagcgaaggcggaggggcggcagaaccgcagcagaaactgactaagaatcagcagaagaagcgcgcacgcatggagcggttcaatgcggggaaagcggaatggagacggaagcaaagggagcggcataaggagcggaaacgcgcgcggaaagcggacggacagacggcgaagatgaacgagtccaaatgtcgcgttcgcgttgctgtcgacatggcctacgacgacttgatggacgaacggtcggtgcgcaaaacggtgtcccaacttcgccattgctacgcgtccaatcgccgggcggcggaccctctccaattttatgtggtcaatttggacgaaaaggccaaaaaggttttggacggcatcaccggctggcaacaatgggacgtccatttgttggcccaacccttggccaaactgtgggacgaccgcgaaattgtctatctgacagccgactcggaaaacgtactcagcgcattggacgagcagaaagtgtacgtaatcggcgga

SEQ ID NO: 49633 - DNA, 554 bp, Heterodera glycines
taaaaatttgatttttcaataaaatgtttaaatttcgtgctgttctatccaatttgtctctgtgctgttcctcctctttgctccaaatccaacgacattttgtgactgcctccattttgcgaaaatgtccttcgtccactaaacaatttgcaaatgcacaccgttgcatcagcagaacacggagcctcttcatgttcatccaagttcaagagacgccaaacccgttgagtctcaaatttttgccaggccaaaaagtgttgtccgagccgggtcgcacttacgagttcacttcagcccgcgatgcggcaaaaagtagtccgttagccaggcaactgctccgaattgaaggtgtacgcagcgtgttttttggcgaagattttatcagcatccaaaagcaaagtgtagaagaggaatgggcactgctcaagccgcacatttttgccgccattatggaccatttgcaaagcggaaaaccggtggtggtggtgacgggggcggacgccgaggcggcggaagcgaacgcgcagccgacggacacaacaattcttccggag

SEQ ID NO: 49634 - DNA, 561 bp, Heterodera glycines
acgaggattgactttgggaatttgacttgttacatggctgtggcgcggaacaaaggaatcgaaattgttgagaatgattactctttgcatgccacgccttcgtgcgtttcctttggacaattcgctcggatgatgggtctcggagccaagcagcagctgaacatcaattacgggaacagtgtcgtgaatttcaagcacatcctcggacgcactttcaatgacaaagtcgtgcagacatttcgtcagcacattccctgcggacttatggggaagttcaccgatgaccaaattgagataaaagtcactcatttgggaacgacgcgagtgctttccccggaacaggtggtcgcctgtctgttgacacatttgcgggttcagctcagctgttctctcgggacggatgtcactgaatgcgtcattaatgtcccgtttttctacgaggaaaaccaacgccgcgctttgctgaatgcgggtcgaattgctggcctttcacttcgcctgatcacggacccggccgcgttggcctattgttacggcatgtataacggggcaaatcttcct

SEQ ID NO: 49635 - DNA, 581 bp, Heterodera glycines
acgaggtgaaaattaggctgcaaactgcgggagagatcatcaacggcccaaaagtgaatgttttcaccgttctgcgcgagttgggcttcggcggcctctacagaggtgcccaggcgtgctttctccgcgacattcctttctccgccatttatttccccgtttatgcgcatatgaaaatgaaaacagccgatgaacagggttacaatcgcccttggtctttgtttgtctccgcttttattgccggggcgcccgccgctgctttggtcacccccgctgatgtgatcaaaacgcggctgcaagtggccgctcggacgggccaaacgacgtacaacgggcttatcgactgctcaagaaagattcttagggaagagggaccttcggcattttggaagggcgcggcagctcgtgtttgtcggtccagtcctcaatttgcggtgactctcctcacttatgagctgttacaacgcattttttacgtcgattttggtggtactcggccaagcggttcggaagtttcgacccacaccacaatattggaccaagcatcggaaaacccccaccacatcggtggatacaaattg

SEQ ID NO: 49636 - DNA, 385 bp, Heterodera glycines
gtcaacgagccggccgatgtttgcatatattctctacacggataaactcgactggctttcgttgaacgaagcgaaaagtgtcgggaccgtcggcatcacaaaccatgctcaaaaatctctgggacacgatgtttacgtgaaaatgccctaaatagtcaaaaaattgtacagtgacaacacaacgtgtgccatccacagtgtgatagccgcctcagaccttatagctccggttgccggctaagtattcggaacagaacatcatgaactggaagaccaaccagcgctgacccacaatgactgctacagaaaagaatggctgtacaagatgaaagttatcaacctgaaggaatcggaccagctgatgagcgagcctagatataataac

SEQ ID NO: 49637 - DNA, 618 bp, Heterodera glycines
gtccgttcgatgccccctctctctccgcctcagctttttttccccgcttttctgctccttggccattttttgccgccgtttgcccatggccaattgccctcggcgatgcttcccgccccctccacgtcccaactccaagtcaaaatctcgaatctgcccgtccatgtggccactgcgcagcacttgccccaattggtgtggagggtcgtcggcagacaggcgacagaacgcgttttttgtgtcagcgaagcgccggtcagccaactgcgctttgtctgcgtggattgtgtgcagaagaacatcacggatttggtcgactatctgaacacggcgcaggactccaccagaattgccacatcgcccgccgtcgaattgcctccggtcgatgccaatccctcgtggaccggtgccacgatcatttgccaagccgcggtcaatggggggacaaaagactctccgccgtcggttgtcgacgtgcaatatttgaggggagtgcacgtggtcgactccaacgggcagggccccgtccacattccaaccagggcttccgattttatgtggaatgcgtgcgcgggaacgacggacagtgtcagcaaagtgccgcccgacggaagacgc

SEQ ID NO: 49638 - DNA, 576 bp, Heterodera glycines
gattattcttgagcaaaacaatagggtaattgcggaacttttggaaatgaaatttaccaatgcccgaacgaacagcaaatttgataccgtctatgttgtgttcgccgattttgatggcattttataccatgcatcaaatccggatggaggcgacaaatcaaagcttatgctgagcatttcattgaaattttacaaagagcttcaagaacatggtgcagatgaactcattcgctcgatttatggcaaatttttgtgggaaagtccacatgctggctacagcgtgtctttggtctacgatgtggctgacattcctgaaaatttcactgcgctcgttgagcatgcgtcctatctgaaacgaaactgttttgcctcggtgtttgaaaagtattttcaattcctagaaagcggccaggagggcgagaatagagcggtcattcattaccgggaagacgaaacatgatttatcgaggcaaaatcggaccgggtgactgtcattttcagcacgttgatcgaagacccggacgatgtggtaatctgcaaagtgttccttcaggagttccgtgaggtgacaagggc

SEQ ID NO: 49639 - DNA, 280 bp, Heterodera glycines
gcgtcgacgtgcgatgtcgcacaatgtgaagcgattgccccgcgcattgcgcccgatcgccgctcggcacacacagcgaacggcacagcgaaaaaaggcaccgagccgaaaatggcgacggaggccgacgcgaatgctcaaacgatgggtgcgcgaacaaaggaaaaacgtttggttggaaacgcacatttggcacgtcaaacgctttcacatgacggaactttggggctacaaattgccaatgaaaagctgtcagcgtggttttcgcccaaattaccgt

SEQ ID NO: 49640 - DNA, 352 bp, Heterodera glycines
gcgaactattggtgggaaacgaaccccccttctcaagactcgaaatttcattgtgggcccgccgctaatgaaaactaagagttgccctaaacaaattcatttcgcgcgactgcacgacgcgaccattttacgtcacggactgcataatgataccggaaactttgctctgtcttccgagagatttcctcacccctctgccatcatcgccattatcaacaacgcttccaacgacgaactgctgcacaccctaaccttggtcatgggagtgctcgacgcactcgatctgattccggtccccccgtggggtgaagcgcattactcaatgccattggctcccccaatgggacaaaag

SEQ ID NO: 49641 - DNA, 541 bp, Heterodera glycines
atttatgcttattaaaaatcgaaaaatcttgtgatgactcagcagccatattttgcaacttatatacaggacctagagcaggaccctttcgatgtgattgattttgtggagcgtttggcgtggcgaatgagcaccggcaaagactgtgtggacgcggcctacctgaagaacaaatttgaagaggaaattggaagtttacaactgctctctgaccaattccaaagcaaattgaacacactcgagcagcagcaaaacaaagacaaaaccgactatttggactctctgcagcgattgcatgacaaaaatggcgactctcttgaccaattgaaacaactcgacctcacaatgcaaacggtggccgcaagggtcgtccatttgggtgaccaactcgaaagtgtccatgagccgcgtgctcgcgcgtttgaagccttgcaactgatgcggcactttgatgaattcttggcggatcagccactgaattcggcgcttttcacagacccggacagagtcattaaaagaaacaaaacaaaaataacaattt

SEQ ID NO: 49642 - DNA, 534 bp, Heterodera glycines
gcctcttcggcttttacatagtgatgaaagggcatagtgacgaagttactggcgaagccacccgtgccgttctgcacgcgtggaagcatttggcgatgggcatcaccgacgaggaagtggacgcggcgaaaaacgcactcaaggcccgcctgttcctgggactggagaacaactcgcaaattgccactcacatagcatcggaggtgttaagcagcggcaaaatcacgccctttgatcaattggagcgacgcattcatttcatcaacgcaaacgcagtgcgggaggccgtttcgcgacacgtctatgaccgggaaattgctgtggccgcaattgggcgaattgaagcgttcacgtcatacttcgagcttcgctacggaatgagttggtggcgtctgtgaaaagaaaaagagaagcgacctttcaatggaaatattcgaattatatgtgcatgaaataggctttgctcattatgtgtaattggtttatcttctgttattaaatattgcagactgtataaaaaagagttgatgaaaa

SEQ ID NO: 49643 - DNA, 304 bp, Heterodera glycines
gaacgaacgccctgagcgagtctacgacacacagccgacggggacttgaacacaagtccaactcttgagatggaaagaaggcggccgacgaacatcgttattggaacaatttgggcttggctttacaactcccctcgaggctattgagggcatatacattgacaagaaatgccctctcactgaaaatgtgtcaatcccacgactgattctcatcggagtcagcatcgatgacaacatgcagcgaacgattgttatccgacgcgactatcttcatttcctgccgaagcaccctcggtatgaaaac

SEQ ID NO: 49644 - DNA, 478 bp, Heterodera glycines
tcaattctatgccggaatgaccaaaattgctggcgaaacgtgccaaggcattctcaccggactgatctccgtctaggacaagcggcttgaagtcacgaattgtttctcgatctctcgtccggatgctctgcacaaaagtgaatagagtgccgctggccccgagacgtcccgttcggacgataacaaacagggctagattctcgacatgctgaagcgatttcgaatgatgaacatccattacgagtcggtcggctttaaccaggcgcacccattctgcacctggatcacccactaactgctcgggtcattgatgcactaccaatcggacatgtcacactccgttgtcattggttacgacgcggtcaatacccgtcagggatgtctgacccttcgcgcttatcgcctctccaaaaatgcgttggatttggtcatcacttgcgacgacagctggtctcctgaacaaaccacattggctggg

SEQ ID NO: 49645 - DNA, 397 bp, Heterodera glycines
gtccgacaaatttgtcggcaaatggaatttggagtcgtcagaaaaattttactacttcgtgaaagaggtcggcgtcaactttctcacccgcaagggcgctggctgtgtcaaaccggtgctggaattcgaagtgttcaacgccggcgatcactggaagatgacgtccacgtcgacaatcaccacctgtaactgcgagttctacctgaacaaggagttcgaggggaagacagacgatggacgcacggtgaagaccattttcgcctacgaagacggtggctgaccgcataagcagtccaagctcaaggacgacgatcaggacagctactaccagcgctacatcgatgaaagcggcaaactctttattacgatggaagtcggctcggtgaacgccagacgc

SEQ ID NO: 49646 - DNA, 451 bp, Heterodera glycines
gattgcctcagggtgctctctgttgggtatcatcaccacacccctcactctgccatctctgtactcggagatgacccacatgaacagccaagtgcactacggagatgaggccttccgcgtctacaccgactcgaggctggactgacttgatggacgtgcaagtggtcttgactccatcgtcaaacccccgagataaccccttccactccatcttccgtagcccacgtcatactgcgcggactctgccattgcgctggcctccaacagccaagctgtccccctggttcgaccacgaccgaccggaccgcctggacagaccggacaccctgcaggtgctagacaccccggacaggctggactgcctggccaacccactcctgattgttctgcggaaatgctccactgtccgcgattgcctgttagcccggcctgacgacacgaggggacaggg

SEQ ID NO: 49647 - DNA, 658 bp, Heterodera glycines
gtcggtttgaaggaacagcttttggatgtcacagctgcgcttgaatctctcaccaaacaaatcctccaaaatttgttctccgatggcaaagcgaaagcgcaggataaaagctttgatgaacaattgaaggcactggtcgaatcgttcaacgacaaacaatccgagtttgttgttttgataagaaaagtgccctcccaccagcaaagacagcggcacattcatattttggaggaaaacgtcaaaaaacgggacgaaatcatcggaagactggccgaccaaataaaaaacatcaaaggcgcagtggtggaagggacatttcaggccgagaaaaagctgaagtcggtcaaacagtcggagatgaaccgcgtcttctccgaggaagtgattcgctttgcgcaccaaatcagcaaaaaccattcggtggccagttcagtctattggcagcagggcgacccgtcgcggccgtacccaacggaggcaaatttcgccgtgagcaatttgctgttgagcagaacacaaccgaatgttcccctgtcatttgccgcccaagcgactcccggcggaatgctcaaatcggtcttcaatgttcccggaatgccgcaaaaagcgttttcgccaagtcctcgctcggcaatgtttgtctccaatttgggcgctt

SEQ ID NO: 49648 - DNA, 541 bp, Heterodera glycines
ctagtctcgagttttttttttttttttttttttttttttttttaacggaaaacaatttataaaaacagaaaatttaaaaaaatggaaattttcctaatgctttttaagctgtcgtcctcttctgttccgcttttttctttgccgccactttctttgccttcttctcttcttcttcgcgaattttttcctcttgcacctcaatgtcgatcagatcggtctccaaattgactgtgctttggccactctttttcgcctgttcaatttggtcctttagcacacgttttttggccacaaagtacaccaaacgcatgtcgtaatcccacagttcgtccacttcgtttggctccctgaaccatgcgacataaatcaacagaagagaaatgcttgcgaagattgaaacgcctcggatggcttcgaatcgtttactgtcgtaataactggcaatgtaaaatgggttggaaaatgcgtcctcgtcgctttcgccgcccgtcgtccgtccgccgctgccgcgcccgtgaaaagcgctcgtctcactgaaacg

SEQ ID NO: 49649 - DNA, 295 bp, Heterodera glycines
  unsure (1)..(295): unsure at all n locations
gggagaccgacaaagggggggccggaagacgcacagacggaaaggggccgaagagaaagaaanngagaaggggcccaagganaggcggacnaaggaacgcgaaagccacaaagcgggcganaagggggaaaaggagatgaaaccgcgacaancggacgggcaaagggaaggcgaaggggggaaacaagggagagaagagatttttttttttaaagcgacgaatgggccacgatatgtggtcgtatgtggtcggagcattgagaaggagaaactgaaggagggcacaggtgtgggg

SEQ ID NO: 49650 - DNA, 481 bp, Heterodera glycines
gtccaattaagccctgccattccaatgagtgccgtcgaaatcaatcagagggtcgtcctcaatgggtccaaaggcgtcgtccgatatttggggcccgtcgaaggcaccgccgggcaatgggtgggcgtcgattgggacgacccgacgaggggaaaacacgacgggaaaacgcgggacggacgccgctatttcaccgcgaccgccgcttcttcggcctctttcgtccgcgagcagtgcctgcacaccggcgacgaattgttcagcgcaatctgtgccaaatatgcgacggaaggcgacgacgacgacaaatgccaaaacgaaacaattgaagcgggcgacaaaaagcgctggcagttggtgaacatggacaaagtgcggcgtgcgcagcgcgacgtgttccgactgcggtgcattgtgctgagttggtccctcgtgtcccatttggatgtgtccaaattgggcgaccgcaccttcgccaatt

SEQ ID NO: 49651 - DNA, 652 bp, Heterodera glycines
ttaccaaaaaagagggtttgaggtatatcaatagaattattttccaaaacattttcattgtccctcatttattcttgtgtccgtttcactttctcaatttggtatggaggctgttgctgaacacgattttaacgctggtgagcctgacgagctgagctttaagagaggtcaaattttgaaggttctcaacaaagacgaggacccgcattggtacaaagcggaaattaacggagttgagggattaatcccttcaaattatattttaatgatggaacactcttggtatctcggcagcatttcgagaagtgactcggagctccttctcttgaaaaatggcaacccagacggggcctttcttgttcggaggtcagagtcgacgcccggcgaattctcaatttccgttagatttgaaaatgctgtgcaacattttaaagtactaagggacaccaaagttggccaatattacctgtgggcaaaacggtttaacagtctgaatgaactcattaactatcacagggccaatagcatatcgaaaacgcacaacatcctcctccggtccatggactccggcttttccaataaacatggccttgttcaggccctcttccatttcacccctcaagaaccgggcgaactccggttttcacgtggg

SEQ ID NO: 49652 - DNA, 435 bp, Heterodera glycines
gaacattgcttgcggtcttgtcggaggaccgggccttgtctctggaatgaatattggagaagaatatgccgtgtttgaaacaggcacacgaaacacgggaacctcattggctggcaaagacattgccaacccaactgccttcatcagagcttccatcgacatgctgcgttaccttgagctccacgattatgctgacaaactttctgatgccctttacaaagcattgacggagcagagaacgcatactcccgacattggaggcacgaatcatagtacagaagttgttcaagcagtcattaacaactacagcgagacaatcagtaacgcttgaaggaaacttctgatagtacgatatcaatcgagttttagtcttgtaaatgtttcattaaactgtcaaataaagagcaaaagtagaaaaaaaaaaaaaaaaaaaaa

SEQ ID NO: 49653 - DNA, 642 bp, Heterodera glycines
aaaagttaaaagccgaccaacaaaagaatgccgtgaaggaaatgcgccgtattttcggcgttctcaaaaggtccgtgtaattatgcttgcgcgtcgtccgcttctgtgctgtgcattcatccgcccttttttcccctccgccatttgcttcttcctcaatgtcgtcccaccatttgtccggaagttcccttttgttaatgcgtgccgcatttcgcaaaatttggtcagcttcgacgtaacgcttttgagagacgagccaacggggactttcaggcacaacccttaaaagaaaaggaagatttggggaataaacaatgcttaatagagatggattaaaagacgcaccaccaataaaagaggaaaatggtggcaaaagcagcaattgaagcatgaaggtattgataattccgaataaaaaaagccaaaaggccgagtaaaacttggccaacagcaaagaaaacgccggtgaacagcgaagcgattttccttttgcttgggccaaccaattccattcctttgataaccgtaaattggggttaaaagaaacgaaaaaaaaaattaacaaccgatgatgactgcgatgacaaaaatacctaaatacattaattattttcgacatattaatttaaaataatggtaaat

SEQ ID NO: 49654 - DNA, 326 bp, Heterodera glycines
  unsure (1)..(326): unsure at all n locations
atggagttcgggaattcatccagaaagattatgtggacctgaagcagaacaatcgggatttccccattcttgtaagagaatgctccggaattacgccacgaatttgggcaagatatgagcatggagttgagacaagcgtttcggttgagaatcagccgcgtcagaagataatggaagtgatcaaagaaatggcaacgaaaaaaattgattgatttgaatttgtttttggctgccgtttgtaaattctttgataggataaataattgtctcccattttatttatttaattaaaaatgtttccgtanaaaaaaaaaaaaaaaaaaaaa

SEQ ID NO: 49655 - DNA, 591 bp, Heterodera glycines
cctcgtgccgaattcggcacgaggacaaaggagatgatgcagtaaacgatactgatttggaattggaattctctaataaacttgatgatttggaaaatgataataaagccgaggggatcatcggacacgaaaaaaatacagcagaaagcagaggtttggaaaatgcacctcattcgcaacaacaaattaatgggtttctgcaaatctcacaagaacagcgattatttcattacatttttagagaattcgaagctgttgctaaaaatccaatcgaaggaatatatgtcactccaggcgcagaatcattgttaggtgaaccctttaatcaacaacaaaaaaatattaaaagtattttttttaattacctatcataaggtttgttgtcggattgtttctgagcaaattaaaaattcagtatggtttggcttgctgattgatcgtactggtattttctatggtggcatcttccgcttcattttaacggtgcctgacaattttcccaattccgaatctcttccggtcgtccagtttgaagaacctcttttccatccacttgtaaattcaaagacaaattgtgttgacctaagtcgg

SEQ ID NO: 49656 - DNA, 427 bp, Heterodera glycines
gaagctgaaccctttcgtctcctcctcagcgcgcaaatcgcgcaaacgctatttcaacgcgccctcgtacatccatcacctcattatgtccgcgccgctgtcgaaggatttgcgcagtaaacacagagtgtgttctacgcccattcccattgatgacgaggtgactgttgcccgaagccactactgaggcaatgccgggagtataatgcgtgtgtatcagaagaaatatgtactgcacgatgacaatacatgcactcaggacaaggccaacggaacaactgtccacggtggaattcatccttcaaatgtgcagatcacacagttgaagatggacaaggaccgacgttcattgctcgaaaggaaagcggtcggcacagcgcgagtgacgggcattttgaagggaaagcacacggaagataccattgaa

SEQ ID NO: 49657 - DNA, 511 bp, Heterodera glycines
gaagctgattgaatccagcgaacgcggcgacttcccagactgtgacactttctcgctcaacaaacgtgttgtgactgtgaagggaccacgcggtacgctctagcgcgactttctgcacttaaacattgaaattatgcgagaaaacccgaagctgctccgtgtgctgaaatggtttggcatccgcaaatatttggcagccattcgcacagtgtgctcacacattgaaaacctgatcaaacgtgtgactgtaggatttctgcacaaaatgcgctcagactacgcgcattttccgattaacatcacgcttcaggagaacaacaccgtcgaccagattctaaaattcttgggcgagaaatttgtgcgccatgtctgactaccacaacgagtaaacgctgtaatgtctaccaaacagaaggacgacttgatcattgacggtaccaacatccaagaagtgtcccacgacgctgctcgcatccaacagtcgacgaccgtcaaaaacaatgacattcgc

SEQ ID NO: 49658 - DNA, 385 bp, Heterodera glycines
cgtacgaattctgaaaaaacctcggcaggagcagcgttggaatgacaagcgtttcaaatgacctgtcttgctaactcgatggaaagacgatcctttctgtggaggatgtatggacaaaggaattggtctcgagaaaattggcgtcgaaccacaacagcctcattctgcgattcgaaaatgtgttcgcgtgtaacttatcgaaaataccaacaagatcactgcttttggtccaaactagggttgcttgaattttattgatgaacaccaccaagtgcttgtgtctgggttaggacaaagtggacatgcggctggacagattcctggagatcgtttcagggtactcaagggtgccaagacgatcgttgttcgcacttattgcgggaaa

SEQ ID NO: 49659 - DNA, 340 bp, Heterodera glycines
cttattgggggcgaccgccacaattgcgagggcactgcttctgcacaatgatgaaataaaaaagtacaagtggcagtgcgggagagctcggctcccttcgctttcgcggatagtgaaccttccgatggaaaggattttctggcaaatcactttccttttccacattccgctgagagcactcaaaattgcagtgggatttttccgttatggccgtttaccgagtgtccactggaaatggccgcgtctctattcgctgtgcccacacttttacctttggctcggctctttggaattgatttttctggacgctctgtccgaggtccgcgagcgtgagttcatc

SEQ ID NO: 49660 - DNA, 292 bp, Heterodera glycines
cgatgtcgcacccatctagctcgtcaacctgatggtccacgtgctaaatgcttccattcacgtcacctgtgaccaacgctacaaaggcttcaatcgacattcctcgtccgtgctccacaacgaacaggtctttctgccgactgggcgagttaacctgcccttcgtggtcccttactctcctactcatgcgctgaacttcgccttcatggacacttatacaccagacttcaccccatgactggacatggacaagactgtcttgaagctcttctccatgaatttggcttctggg

SEQ ID NO: 49661 - DNA, 133 bp, Heterodera glycines
ctacaagaaaaagcctggctccgcgaagaactttggcatttggctccgctactattctcgtactggacaccacaacatgtaccggaagcatcgaaatgtttgtgaagagggagctgaaacgcagtgctatcac

SEQ ID NO: 49662 - DNA, 639 bp, Heterodera glycines
aacaacccggtcaaattcggcctttacatcggcccaagcaaaaccgaggccatttgcatttcctcaaaaagttcggacagcggaaatggaccttctcttggcaccagccccacaatgtcattctcgccggtgcttacaattagcgaagagaatttggcctccgaattcgcaaaaggcaacgtaacaattgcggacagacgcccttcgaatgcaatggacttcgaactgtttgaggagaaggcaaaagagaagcggtcgttgcgtctctcccgtgaccaattggacctgttgaacttgaactacgggtcgaacgacgcgcggttcagcatcacaacaaaatatcagggaactgcttggtgttcttgtcacatttatttgctcaaatggtatgacaaattggtcatctcggatatcgacggcacaatcacaaagagcgacgtgcttggccatgtcattccagcaattggtggcacttgggcccattccggggttgcagagctgtatactggcatcaaaaagaacggatatcaaatggtttatttgtcttcgcgtgccattggacagtcccactacacgaaaacgtacctgcagaacttcgcccaggggtccaggactttgcccgacggacccgtccttctc

SEQ ID NO: 49663 - DNA, 607 bp, Heterodera glycines
ggcgggcttctcggaacttgctgaaactatgacaaaagcttttggcgcctggccactgatcggtgcaagctgcgctacctctcagaatgctaaaagcggcgatgaattgtaattcggctcaatgatcttctaacggttgtgcagcattcgggaaattccctcttgcggtgtcactcccaccgccattggcccacaggatctaggcaaatgttcgattcaggacgaccctgcctaatacaatgggatcatcgctggattcaaattcactctccgagatgatggcgtccacggcttggacaaaggctgggcacactccgccgttggatatacgatgcatggccttggcaaattccgagtgtacaacatgttctagaatgtgtacgccgggatgatcggcgaggaattggcttacagctgccgtacctatttgtactttggcggctgggacagagcggagttcttcaccaacatgatgctggtgccgatggaggccaccaaagtgcgcatccaaacatcgcccggagctccgccaactctccacgggtgtgcgccgttcatttaccggaccgagggagtgatgggcctctacaatggactgccgccgatg

SEQ ID NO: 49664 - DNA, 626 bp, Heterodera glycines
gaccaggacagtctttttttctgtcataaaattggtgagcaaatcatctgtgcatgatgcagaccatcaaatgcgttgtggtgggcgacggcgcggtgggaaagacttgtctgctcatttcctacacaaccaacaaatttcccaacgaatatgtgccgacagtgttcgacaattatgcggtgactgtgatgatcggtggtgagccttacactttgggactgttcgacacggcgggacaggaggactatgacagactgagaccgctctcctacccacagacggatgtgttcctcgtttgtttttcagttgtcacgccggcatcatttgagaacataaaagaaaagtgggtacccgaaataacgcaccattgttcgaagacaccgtttcttttggttgggacacaagtggacttgcgcgaagacgccggcacctgcgagaagctggcgaagaacaaaatgaggccaatttcggcggagacaggcgaaaagttggccaaggagctgaaggcggtcaagtacgtggagtgttccgcactcactcagaagggcttgaaaaatgtgttcgatgaagccattctcgcagcgttggaaccgcctcagcttgaacgaaagcggaagtgttcaatt

SEQ ID NO: 49665 - DNA, 593 bp, Heterodera glycines
ctttcttcaataataatttaatggacaatcccggcccatcaaatgggattgacttaatcgaacttggagacagtgacgatgaaagaatggaaaagtttgcatttggtggcaacgacacactttccctgatttcattaaagacggactttgaaaggccaccgaaggaagaagccatgttaaatttagtcgacgcttcctttgagctcatcgaccctaacccgaatgtccacgaacttttcgttacttttgaccaccaatttttctcgggaactttgaattcgaatgcgtgtgtcgtcgaatggagcaaaacgatgacatcttgcgctggcatttgtcggttcagtgtcgggaatcgcctttgttcaattcggctcagtgaacctttgctcaaacttaggccgagacgcgatttagtagaaactcttttgcacgaaatgatccacgcctaccaattcgttacggatggcattcaagacagagacggccatggccccgacttccgtttgcatatgcatcgcatcaacaaattggcgggcacttcgatttccgtttaccattcattccatgccgaagttgcccactacaaaaggcac

SEQ ID NO: 49666 - DNA, 642 bp, Heterodera glycines
ctcatttacaattaccccgaacaattgttcgctgatcggaaagtgatggccatcgaacacgccgactttgagggcatcgaacgattggcacttgtattaggtggcgaaattgcttcaacatttgacagtccatcggaggtgaaattgggtagctgcaaactcattgaagaagtcaccgttggcgaagacactttgctccgcttttccggtgtcccgcttggcaatgcatgttccgttgtgcttcgtgggtccacccagcaaatcattgatgaagcagaacgttcgttgcacgacgcgctttgtgtgctgagtacgcatgtgaaagaccaacgcgtggtgcccggggcgggcgcatcggaaatgctcatggcaatggcagtgatgggcgaaagtcaaaaggtggccgggaaggagtccatcgcaatggaagcattcgcacgggcactcgccaaattgcccacaatcatttgcgacaacgccggactggacagtgccgaaatcatttcgcatgtgcgagccgaacacagcaaagggaatcgccaatttggcattgatgttgaaaatggtcgtatggcggatgtttacgagttgggcgtgttggagtcgtacaacgttaaattgggcgtgctttgcagtggcgcc

SEQ ID NO: 49667 - DNA, 304 bp, Heterodera glycines
ctcttccaagattaacgcattgatattgaggaccccatctgcgcaggtgggacaacgttgcatggtgtcggtggttggcgatcaaacgatgacccatgcaccaacctacttggcgcgtggtgacaacaattaccgggatatcaaacttttggattccatccaacgcgatggcatttcggacccagtgctcggccaacccacgggtgtttgtgctgagaaaacggttgctgaatttggcttcccgcgttagcagcaggacgctgatgcactcgcctccctagctagtgcgaatccctcgtggcca

SEQ ID NO: 49668 - DNA, 566 bp, Heterodera glycines
aaataaatgcgatgcttttccgctattttcccctgctaaacgaatatagcgcccataagcttttcctcactcttttcccctccaccggcagcgaaatggtgcgtggaaatccgcacttgccaataatcgtcgggaaagagcattgctccaacggaaccaaatggattctcaatgtgttcggcgattgtgtcgacactccgatgaaaatgtgcggcttttgggtcggattgatgtccttgttcttgtggctgatccctctgtttcctcaactgtacgaaaactttcggaacaaacgctgtgaaggcctttccatcttctttctgatgttttggtttatcggtgacagttgcaacatgatcggtgctgttctcacccatcaacagcctctgcaacagatcatcggcgtgtattacattttgcaagacttggctttgcttggtcagttcatctactacactcggctgtactcggcaacacgacgacgcgaaatgctcaacggaccgtcagtgattgtgccagtgtttctgttcggttttgttggccttttcacgcttttctccagttcg

SEQ ID NO: 49669 - DNA, 235 bp, Heterodera glycines
gcactttgataagcaggttcccgtgcagcaagtgtttgagcaagacgatatgatcgactgtctccgtgtcgccaaacgaaacggtttccagggagtgacccctctatggcactgtaacaagttgcctcgcaatactcacgagggtctccgcaaggtggcttgtatcggtgcatggcatccgtcgcgtgtctcattcacagttgcgcgtgccggtcataagggctaccaccatcag

SEQ ID NO: 49670 - DNA, 492 bp, Heterodera glycines
agctggccatgctcaggaaatcggcgcacaaagccaaaactgtcaccaacggaaatgccaatgacccgtttcgcttccagggctcaggcgtggattttaaggccaaattcatcggcgaacgcgacgtggccgaggcgcgcggggacgtactctgtgcggaagcgatgcgtctggccaaaatgagcgtcaaggcaagcgggtcgcacaagccacgcgtggtgctcaacatttcgttggacgggctgatgctgctcgacgaaaagtcgggggctgtgctctacaattttccggtcgccaaaatctcgttcattgcccgcgacacgacggatgcgcgcgcctttggcttcattttcggcacggcggacggcaaacacaaattttacggggtgaaaacggcacagacggcggaccacgcggtgctctccattcgggacatgttccaagttgtgttcgagatgaagaagaagcagttggaggaggagaagaagaagc

SEQ ID NO: 49671 - DNA, 563 bp, Heterodera glycines
gtccaattaaggtgaaaatgtcctcaaacagtgccactaccacgacgagcacggacaatgggatttccctcgttgaggccgacgaacgcggcgccgaagggggcgaaggcgacgatcagctgaccatcaactcgttgagttcgtcgttgagcagcagcacggcgacgacggacacggagggcgaaagcggggcgggcgacggaggacgaaaaaggaaaaagagacggggcgacgggtcgtctagccgcgggagcagtgcgaaggaaatcgaacagtttgacgaggacgaagcggcggaggacgcccttttggacgacgaagcgccgccctacgcggcgaaaacgcgcgaccgcgccattggccgactgatcgtcttcagctgcattctgttcaccgtgcctctgactctgatgtacatcacatatcgctttttcttcatcgggcattaccatttggcacacgaccgtgccgttctctacgcggggattgtcgccgctgcgactggttatttgcttttggcactggtcgcttggattgcctatcgatcaagggacgagactgaa

SEQ ID NO: 49672 - DNA, 611 bp, Heterodera glycines
cacaattaccgaaatatttacgtcgagtaatgaacaggcttagaagggatcaaaaagaaaaggttcaacagtttgtgtccttcacgcaggccaacgaacagacggcaattacatgcttgaccgcctccaactggaacttggagatggccggtgacatgttctatcaaaatccgtcttacaccaaccagcaagtgggaggcggcaccggtggtggcgcggacagtcgaaaaattgaccatttgttcaacaaatatgccagcgatgcaaaggacaaagcgcagaaaatcggacccgatcggatcggtcccaatggcatggtgcgtttcttgcgcgacttgaacatcgagccaacgagtcgggcagtgatggttttggcgtggaaaatgggtgctcaaaaacagtgcgaattcactgtacaggagttccgcgacggaatttccacactgattcccaccggcacggtcgacataaatggtctgcgcaacgcgttgctcaaggcggagaaggacactgttgctgaacgaaaagccttccgcgagctctaccagttcatattcaagtatgtgaagtctgccggccagtccagtctcgagttggacactgccgtggcg

SEQ ID NO: 49673 - DNA, 651 bp, Heterodera glycines
aaatgcttcttaaattttttaattaattttacgcagaaaccacaaaactgcaccattgcccggaaatccaatatttattcaaaaaaataatcgttttcaatttgattttaccaattttcaatgggtagagcacgtagaaaaaaggggaaaactgccagaagagctcggcaaggattgcttggatttacacgaattgcaagagaaggaaagaagccaaaacaatttgagaagagagtcaatcaaagactggacagaaaagacgatgttcgaacggaggaaattttgcgtgaaaatattgccggacaaaagacccaagaggagccgagaacgccgcatgcatttgtaattcactcggcaggagtgggacgatatgtgcgacagttggagatggacttacggcgggtgatgagtccgaacacttcgaaggcattgcgggtgctgaaacgcaacaaactgaaagactttgtcgtgcattcgcaatttttgggcgtctctcatctgatcatcctctcgagaacagaactttccacgcatttgcgcattattcgaaacccgcaaggcccaacattgcacttcagagttgaaaaatattcgttgggacgcgacgtgctctccgtgcagaagagaccggtcatctacgaagaactgttc

SEQ ID NO: 49674 - DNA, 479 bp, Heterodera glycines
  unsure (1)..(479): unsure at all n locations
gtttgaggttgctgaggcaagatctctggattccgtttgcgtttctctaaaaaatcttgcacaaaatgcggaagatgaaagcgagacagcggccgaacttttttacaaaggggctatggaaatagatgatttcataaagaaattcacggaaaaacgcgttattggccatacgagaaggctaaaggccgaaaagcttgccgaattgcttcgccaacaatgccaataccaaccgcagcacccgtctccttctgcacttggaatgaccactcaaactcagtattcgtctcaaggggtggcagcctcaatgtatcctgtccttggccaggcttatacgagcccagccaattttcggcattcttatatgagttaggagaacggttcaaccggagattacttggacacgcacttattattttctatcaattttttgccccgacaaataaacgttttataatgtccaaaaaaanaaaaaaaaaaaa

SEQ ID NO: 49675 - DNA, 139 bp, Heterodera glycines
gaatgagatgcaccaggaggccattgagggcgctacccacgctttggagaaggataacgtagataaggacctcgctgcgttcttcctaaatgagtttgacaagaagttcaaccggacatggcattgcatcaccggacga

SEQ ID NO: 49676 - DNA, 424 bp, Heterodera glycines
gggccttccggatcgacctttcaacggatgcgatcggattgggcgcattgtctattggtcgggcgacaagcgctttttcttaaaaggctagacgcgagatcggtacaatgagcgggtgtatggctcctccgcgactgcgggcgctcaattcgattacatccactacaacgaggaatcgaacttccaattggtcgactcgagtcgaccacaaaagccgcagaggcctttccgtcgtcagattccatttcgtcaattggctcaccgtgagcaggaacgccgagaatatgagaagtacaatgtttccacgaagatgaagcggactatactcaatgagcaacaaaatgcgtactaagtgtttttgcgttggggcggcggaactcgcggcaaagagcaccgaccgacagggcggtgcttcaatgaccga

SEQ ID NO: 49677 - DNA, 354 bp, Heterodera glycines
gtttgagtgttcttttcacgtgaaatttgactaacaaattgactcttccagtctcttcatttattcatcaacattcgcaattcgtttgtttcttcactaatgagtggtgaattgcggcttgattcgagtcttgatctgatgcggcgtttgccaccgcaaaactgtgagaagcatttgaccgatttggtcgctcttgcgcccgacctttgcgagtctttgcttactgccgttgaccaaccgcttatatgtgcttaggacgaaacaacggggagggaatatttgctctgtgactaccacccacatggcgagagttacagggcgccggggaccagcgcttacaaccccccgcttgag

SEQ ID NO: 49678 - DNA, 480 bp, Heterodera glycines
ctcagaatgtcaacccatcgtttgctcccgtccctcccgcgtttaaaagtgccaatcggacatcggccgcaacggcttaaacttccgtacattcccaacccgcgtgggcacttggaattggtgcgcaagttggtgaacagagtgatcagagaagaacggtgcgaattgaagtacaatcgagcggaagagtgccgtcagtacgtggagaggctcatccaactcggcatttaccgtggcccgaactgtgcctacaccgcggaaatgtttcagtggtggttcattgagcaggatttggtcgacaaaatgtggtctattttggtgccccgtttttcgcattatccaatcgatcagtcgtacaccgaaatctatcgattgccgaccattcgactcaagtcgaaagtcaacaaagagacagagttctggaaccgttactcaattgccgttctcgaactgaaagagaacccttttccgccaatggat

SEQ ID NO: 49679 - DNA, 316 bp, Heterodera glycines
  unsure (1)..(316): unsure at all n locations
caaactgatcaagccaaccgaggacggaatacaagatgaaatccgcgggaaaaaacctcccaaagaagatgaaaatgcacttaaaatcaaggaagccccgaagatttcggcagcgatgtttctcaaatacaacacacaactcgggccccccttccacgtcattatcgacactttttttgttaatttttctataagaaaccgaatcgacattatgacggggttcatggactggctggaggctaaagtggtggcgnatatttcggactgtgtgctggggcgattggagaaaatgggacgacgggtggaggtggcggtg

SEQ ID NO: 49680 - DNA, 400 bp, Heterodera glycines
caacagcatgaagtcgagctaagctctcggatcagagcttctcgtacatttggacaacacacatgagactgtttgagccatcaaatatatgacagttgaagcgagccatccgctgctctggagagtgcaacgcgacaagaaggacattgtgccgttccgccagttcaccagcggaacgcgacgcagattgcaggggccagcgtggggtcccacacagggactttggacgataaagtcccccgagatccttctccaacttctcccaaatgagtagattaatggccaggtgaacggcgaggacttcgaccatttggtcattgaccacatccacatgcaatctgtcgcgaacatgcatctgatcattcaccacgcgcacgggttcatcaatccgtacaagaat

SEQ ID NO: 49681 - DNA, 577 bp, Heterodera glycines
gtcctccagctccaaatgtttctttggtatgacggcgccaaatttcatggtggacgccgttgtgaacggcaacttcacaactatttcgctggaacagttcaaatggcaatatgtggtgctgttcttctacccactcgatttcactttcgtttgcccgaccaaaataattgccttttcctacaaggcgggaaagttcaaaaagatcggtgtcccactcctcgggtgttctaccgactctaaattatgccatcttgaatggatccccacgccgcgaaagcagggaggacttggtgagatgaacatcccggtgctggcggacacccgccacaaaatcagccgtgactacagcgtgctgatggaggaggcgggcattgcttatcgcggattgttcatcatcgatgacaaaggcgttcttcgtcagatcaccgtcaacgatttgcctgttggtcgctcggttgacgagactcttcgtctcctgcaagcgttccgatacacggacaagcatggcgaggcgtgcccagtcaactgacagcccggcaccgacaccattaaaccggacccgtagggctcgcaggct

SEQ ID NO: 49682 - DNA, 647 bp, Heterodera glycines
gtctgttggagaaggcgtacatgaaagtgatgggcggctacgactttcccggctccaattcgagcattgacctgaacgcgttgaccggttggatcccggaacggattccgatcagaccgaaggagagcagttttgaggccgacaaaacattcgagcgacttttctcccatttccaccaagggcattgtctgatcactttagccaccggtaaaattgacgaagctgaacaggagcggacggggctggtggatgcgcatgcttatgccgttttggaccttcgcaaagtcgatggcaagcgggtgtttctgctcaagaatccgtggacacatctgcgctggaaaggccgcttctcggagaaggacgtcgtctcgtggtcgcccgaactgtgtgccaagttggactacaacccgaaggatgcgcagcagttcgacgacggcatcttctggatcgattacgcgtccatctgcgctttcttcgacgtgttctacgtgaattggagtcccgctctgtttcccttccgctacgccctccattcttcgtgggatgcgggcaaagggccggtcaaagacctttacacggtgggcgacaatccgcaatatgtcctcgaggtgaacaaccgggacggcgtggcatccgtggggattttg

SEQ ID NO: 49683 - DNA, 409 bp, Heterodera glycines
atcgctgatggtcagctaagacttctcctaaacgctcgcccgagccaaatccaatgatctcatcatggacttgctccaagggacccttacaccggagccgaaagtgctcgaggatgccaacctgaagaaggacgacatccacgaagccgtgttggtcggatggtcctctcgcgtacccccattgcatgatctgcgcgacgacttcttcaatgagaaggaaccggcccgctgcatcactcccgacgacactgcctcctatggtgcagccgttctagcaggagtcgtttctggggaggagagctcgcaaattgttctggtggatgtcatccctctttcaatgggcattgaaactgtcggtggagtgatgactcaactgatcactcaccacactgtcattccgaccaataag

SEQ ID NO: 49684 - DNA, 423 bp, Heterodera glycines
caacgctatccatcaatgcgcgagttgcgaagggcaattgacgaacaaaggctgttccaaattttcggctccggcaccgcctgtgccgtgtctccggtcggtcgtatactgtaccgtgagccgggcacgggccaaatggaggagctgttgattccgacaatcacttctagcgcccatgtgatgcaaaggctttacaaaacgatcactgacatacagtatgggagagttatcagaagtgattggacgcggacagtggcataatggcataatgcctatcattatttaaaatttctttaattattttagaatcattgtggttgcaaattatatgtaaaaaaatcacaaatatatgtaagaaatatgtacaaaaactcaataaaaatattttaatgtgaaaaaaaaaaaaaaaaaaaaaaaaaaaaa

SEQ ID NO: 49685 - DNA, 441 bp, Heterodera glycines
  unsure (1)..(441): unsure at all n locations
gtaaggtccacggccagcgcattgccctctctgacaacgctgttgttgagaagtcgctcggcaaggccggccttatctgcgtcgaggatttgattcacgagatctacactgtcggccccaacttcaagaaggccaacaacttcctctggcccttcaagctctcgtcgcccaacggtgccttcaacaagcgcaagttcaagcacttcattgagggtggtgactttggtaaccgcgaggagttcatcaacgagctcgtccgcaagatgaactaaggttcttgccctcgcttgctgttctccgcttgtcgagttgccccgttggtgtttgtcgtcgtttgtttgtttttgggcccgccgccacggctagctttggttgttccgagctgagcaaatgatgaatacatccccgtgcttctcctgaaaanaaaaaaaaaaaaaaaaa

SEQ ID NO: 49686 - DNA, 532 bp, Heterodera glycines
gaccctccaaacgcgtccctacgaactgttcaaactcgattccggtccttcgactgaggtgcgactgacgctggatgacgcgttggattattacaaaaaaatgctgttggtccgactgatggacacatccgccaacaatttgtactacgaaaagcgcatccgcggcttctgtcacctttactcccgacaaaacgcatgaggcgttgggatggtggcagcgactgatgctaatgatgacgtgatcacggcttaccgatgtcacggatggacttatttgatgggtgcgaccgccccgtacattttggacgaactgacaggacgcattgctgggaatgtttaccgaacaagcggatccatgcatatgtacgcctagaacttcttctgtggacaaggaatcatctgcgaacaactgcctattgtggcgggaattggttttgccttgaaatatcgccgccagaggaacatctgtttgacactttacggagatggggcagataatcatcgaccgctgttcacagccacaaacatgacc

SEQ ID NO: 49687 - DNA, 578 bp, Heterodera glycines
ccaactcctattacaacaaaattattgactggaaaacacgcattgacgaaagcgagaatattttcgtccgaactgttcgtggtaccttcgaacgtgtccaactcgcatttgaatccaaagacaatgtgtcggaagtgctaacgcaaatatccaaaatcgaccccgaattcgacaagtcggaatggctccgtttttgcgaaaaagaaatgatcccgaacattcttgaatcaacttaccaaatgaacttcgaagtccttcgtgattggtgttacgagaaagcgttcaatttaatcgcaaattctatcaaagaatacgaaaagattggcttcaacacgagggattctcgcattatcgatgttagcaaagtggagttggtcacggggaatatgaccgaccaagggccgactttggtcatccaattccaagtattcatgacaaatgtggtgaagaacagcgaggggaaaattgtccaaggtgaccctgaaaaagcggttcgagtgagacacatttgggtaatatgccgagacatggaggagttcaacccggcaacagcttggaaactgcttgagctgcacatg

SEQ ID NO: 49688 - DNA, 148 bp, Heterodera glycines
aggcgcttctggggcgaaattccgggtttctcttgctcttcctgttggcgcaagaattaattgtgccgataacactggagcaaacaatctgtccgctattgctgtttatgtcatacgcggccgattgactcggatgcccaccgccgcc

SEQ ID NO: 49689 - DNA, 181 bp, Heterodera glycines
aggtggagcccgaccatcgaacaaacgactccagcaaacgcaggcacaagtggatgaagtcgtcggcataatgaaggtgaacgttgagaaagtgatggagcgtgaccagaagctgtcccaattggacgatcacgctgatgctcttcaatattgtgcgacccaataccagaaatctgccgca

SEQ ID NO: 49690 - DNA, 486 bp, Heterodera glycines
agcgcctaaaaagcactcattcagtgccaatgccaactcagtccactgtcattccaaagtttggcatttggtcagcatcaccaccttctacaacagaatcgggccgttcttcttcccttccaaccagtcttttgtctgtgaacaatgacagttttggggaagtgccattgtcgaatcggtgcttttgtaattacggcccgtcggtgtgcgacatggaggacacttgcataaaacacacttcggctgtctgttttcacgcgattgtgctggagtttaattctggcacgggtgccatcgaacgccgtcacttttttggttgtgctccactcgaaaaaggctcagacgcatcgcatcttacgtgcaacgcgtggcgttcctcccactcaaacggccgaaccgtcgcgtgctgttacgagggcaatttttgcaatcagaatttgactttgcccgactctccggctctccaagtgagcaccggtctcaaat

SEQ ID NO: 49691 - DNA, 349 bp, Heterodera glycines
cccgaacggataccgccgcggcagtcgttacgtgttcgcccgcccgttccacgagcacggcgttgagccgctttcaacattctaccgcgcgtacaagcggggtgacattgtcgccgtccagggtaacagcgccttccagaagggcatgtcgttcaaggcgcacctcggtgacacagggcgggtgctcaatgtgaccaaacatgcgactgggcgtctttttcaacgagagtgttcgccatcgcatgacccgaagcgcgtgtatggccgcggacgccaggagaaaccgaccggctcccatctcgagttcctgcggcgatgcgaaacgaataagtggcagaagaaacgcaag

SEQ ID NO: 49692 - DNA, 554 bp, Heterodera glycines
aagagatggaatcgtatgtgcaagttgaagatcaatattcgagggactccggcatttcgttggctcaatccaccacctcgcagcaaagctgttttgccaaaatttattttccaactttgtatcgacttcggggtcaaggcagtattcgcttgacaccgattaaacgggcccaagttccgcacaaaggcttccgcaggattaacgccgatacgatggccaaccttttggggtcactaacagaagaactgtttcaacggcggttcattctgatcgattgtcgctatccttacgaatacgatgcgggccacatttggtactcactgaatttgtgggagaccacttccattgagaagctcttctacccagaagaggaagaacggttcggcgaaattattgtgcgaactcccatcttctactgcgagtactcgcagaaaaggggacccaaaatggctcttgcactgcaagaatttgaccgggtccggaacgagtcgcgttacccctacgtggactaccacgacatttaccttatggaccgggggtaccgatacttcttc

SEQ ID NO: 49693 - DNA, 259 bp, Heterodera glycines
ctgtcactacgaggtgatcgacttctgattccagacacagcgccccggcgcacgcacttccaacatggataagactgtcttcattcatctttgcccggaaggtgcatcaatcaaaaagaaaatgctttatgcttcatctgcgtcggccatcaaggcgtctctcggaaccgctaaaattctgcaatttcacgcgtctgatcagtccgacattgcccacaagaaatcgctcacgaagctgaacgacaaataccgcgacaat

SEQ ID NO: 49694 - DNA, 475 bp, Heterodera glycines
cggagtcattgaggtcatccacagcaaaattgaggacattgagcaattgccaggcggaattgaacatgtcgacgtcattgtttccgagtggatgggctactgcttgttctacgagtccatgctcaacactgtgatctatgccagagacaaatggttggcatccgacggcattctcttcccggacaaagccacgctgtttttgtgtgccattgaagaccgtcagtacaaagatgattatattaactggtgggataacgtgtacggcttcaacatgtcctgcattcgtcagcttgccattactgagccgttggtcgatgtggttgaccgcggccaagtggtaacggacaatgtcgtccttaaggaagtcgacttgtacaccgtccaagtggccgagcttgcctgtgagaccactttttctttgcggggcattccaaacgattatgtagcagcgttgggcgctgtcttcgccggcgaa

SEQ ID NO: 49695 - DNA, 627 bp, Heterodera glycines
gccattcgaccgtgaagtgttctcttcatttctccaaactgttcacaaatgggcgtcaaagttgccatcaccggtggcagtggctttctcgccgctcatctcatcaaacgcctgagggcagacgcaaatgtggacgaaatcagaaccatcgacagaaagccgttcagacagctcggaacaattgatgattgccctccttcctccgtcggttttccctcactcattcatttccaatgcgatttgctggatattgccaaacttgaaaaggcattggatggtgtcgacgtgttattccatttggccagaaaggctttcgaatatattttcttcgctgatcaaaaagcactgaatgatcgctacagcagagacaatttggaagccactcattcgcttctcaacaccattttcaaatgctccgttccgcgattggtccatgtcggagatgcctttgccaacattcccccgggcgacaactttggaagcgctgagcacatccatcgcggattgccctccaaatttttgcttggccattacggagagacgcggataaaggccgaattggccgggcgagaaaaatgcgggaaaatccttccaaacggacagcccttccacgcacttttcctccgt

SEQ ID NO: 49696 - DNA, 346 bp, Heterodera glycines
cgtgacatctgctccgaacactgccgaaaattttagggctctgtgtactgctcaaaatgggatgggcaatagtggcaaacccttgcactacttctcgcgtcgcaacctcctaccgccatcattccaattttcctggttcagggcggcgacttttctcaatgcaatgggatcgcccgagactccctctctggccagatcatttccccacaagattttctaaaagaaacattgcctcccgagactgttgtctatggacgatgacgaccttctccctaaccattcgccgattttcttctccacagggaaaacaaactggcttgaaggcaaactcatatggtttaaccga

SEQ ID NO: 49697 - DNA, 470 bp, Heterodera glycines
gtcaaaaaatggtccactacaaattgtattattttgatctcactgctcgcggtgagccaatccgatatttgctgcactacgctggccaaccctttgaggacattcgcattaaagccgaagattggcaaacagaaaagccaaaatttatctacggacaagtgccagttttggaggtggatggaaaacaattggcacaacaagcagccattatgcaatatttggccgaaaaattcgaattggccggtcttttctcgtgggaaacggctaaagcattggagatcacgtgttatgtgaatgacatcatcactgagttggtaccctatcttggcgcaacgatcggcttccttcccggggacgaggccgcccttcggtcggatgttttcctccggtgcgtgaaaagagcatttcctcttctgatcgctcagcttgatcaatcaaaggccgggttcatgcttccgtccggcttggcc

SEQ ID NO: 49698 - DNA, 489 bp, Heterodera glycines
gtcagaagttgtcttgagattgggccgttgggcggagtgtttcacttggccatggtgctaagggactgtctgttcgagaatcagaaccagcaaaacttcaaagacgcggcggaggcgaagtatttcggcacgattagtcttgacgaggcgacgcgcaaaggctgcgagcagttacgatggttcgtcgtgttctcctccatcacttcgggacgcggaaatgccggacagaccaattacgggtggttcttctcgacaatggagcgaatcatcgaacagcgccgtgcggatggtttccccggcattgccatccaatggggcgccatcggagacgtgggcgtaatccttgagaacatgggcgacaataacactgtggtgggcgggacactgccgcagagaatgccgagctgtttggggtctttggacctgtttctctcgtggaaccatcctattgtttcgagtttactcaagcggacccccagtggaaagaag

SEQ ID NO: 49699 - DNA, 582 bp, Heterodera glycines
  unsure (1)..(582): unsure at all n locations
tttacggcattgctcgtcattgtttgctcaaaacaggaggaagggggcgcaaaggaaaagaagtactgcacaatcattggtattgaccttggcaccacctactcctgtgttggcgtctacaaaaacggcagagtggagataatcgccaatgaccagggaaaccgaataacgccttcctacgtggctttcacaccagactcgggcgagcgtctgatcggagatgctgcaaaataccagttgactctaaacccggaaaacaccattttcgatgccaaacgactcattggacgggaattcaccgacaaaaccgtccaggacgatatgaaactttggccttttaagatctacaacaaggcaaacaagccccatgttcaagtgaaagtcggtaacgaggataagcaatttgcggcggaggaggtttctgctatggttctgacnaagatgaaggaaattgcggagtcttacctcggtcacgaattgaaaaatgccgtccttactgttcccgcttactttaacgatgctcaacgcaccgcaacaaaagaatccgccaccatccctggaccgaaactggcgacgatccta

SEQ ID NO: 49700 - DNA, 656 bp, Heterodera glycines
ggcaaatgacaaatcatttggacagaaaaggcatcgaatacgtcagcaagcgaatgccaaagattggcctcggcacttaccaaattcacggcaatgatatttttgaagtgattgatgccgcgttggaagttgggtaccgattcattgacaccgcacaaatttaccgaaatgaaaaacacattggcgatgcactgacggaactgttgccaaaatatgggcttaaaagggaggacattttcatcaccaccaaactgagtccggccaaccaaggcacagcgaaatgcgccaattcgttggcggaatcgcttaggttgctgaggaccgattatgtggatttggcactaatccattggcccggcacttctcgactgaagagggagaacccgcggaatgcgcagctgagggccgaaagttggaaggcaatggagcaaatgcacggggagggacagctcagagccatcggagtgtccaatttcaacgtgccacatttggaacaactgatcggcggagggtgggccaaagtgatgccggcggtgaaccaatgcgagtgccatccccactgggcacagcctcaactgatcgccttctgcgcacgcaatggcattcactttcaggcttacagtagttttggcggagaatccaaccgcggggaattg

SEQ ID NO: 49701 - DNA, 394 bp, Heterodera glycines
gaaattgaatattgcttatcctgcgactggggcgcaaaaacatcttcggagattgaagatgagaaagaaacttcgcattttcttcgacaagcgaatggagcaggaagttgaagctgactcgatgggggatgaatggaagggctatgtgctccgaatttcgggcggaaacgacaagcgacggtttcctatgaaaccgggagtgatcaccatctcccgtgtgcgccttctcctctccagaggccattgctgctatcgcccacgctagaagggagagcgcaagccaaagtcgggtcccggatgcattggccactcaaatatgtccgggctggcattggtcgttgggaacagaggtgaacaggaggtcgaaggactgaccgacagagttgagccccga

SEQ ID NO: 49702 - DNA, 295 bp, Heterodera glycines
caagatgatcccctggtatcccctgaccaatcataccgtcgggacaaccgagacccactcggagcgagagacttccctaatagcgcgtatccagcgattgcgcgactaatactagaacacggggatgcgtccaatggcggacggagtgttgctggcgcaccagcattcgctgactcacgggatgctgcttcaaatacaaacaactttcttcaaattggctggccgggaactgagccatgccgaaaagtgggtgggacgcacgaaaaggatgctcgaacaagacaccaggagggat

SEQ ID NO: 49703 - DNA, 490 bp, Heterodera glycines
gggcaagggattccccaattttatgaccaacaaagacttccctcccagtgcatgggggaacttacaaatgaaatgccgaagctgtagacaaaagaatgacttgaagagaacaccacaggatgatttgcatgcccattatgataaggaccaagaaattctcaacaataaggcacttcttggtgactaacaagcgaggatgggcctttctttcatggacgatgcgcccgctggcattaacaataatagcgatgaaagatcggaaccgaagtacgaatggctgaggaaatacaatgcaccgcgtgaagaatgggcgaaaggaaatgaactcatccaggaccaacctttccgaattcaggtgcgatacgttcgctgtgtcaaatgtctcgcgtggggtcatttgaacacggaccgcgaatgcccactgtatggtatgagtggaaatgctgactaccatggctatgcaaataatccctccgatatcattcgtgat

SEQ ID NO: 49704 - DNA, 304 bp, Heterodera glycines
tgccacctctttcattgacgcgatgcgttctttccaccattttgaacttcagccgtgccttcaaagtggtcggttgtctttcacctgctaatcgaaaaaagctccgggattcaaaactttttaatcattcctcgaggacattgccttggggactcaactgggagaggttggccggaagctctcctacggagacaaacggctcctcaaagggttcgaacttttctccgccgagccttttccgttttgaaaatgcctttaacgctctttgccccttttggagaattgtccccttttttctttcttt

SEQ ID NO: 49705 - DNA, 466 bp, Heterodera glycines
gtctgaacaatctttggccacctttgcgtttcaagcggagattgcgcagatgatgtccctgatcatcaacaccttctactcgaacaaggaaatcttcctccgtgagctgatctccaactcctctgacgctcttgacaagatccgttaccaggcgctgaccgacccgtctcaaatggagagtgggaaagagctcttcatccaaatcgtgccgattaaatcctttaagacattgaccatcatcgacactggcattggcatgaccacagcggacctcgtcaacaaccttggcaccattgccaaatccgggacaaaagcgttcatggaggctcttcaagctggtgcagatatttccatgattggccagttccgtgttggattatattcggctttccttggggccgaccgcgtcaacgtcacatcatagcaccatgacgacgaccgctatcaatgggacaactcagctggg

SEQ ID NO: 49706 - DNA, 612 bp, Heterodera glycines
gtttgagagatattctcatttaaaatgatcaaaaattttctccaaaggatgctaagcccaatattaaggtcagaaactgtcatcaaattaaatcaaaaaagtgcactcaaacgaattgacgcaatagaaaaagggaaaataaaggcattggctcccaaacacacaacgacagcgaagcttcagcgagacattgacaaggacaacaaaatcaaagaagtgctaaactcaaaagaaaattcgtttattgacagaattaacaaaatcactattaattcttccgatcctccgataacagcaaatagacaaggtatcagaaaggagcaatatggtcagcagaatttcagtgaacacgaatacggattttttgaacttcctttggaaaagatgaagaacaataaagtgatgttcagagaggcgattgagattcttcgtgcacgaatggagctcctctcaaacaaaagtcctcacgaccagtcgtttttcgagcagcaaagtgattatattcaaaatcatccggccgtaaaacgtgttgacaaagacaaattggagcgggtttggcaatacttcagaccatttgccattatcagagatcagatgctgttgtcaaaacgg

SEQ ID NO: 49707 - DNA, 667 bp, Heterodera glycines
gtttgaggtagtgtaataaattcttattgtagtaaaaatgtccgaaaataagtccgaaggtggcgctgaaaagaagaagagcggtggattcaacacgaagaagtttttgttggacctcgcatccggcggaactgctgctgcagtctcaaaaaccgctgttgcacccatcgagcgtgtcaagctgttgttgcaggtgcaagatgcttccattcacatcaccgcggactaacgctacaaaggcatcatcgacgtcctcgtccgtgttcccaaggagcagggctttctgtcgttgtggcgtggtaacctggccaacgtcatccgttactttccgactcaggcgctgaacttcgccttctaggacacttataagcgagtcttcacgcaaggagtggacaaggagaagcagttcttgaagttcttcaccatgaatttggcttcgggcggtgccgctggcgccacttcgctgtgttatgtgtaccctatggactttgcgcgaacgcggttggcaactgatgttgtaaaggccgatgcccgttcagtcagaagtttggcgtactggatcatgcaaatccgcaagtccgacggtcccatcggtctctaccgcggtttcttcggctcggtccgggggatcattattttacgcgcctcttactttggctggtttgac

SEQ ID NO: 49708 - DNA, 214 bp, Heterodera glycines
gacccgcgtgaagacccatgaacttcaggtcaagaagaaagaggagctgatgagaatgttggaagaacttaaaacggagctgggcagtctgcatgtgtccaaggtgacgaacggggcggtgtccaaactgtccaacatccacgaggcgcgccaggaaatcgtccgtattctcaccgggatccgccagcggcccaagaatgacttgctccagttt

SEQ ID NO: 49709 - DNA, 468 bp, Heterodera glycines
ctaaaaatgaataaagcgtttgtcaaagcagcactctgctccaaatcgacgaatgtttgcctcttcaaacgcctcgtcagacccgtcgtccaaattggctcccgtccaatcaccggcgccggttttggccatccgatgaccaggcaaaagatgcaaatgtacagcccggaaatgagggcagtcaattaccaacagaagcgcacccacatgcatgcaattctcaccaagaaaactgttgaagattgtgttatgctcaacttacatttgtttgacaaggtggacaatgacaaattgacgttcgactccgattttttcaaggacctcgggattgattcgctggactttgttgagtttatcattgcgattgaggacgaatttgagttcgaaattccggacggtgactcggacagaatgcgaacgccacgagatgtttacaattacatttgcgacaagtgcgatgtgtacgat

SEQ ID NO: 49710 - DNA, 425 bp, Heterodera glycines
ggctgctcctctgtccgtgttgtggacgaagggcccggcctggacgggcgctcgtccgtctatgaatacatgatcgcccgcgcgccatgcgtgatcggctgcctgtggatggtcactgacggcgaaattgaccgatttttcatggcgctgactgagtactgctttgcagagttgcacaagaaagagggtggtgccgttccggacactttccgcctgttgctggagggcgttttggaagcgcggcgacggtgcaaattgccatttctgaccggcgccgcggtggtggcctacggactgccggtggctgcggcattgaccgccgcgctctcttcccccgccgtttccggcactttgtcctcgtcaaattgacccatttggtggcccatcaatcagccgactctcaaaattatttattaattattgct

SEQ ID NO: 49711 - DNA, 474 bp, Heterodera glycines
cttcaattgttcgtcctcgcggcatttttcgctcgcttctgttttatttcagcagcaaaaattctctgctgttgcatcatcgcccaataaaaatttgaatgctgtgcttatcgatgctgtacgtactccctttctccaatcgaatacaactttccgtgagctgttggctgttgatcttcaaagacacgctcttaaaggaatgcaaaacgagcaatatcgcccgtgaggctgcgatcaccgccggtttccctgattcgatcccttgcaatacggtcactctcgcgtgtatttcttccggcgtttcaattcaaaatattagcctaatgatttccactggctatttaaaggcgggcatcgctggaggagtcgagttactctctgactttccaattcgttacaacagaaaggttcgactttctctcatcgatttgcagaagggcaaaagttttggagagagatttaagcacctgaaaa

SEQ ID NO: 49712 - DNA, 612 bp, Heterodera glycines
ccgaagccgacactgcgttttgcggccgtccgaacgttgaaccgaatttccattgactaccctcaggcggtgatttcgtgcaacgtcgacttggagcagttgatcacggatagcaatcgttccattgccacattggccatcaccacgctgttgaagacgggtgccgaggcgagcgtggaacggctgatgaagcagattggcacttttgtcagcgagatcagcgacgaatttaagattgtcgtcatcgaggctatccgttcgctgtgccatcgctacccgcgcaaacacgccacactcatgaactttttggcctcaatgctgcgcgacgagggcggtttcgactacaaaaaggccattgtggacaccatcatcaccatcgtggaggacaaccccggcgccaaggacttgggcctgtcccatctttgcgagtttattgaggactgtgaacacgccgcattggccacccgtgtgctgcatttgctcggccgtgaaggaccgaccactgcgaacccgtcccgttacattcggttcatcgagagtcgcgtcagtgtggagagcagtcaggtccgtgcggccgctgtcactgcgcgggccgagattggggcggagtgt

SEQ ID NO: 49713 - DNA, 344 bp, Heterodera glycines
aacgagggctgaactgcctgaggaagttgaacaacaatccgacgacattctctgacgaaaggaggccaatcgtcgaattttcaattgaaaatttgaatgcgttgagagtgaaggaaagacggcagcaaaaagaaacgaaaagcgaagaaaatgaggaggaaaaacaacaaacaaagaatagagtcggaaatgccgaggcattggagaaaacgaagcgcgaaatgatggccggcgggaagaaatggctgcctttttttattagggacgaaaattcggcacaaaaagccgcagaatggactcagcacgacgcctggcaaacgccgaggacagacaaaaaataaacc

SEQ ID NO: 49714 - DNA, 256 bp, Heterodera glycines
ggtgtcgcacaccgacggcatccaacaacttcttgcagccgaaaaacgagctgctgaaaagattaatgacgcccggaagttaaaagcacagcggctcaaacaagccaaacaagaagcacaggcggagatcgaccaataccgacatgaaagggagcagcgttttcgcgagtttgtttttttttatttgggcacacgcgacgacattgaggcgcatatatattacgacacccaagccaatctgaaagccatggagcag

SEQ ID NO: 49715 - DNA, 334 bp, Heterodera glycines
gaaatgtcctcctgttgtccacttcggcattaaagatgttgtataagccgtggagaacaaaaaggccagcttagatgtcgttgcacacgacgttgacccaatataaattgtgatttgcctgccggcaatttgccgcaaatttggagtgccgtatgccattgtgaagggaaaagtatttctcgggcaagttgtctaccggaagactacttttgtcgagtgtctttgcgacgttaatccggaggacagaaactcgcttacaaatttggctgagggtgcggtcacccatatcaatgaacccagtgatgaacttccgaagaattcgggaggcgcgatc

SEQ ID NO: 49716 - DNA, 379 bp, Heterodera glycines
acggggggacatagggaccatgtaagggcacggcgccttccagaaagacgtgccgttctaggcggagcacagaaagaccgggcgcgtgttcaatgcgacctaacatgcgctgggcgtcttgaggaacaagcgtgttctgcatcgcatcatcccgaaacgcatcaatgtccgtgttgagcatgtgaaaccgtccggctcccggctcaagtttctgcagcgatgcaaagcgaatgacttgcagaagaagcagcacaaggagggcaacgcaccgtttgtggcgctgaagcggaagccgaaggagccccgggtggcgcacttggtcaaagtgaagagcaccaaagttgagcggctggcgcccgtcaaattcaaaattgtcgcc

SEQ ID NO: 49717 - DNA, 428 bp, Heterodera glycines
actcccagcagaatattactgaacagtcggtatcggcaccaaccactgatcgcaacgaatatgaagaactttccaaattggtcaacccaatcgcaaaaccgcttgcaaacagaaaattggctaagaaagtctacaaattggtgaaaaaagcggcaaaagagaagggctttctgagacatggattggctgatgtgatgaaagccttccgaaagaatgaaaaaggaattatcgtcttggcagggaacgtttcaccgattgacgtgtacagtcatattcctgccatttgtgaaaaaaagggtcttccttatgttttcactccgtctcgtgaacagcttggactttgtgctggctataaacggcctgcagggggcctgttggggaagcgacgcgagtcgtacgcggagcttttgcagcgaacacccgaggcg

SEQ ID NO: 49718 - DNA, 350 bp, Heterodera glycines
gatttattgtaattttgtcacgcatttaaggtattgctgaaccaccgccctcatcccatccctcctaaaaaatttggacgcaaaatttttaaatggccgaatccggtgaacatgaccatgactttacatctggcgagtcgggtgcagctgccacttacccaaagcaatgctctgccttgcgcaagaatgagttcgtcatgatcaaaggccgtccttgcaaagttgtcgagatgagcacctcgaatattttttagcacggccatgccaaggtgcacctggatgcgttgtacattttccccaccaaaaaggaggaggacgaccgcccgttcacccacagactgaaagtgcca

SEQ ID NO: 49719 - DNA, 449 bp, Heterodera glycines
ccatttaagtgttattattcgtatgttaaaaatgttgctgaaatttccttccattcatcggttctgctccattcgctctttgactcaacttcccaattcttatgaagtgttgcgagaccgcggtgacactgctgagctgagtcagctgaaaaacggctttcgtgtcgcctcttatgcaaacggacgtccgacagtgacggtcggtgtttggctgaatgctggctcgaggattgaaaccaatgattattaacggaatcgcttcactttttgaagggttgctgcacaagggatcagggaaacgaaattcggtgcaacttcaaacggagctcgccaaacttggggctcggcttcgctctttcactacccgggagcattcggccttttttgtggaatgtcttaaatcggacaccgataaagtggtcgaattgcttgccgatgcgttgctgaac

SEQ ID NO: 49720 - DNA, 325 bp, Heterodera glycines
tggtggtggcaaagatcggattgcagtttttccgtcacggatggctcaaactgtgatgaaaacgaggctgaaaggcgctcaaaaaaggcatagcttactgaacaaaaaggcggatgccttgaatatgcgatttcgtgaaattctgaagaaaatcactgaaaacaaaaaacgcatggctgatgtcctgaaagatttttttttttctcttgccgaggcgaaattcactgccggcgatttctctcacatgcttgatcaaaatgcggcttcccaagcgcagtacaccgtcagaatgaatcgccacaatgttgttggcgtttctcaaccg

SEQ ID NO: 49721 - DNA, 343 bp, Heterodera glycines
cgctcgtacgaagttcaggcgttcgttccgcaagcacagtggtgaggcactgactacatgctaccgcgagtgcaaacggggcgacattgtcaccgtcaagggcaacggcgccttccagaagggcatgccgatcaaggcgtgccacggcaataccgggcgcgtgttcactgtgagccaacatgcgcttttctttgtcctcaacaagcgtgttcgccatcgaatcatcccaatacgcatcagtgtccgtgtggagcatgtgaaaccgtccggctcccggctcgagtttctgccgcgatccaaagcgaatgacttgcacaaaaaaccgcacaacgagggcagaccc

SEQ ID NO: 49722 - DNA, 622 bp, Heterodera glycines
gttgtaagcaagcggcctcaacatgggcgcctacaaatacattcaggaactctaccgtaagaagcagagcgatgttcttcgctttttgctccgtattagagtttggcaataccgccagctcacaaagatgcacagggctcccaaaccttccaggccggacaaggcccgtcgcatgggatataaggccaagcacggatacgctgtgttccgtattcgggtacgtagaggaggccgcaagaagcccgttcctaagggtgccacctacggcaagcccaagagccagggtgtgaaccagctgaagcctacccgcaacctgcagtctgtggctgaggagcgtgttggtagaaggtgtggtggccttagggttctgaactcatactgggttgctgaagattctacctacaaatattttgaagttatctgtgttgaccctgcccacaaggctatcaggagagatcccaaggccaactggatctgcaaacctgtcatgaagcatcgcgagcttcccggtcttacctctgctggccgcaagtcccgaagaacttggaaaggtcacagatattctcagaccaagggcggaatctcccgtgccgtttggctcagaaagaattctctctttctg

SEQ ID NO: 49723 - DNA, 504 bp, Heterodera glycines
  unsure (1)..(504): unsure at all n locations
gtttgagcagtgcctttatttattgaatccgacaaaatgtcatccagctcgaaagctttcattggtaagccggcgccaaatttcatggcggacgccgttgtgaacggcgacttcaaaacaatttcgctggaacagttcaaagggcaatatgtggtgctgttcttctacccactcgatttcactttcgtttgcccaaccgaaataattgccttttcggacaaggcgggagagttcaaaaagatcggtgtccaactcatcgcgtgttctaccgactctaaatttgccctcttgaatggatcaacaagccgcgaaaacaggaaagacttggcgagatgaacaatccggttgctggcgaacccagccaccaaatagccgtggataccgcgtgctgatggaggaggggggattgtttattccggaatgttcattatccatgaaaagggcggtcttcgctcagaaacccatcaccaattgcctttgggccnctccggtgaaaaaaacctt

SEQ ID NO: 49724 - DNA, 548 bp, Heterodera glycines
gctgtgcacgctgaacatggtgccgggcgagtcggtgtacggcgagaagcgcatctcctcccagcagaccgaaaatgcgccgattgctgcaataacgccgaagacggaagagacaacgaatggcagcaacggtgtctcagcacccaccgccgcggctgccggcccggcaccgccagtcgagtaccgggtgtggaacccgttccgctccaaactggccgccgccgtcatggccggcattgaggacacgcacatttacccgggtgcccgtgtgctttatcttggcgccgcttccggcacttccgtttcccatgtgtccgacatcgttggacccgaaggcatggtctatgcagttgagttttcacatcgcagtggacgtgacctgctcggcatggccaagaagcggtccaacgtggtgccaattgtggacgacgcacggcacccgcacaaatactccatgatgattggcattgtggacacaattttctcggacgtggcacagccggaccaggcacggattgtggcacacaatgcgcacaaatttctgaaga

SEQ ID NO: 49725 - DNA, 639 bp, Heterodera glycines
cctcggaattatttcaaaatgggtcgccgtccttcccgctgctaccgctactgcaagaacaagccgtaccccaagtcgcgcttctgccgtggtgtccccgaccccaagatccgcatttacgacatgggtcgtaagagggctggtgtcgaggagttcccgctctgcgtgcacttgctctccgacgagttgcagcaaatctcgtccgaggcccttgaggctgcccgtgtgacggccaaccgtttcatcttcaagcaggccggtaaggattcgttccacttgcgcgtgcgtgtgcaccccttccacgtgctccgcatcaacaagatgttgtcgtgcgccggtgccgatcgtctccagaccggtatgcgtggtgcctacggcaagccctacggtaccgctgcccgtgtcaacattggtcagatcctcttctcgatccgctgcaaggactcgaacaaggccgttgtcattgaggccttgcgtcgtgccaagtacaagttccctggccgccaaaagattctcgtgtccaagaagtggggcttcaccaagctttcccgcgaggacttccaggagggtatccagaacggctcggttgtccccgatggcaacggcatcaagatctacaacaaccacggcaccctccag

SEQ ID NO: 49726 - DNA, 538 bp, Heterodera glycines
gaaatgaggtaaaagagcgatttggctctacccgactgaagcctacaagattactcatgctgaatttccttgatatgctcgacatcttgcctgacaccgtctccttatccccaagcactgccaaagtccattcaccttatctcgctcacgaacgcttcgaagaatctgtaaatggcctggacatggggatccgaactcttcctgtgactcgccctgcccgtatgccaccacactgggatttccgatacgtcctatgcgtgcgcgtcgtcccttattgaatggatatcctgatgctacaacattctccaagcacctttaccatgagctctacctcaaactaacctgaaatgccttccagaacaagcgcaagctcatggactacatctttaagaaagaaacccagaacaaactgtctaaaccgcttgcagaacaggacgaggaacgtctgaacaagaacaaagacacccgcaaacgtcgcgaggaccgtttggcctcaaagcgaaaggaactcttgcaccccgtttcggacagcgataaa

SEQ ID NO: 49727 - DNA, 403 bp, Heterodera glycines
gggaacttgcatttctcgctcggatgtcccttaccgacgttttgagcacccctggcagaaactgacccttcaagaggtgaagagaccaattgttgaaattggcccggtcacggttgcgaccgccctctaattgtcgtgatatctgcctgattctcttggaggtaggcaagtgccacatgtaaccgggaagctaattatgcgcattctaccatcaaaggggagggcagcggaaatttgggaggatctttgtgatgtgatctgcaaggacggtaccatcctcaatgttgtggagcgtcgacgccatgatattgacgctgcggatacggtattctgggtggagagcacaatcaaccacttctgccgtgacttcatctgcaaacagatgctcaagcccacttggaag

SEQ ID NO: 49728 - DNA, 657 bp, Heterodera glycines
caacagttggaatcaatcgcggatatgaaaaagtttgtggaacagtaccctcaattcaagaagatatcgggaacggtagctaaacacgttcagttggtgggtgaacttagccgaatggtcaccgatgaaaatttgttggaaatatcggagttagagcaaaacattgcggtcgcaaatggggattattcggcttgtctggattcccttcgaagacttatccagcatcccaaaacaactgatttgaatgccctccgattagcgatgcttttttctctccgtttcgaagggaacagcggcgctttgagcttcgttcatgagctgttgagaaagcgagggatggccaacaaacagctgcaattgatctcaacactgctcgaattcgcgggacagcgaagacggcaaaacgatttattcggggatagatccgcaatggaaatgaccaaacgattcataaaaggactgaaaggcgttgaaaatatctacacacagcacgagcctttcattctccaactcattgatttggcgtcgcgtggcaaactcccagaaagtgtttatccgtctacggatttggcaaatctgaattcccgctttgaaaatgttattttgtttgtcattggtgggacaactttcgaagagagtgctgcggtggcaaattta

SEQ ID NO: 49729 - DNA, 645 bp, Heterodera glycines
  unsure (1)..(645): unsure at all n locations
tggtcgaatacgctcaactccttttccaagacgaccaactttgggaaattgcgcccgaatatttgatcgccagcggattgggcagtgttggtcagcggatactcgaccaactcgtcagccaattcaactggaggggaaacacatcggtggcacagcgacttctgacaatttgtgaccgctacgaactgggcacggcacgggaggacattttgagatcgctcgttttaatgctttgccggcagggagaatggacgagtgcgcttggctgggctctccaaatgagttccaacgaactcaccgttaacgtttctcgtcgtattctcgagggtgccatttcgcccgatcgcattggacagatgcgcatttttgaagcactcgacgaccaatttgtgaactgttctgagctcgtccttctctacaagttctacacattcaaacggttgctgcttgagggcgaacttcgccaggccgttcatattctccatgaattgttcatcgacaactcttcccccgtggaattccacgccgttctctttgaggagatgatacgcattttgtgctctttccaacaaccactggtcggtctggacgtattaaaccccgaagaaatgatcactcctggccttgaccgcgaattggtgcang

SEQ ID NO: 49730 - DNA, 615 bp, Heterodera glycines
cgcgcgatggcagtgcccttcagccttcaagtggacggccttatctacagagtcagaaactccacttacgggcaatttcccttagatgtgacggagcacgacttacgccagctttgcgatgccacgatggacgtcttccggcagcagcagacactcgtcaggattcaaccgcccgtcaacgtctgcggcgacatccatggccaattcacggacctgctgcggatcttctcgacgctgggccccccgccggagaaaaaatacctcttcctcggtgactacgtggacagaggcccccaatcgctggaaacggtggtgctcctcttctgttataaggtcaaatatccggagagtgtgacgctgttgcgcgggaaccacgagtgcagtaacatcaacagagtatatggcttctactcggagatcgagcagcgctaccaccaagcggacactcgacggctcttcgacatgttcaaccaaacttttgcctggatgccgtacgtgggcctgatcggggacaggattctgtgcatgcatggcggcatttctgacaggatcaccagcttgcagcagctcaacgaattacgccgcccgctgctcaccctgccgagcccgtcgttg

SEQ ID NO: 49731 - DNA, 568 bp, Heterodera glycines
tttgaatgtagctacatccctcatcgcaatgcaaaaaatggtctaccacctgtatgcttatgtgtgaatgcgccaatgagacggtgttcacctcatacttcattgctccatagcacgtcacaaactgttggtcaccattcgtgtcaacgatggcattaatagatccttcctaggtgattgctgccgatgctccaccacgaacaccgcacgcaaataggctcaacatcgcctttcacaacacgtgcctatcacctccgtggccgttttacccccgtgctcctctgcacgcaaccattttcactacaattactccgaacctcggctgctcttggtgtccgaggcgcacgtggagcttcaggcggttcgtcatgaactctacgcgaacactccgaggattgcaactgccaacacggactcgcctctgcaattggtggacattgcctttccggcaaacgataatcaaaagctctcctttgaacagtattcgtggatgttgctccgcgaaattttgctggatgcgctgggcatacactgcacactgtgtttatggtggatcacatgtgatctt

SEQ ID NO: 49732 - DNA, 638 bp, Heterodera glycines
tcaatcgccacttttcccattggtccgtcccagatgaccgccgtgccgaattcaccttggaaaaagtgtggcatcatttgcgttatttcgaacattccgcagctaaagaagcgctccgtgaagcttcagaattgtccggcattgaaaaagtcgaatttggcggagcattgggtcgtcgcacacgctttcaacaaaaagaagtcccacaattgtttttacaggtgactctttcctcctctcaaaatggcgacggttctttggcgccatcgccgagtgaacttcccaagaattgtgagagcggcgacgacactcttttggaaagaattgttttttcggaaggaactgagcagaaagttctcaacccggtgcagtgcgcgtgtgtgttgaacatggcattggtggaaaggcacggaaaggcgacggcggacgaaatccgcacggaggaaacgacggcatttttggaagagattatcaaccaaaagtcctgttgggctgttcaatttcgtgcgctttacgagcggagtttgttggaacggcaaaatcggcgcagaatggagagggcgtgtgctcaactcgagtctcttggcaaagtgttggacaatgccacgccctcttcggtcaccctcctccatcgtttg

SEQ ID NO: 49733 - DNA, 373 bp, Heterodera glycines
gcaacttccaccagaggacgtcgcaacaatgcccacgcagaaggtcgtcttcaacgccccgttcgacaacgaggccacctactacatgcgggtgatcaaccctgggacgaagcgcatcggctacgccttcaagaccaccaaaccgaagcgcatctacatgaacccgccgaacggagtgctcggccctaaggagtccgtcgacgtggccgtctcctgcgacgccttctaccccggcagcgaggacaccaagggcgaccgtgtgaccgtggagtggaccaacacgccggacccagccgccaccgcgttacagctctagtggttccagggatactggatggtgcgccgcaagaacttgccgatcgagtacaacgtc

SEQ ID NO: 49734 - DNA, 661 bp, Heterodera glycines
aattaattgaactttgtttcctcatttaatcaattgttgttgtgaaatggaggcaatggaagttgacagcaaagcatctggaggtggcgaaccgatgaataacaataacaacgccaattcgtcgtcaaatccgcgcaccgttctcgatgagagtggtggaccgaaaaagatgagccatgaactaagccgagagttcatcaaagacattgacgaatggatagcgcagttgtacgagtgcaagcagctcagcgagacacaagtgcgactgctctgtgacaaggccagagagatactcaaaacagagtccaatgtgcaggaggttaagtgtccggtcacagtttgcggcgacgttcatggccagttccacgacctgatggagctgttcaaaatgggcggcaaatcaccggacaccaactatttgtttatgggcgactatgtggaccgaggctactactccgttgagacagtgtcgctgcttgtttgtttaaaggtacggtatcccgaacgtgtgaccatcttgcggggcaaccacgagtcgcgtcagatcacccaagtgtacggcttctatgacgagtgtttgcgcaaatatggcaattcgaaggtgtggaattatttcaccgatctgttcgactattttccgctgactgcgttggtggacggc

SEQ ID NO: 49735 - DNA, 602 bp, Heterodera glycines
ctctgctgccattggaccattctctgctcgaccaactcgcttctgtttacgctcgcgcgggcactgaaataaaaaggatgacattcaaaagcatcgaaattgcgatcaaatccatcggaatgcattctgaggagttgctgaacatgatcaacacgtgcccttccgaggccgagactttggtcgcgcgcattgtccatttgctgaccgaacgcactgccccatccgtcgcttaggttgacagtgtccgcaaattgcatcattctcggaacaccgacgttcgctcactgattccaattctgaccggactgaataaggaggaactgctccaattggtgcccaagtttgtgctctcagcaaaaaacagcaattcggtgcccgcatttttcaaaaaacttttgttcggtcggcacattgaaaacggcgagccattgatcacagctcaagaacttctgttggagttgcacagaatacggccaaacagaaaggaattgggctttttgatgcaaaatttggacattcttctcgtggatgccaacagagaatttacaattggcaaagatgttttggctaatacagtggaaactttgcttaacgacgagcct

SEQ ID NO: 49736 - DNA, 561 bp, Heterodera glycines
ttccctaaaaacgatgcgcctccgctcgacttgcttttggggacgaagtcggatgctcaacaacaaaatgagaatgggtctgcgatggcactcgaaaaagtgccaaaaatcgactggaaccaattcgaggtccaatatttggacttagtcagtgccctccattatttgctcaccgtggaagtgcctcgaaaccccgttcttggaaacaccgaattgaccgcgttgaaacgtttcgtccatttgcttcgtcttcatggccccggttcgacatccgtccgacgccttttctatcgtctggacgaatggctgtcctcgcagcatcagccggtagtgatgaccgacaaatatctgtccactttggacgaaattcagagtgacttgggccatcccatcccttccaacacttctttcgtggcgtgtcgcggctcaaagccctttttgcggggttacacttgcggtctttggactctcttccaccttttgacagtgcaggcgtacaaagaacggcaccgaagccccagttttgaccccgtcgcggaagtgttggagcccattcatagt

SEQ ID NO: 49737 - DNA, 318 bp, Heterodera glycines
gacggttcgaaggtagaagcggaagtgttccttaaggacaaagtggtcgctgtttacttctccgccgggtggtgcccgccgtgtcgcgcgttcactcccgaacttaagaaattctacgaggagctgaaaaaggcaggcaaaaacttcgaggttttgttcatctcgcttttccgtgctgctaaagacctcgtcgaatattaccgtgactttcactaagcttgggcctagcacaaggacggaaacccgaaaattcaggaacttctccagaacaacgaaaagaaaaccatgccgactggaagaagaataaaaccgatcgga

SEQ ID NO: 49738 - DNA, 641 bp, Heterodera glycines
cgcaatttatcggccattttccttcccttggcactcttttaactaaacattcttcggaatccgagaaggaacagcaacttcagcaacacaacataaaaaaggacgaaacaaacggcggaggggacgaaatggcaactgaaaaagccgaattagtggccaaaagagcgaaaatgataagcagcaaatgccaaacattttacgccgatgagcccattttggtcactcgcgcgtcgatgcaattccttttcgatgagaatgggagacgtttcctggactgtatttcgaatgtgcaacatgttggccattgccatccgcgcgtcgttgaggctgtccactgccaaatgcgactgtccacttgcaacattcggtttctctctccgcttctgaccgaatgtgccgaatcgctgcttcagactctgccggctcaattggacactgttctcttttgcaattcgggctcagaagcaaatgatttggccttgcaattggccagggattggaccgggacgagggatgtcgctgtgttggagcacgcgtaccacgggcatcagacaacggcgatgcaaatgagtccatacaaattcgacagaggagccaaaatcaaacggcccaaatggggccacgtgtgtccgacgcccgat

SEQ ID NO: 49739 - DNA, 443 bp, Heterodera glycines
gagaactagtctcgagtttttttttcttttcccgttcttttttgtttttttcattttaccagaaaaaaatatcattttaataaaataatattatttatttcacctatgttaaaatttggtctttttcaataaaaattcagattttttcttacaatggaaattttttgcctttttttccccctattttttacaattttattccgttttgcacaccggatcattttgaaacaaaatataatgttccaaattttcgtcaaaactctcaccgggaagaccatcacccttgaagtcgaggcgagcgaccccatcgagaatgtgaaagcgaagatccagggcaaggagggaattccgccggaccaacagcgcctcattttcgcgggtacatccgcttgatatgccaagatattaaatgtttcacgtaatccttgtttttaggaaaacag

SEQ ID NO: 49740 - DNA, 374 bp, Heterodera glycines
ggcgaagaaagcggtgaagtccaccaaagcggtgcgaacgggcgacaagaagaggcgtaaggctcgcaaggagtcgtactctgtgtacatctaccgcgtgctgaagcaggttcacccggacaccggcatctcctccaaggcgatgtccatcatgaactcgttcgtcaacgacgttttcgagcgcattgccgcggaagcctctcgtctggcccactacaacaagcgatcgaccatctcttcgcgcgaaatccaaacggccgtccgtctgattctgcctggcgagttggccaagcacgccgtgtcggaggggaccaaggcggtgacgaagtacccctcgtcaaagtgatgatgcgatggtcgacttcggtgtccgg

SEQ ID NO: 49741 - DNA, 594 bp, Heterodera glycines
gtgatcaatgtgtggaacacacgcttcaaaacggcatcgcccgagatgacattcaccagctcatcacgcgtgatgagcatgacatgggacatgttcaacgcgaacatcatcttcggtgcatgttattcgggtcaaatttgcatttgggacacgcgggtgaacaagcggatgcctgtgtgtaagactccgttgaccgccaaagcacacacacagccccttttgtgcatgcgaatggtgggcacagcaaatgcgcacgatttggtcaccatttcgacggacggtcgaatgtgttcatggagcattgacaacttgcagtcgcccattgaagccaccgaattgacatgtaacaggacaaaaaagccgatttgtgcacttagcatggcattcctacacaacagcatcaacaattacgtactgggcactgaggagggcgagctgtacattggcgaccgacacgcggccagcggcgagtcgagcagaaacattgccgcccaccaattgccgatcactgcgctggacacacaccgcgcgttgggtgccattgacttcagctcactgtggttgacttgctccatggagtttggcatcaaactg

SEQ ID NO: 49742 - DNA, 157 bp, Heterodera glycines
taaaaagatgcaaatcacccctcgccatttgcaattggctgtgcgcaacgacgaggagttgaacaagcttctctcggaggtcaccatttctcgtggcggtgtgttgcccaacattcacacggaacttttgtccaagatgcaacagaacaagcagcag

SEQ ID NO: 49743 - DNA, 508 bp, Heterodera glycines
tggccatttgtactttgtgtttatggatgttgtgccggtggaacggcgccatcgctttcgctaccgatacgacaaatcgcaatggcaaagtgcgggcaaagcggacaaacagcccttcgggcgactgtttctgcacaacgaatcgccattcagcggagaacagcttccgctccaattggtcacttttgactaagcaaagttgaccaacaacgagaagagcagcccggacccggaccagctattgctcaattccatgcacaaatatcggccccgtgtccatgtcctgtgcgtcgcgccgtccgccgaccgttcggtccaaacgccgacttttccgcggcaattccgccgggcggccgacttcgacaagctcagccgatttccctacagaacattcgaattcccggaaacaaaatttgtcgctgtcaccgcttatcaaaatcaattggtgacgcgcaaaaaaatcgaattgaatcccttcgcgaagggatttagagaccaaaagggcgac

SEQ ID NO: 49744 - DNA, 550 bp, Heterodera glycines
gttggatttggggaagaaaaagaagaagaaaaaggcgaagaccacagaactcaaattgtcagaagatgagcatgaggaggaaaaggaagtcactgcactcgccgaaggcgttggccgtacaaatttgctcgacacaaaaaaccccgacgcgtggacggactacaactacgacgagatgctggacatggtcttcaacatcatgcgggagaagaacccagaaatggtttccggcaagaaaaagacatttgtgatgaaaccgccggaggtgcaaagggcgggcagcaaaaagacggcgttcacaaatttcactgaaatttgtcggctgctgaagcgtgacccgaagcatgtgctgcaatttcttatggccgagctgggaacgacgggctcaattgacggcaatcagtgtttaattgtcaagggcaagttccaacagaaacactttgagaatgtgctgcgcggttacatcaatgaatacgtccgctgtcacacgtggcgctcctcggacacccagttgaccaaggatgtgtcccccctgttcttcatccaatgc

SEQ ID NO: 49745 - DNA, 169 bp, Heterodera glycines
aacgtttggcatttggctccgctaccattctcgtactggacaccactacatgtaccgcgagtacctcgatgtgtgtgaagcggaagctgatactcactgctatcacgacatgggcgctcgtcagcgtcctcaagcggatctcattcagatcgtcacagcgcaaaccatc

SEQ ID NO: 49746 - DNA, 406 bp, Heterodera glycines
gcgaattgcactggagctcagttcttctctttcgcgctgcttctcaacaattggagtcgtcccaattgcttcggctatttgtggcactttggccttgattggcaatgccatttaatcgctccctttctcctccatttgctcttccggcgacaaagcgtcggtttgattgtcgtcgccgttttgatcatcggttcgatgtgtcttcgtgctttcaaatgcgtctccaatggaatatgcaataaaagtgacgtggacattccggtgggttcactgctttggacattggcatactcattgtcagatagcataagactcaatgttatgtaaagaaaattgttatcgaaaatataccaagaaatcggacccattcgcttgcttaaaccatctcttcctcttccaatgcgtc

SEQ ID NO: 49747 - DNA, 481 bp, Heterodera glycines
gttaattgtttgataaataataaaataataattgcacaacgtcaatgcctccattatttcccgaaaaggtagagagcattcgtcacttgtccacaaaatcttgggaggcgacatttacgaaggattatctctccaatgaaggccaactccgttttctttcgcgcatgtgttacctcgcaatggcacattaccttttgtaccgtggagtgctccccaaaggagttttcaaacgccgaaagctcgaagatttggctatttactgtttcgatggcaacacgcgttggggacgtaaattgtcggagatgatgaaaggtatcagagaggccatcgaccaaaagtacatcaaacaagcattcgtgatgatcaacgaggacaaagaggacccggacgtcgcaactgaagttttctcagtcggtttttgttacaacgaacagcacacgatgactgtcttggatgacaaaggcaatcgtatcgtttcatt

SEQ ID NO: 49748 - DNA, 543 bp, Heterodera glycines
gtttgagtaattgtaacatttcggcacctaatatgatttattccgcctactatagaaggtgaacagcttgaaaatgatgaaaacgtttctccgagtcgcgtttcccccaccaatgcctttggtgttcaaaagagtggccatttgctgcacaattttgctgagcctggaccactgacgacaaagatttattattacgtcgatgaccaacaaattccgttctccaccttttttgccatccctccgtccaaaattacgctggcggacttcaaaaagtgtatcacgcgcaggaactaccgatattattgcaaagtgatggacccggcacttaacgccgaggtgaagacggacattcgcgacgaaaacgccgtgctaaagccaaattcgaagaatggacgctttgaactgtttttgctgtccgagacacaacagacgcactcgtccgcctccactctccccatccaaaagctacagcatgtcgatgccatccgtgcctctctcatggaaaaacggacaacggccaataattacattcttgacgggagg

SEQ ID NO: 49749 - DNA, 580 bp, Heterodera glycines
aatttcatttgtcctaaggttggagagccttctccactccaacaaagagttcgaatacttgttctttgtcgaacaagcggaaggaaccgatgaattcccagagaacgttgacatcgaagacactggaatgttaaaaaaatgtaatgcaagagatatcggactctttcacgaccgcgatattctgagcaaactgaatttggattgcaatcactgctagctggtggaggacttgatggaaacacgaaaagggaccatggcataccccatttattacaaccagaggctcattgaggggatggcgaggcccaacaacggcactgacatctgctgattcttggccgactcttttccgaccgtgaacgcttatgtgagggatagtgcacgatcacacaaaccgacgactatcatgaccatgatgatctaaagctgctccattgtttatcgtaccaagttgccagctttcgacaatatgcataggtaagacgtgggggagcctgcttttaccagaaaatggatgtagagattttatgacgttacaactgcgcttgaccaaaattctgacagattcgtgaacaaactt

SEQ ID NO: 49750 - DNA, 220 bp, Heterodera glycines
tcgtggcgagtcgggaggaactgcctcttaccctgagcaatgttctgtgttgcgctgcattgagttactcatgatcaaaggccgcccttgtaaacttgtcgagatgagcgcctcctacaccgggaagcgcggtcctgccgaggtgcttctggttgcgttggacattttcaccttcaagaattgggattacatttgcccgtccacccacatcatggatgtg

SEQ ID NO: 49751 - DNA, 349 bp, Heterodera glycines
agaggatgaaaagaaacttcgcattttcttcgactagcgaatggcgcaggaagctgaagctgactcgttgggggatgagtggaagggctatgtgctgcgaatttcgggtggtaacaacaagcaaggctttcctatgaagcatggagtgatcaccaactcgcgtgtgcgccttctcctctcccaaggccattcctgctatcgcctacgctagaagggacagcgcatgcgatagtcgtttctcggatgcattggcgactcgaatatgtccgggctggcattggacgctgtgaagaaaggataatagcaaatcgaaggactggccgacttagttctgcctcgtcgtcgtggc

SEQ ID NO: 49752 - DNA, 526 bp, Heterodera glycines
gaatcatcgtggcactgtttattccgtgtctttcaatccttttactcactcggaagcgcccatttattttgccactgtaaggaaaaatagggtgtctgtgcacctttgtccacccgaaaagggctttctattggtgcggcaattccaacaccaacacgcgaacgacgagttttattactccgtcacttgggcttataaccttgaaaaagcacaacatgtgttggtcgtccgcggatttcgcggaatcatccgtgtggttatcccactcaatgggcgacttcgttgcgcattaatcggtgacggcgactccatcaacgaattgtgcacttcgcccgtctctccgatgattgtcgcttcagcgagtaatgatctgacagtgcgaatttggaacgtcacttactcgcaatgtttggccatcctcggggggaccaacggacaccgtgaccaagatttcgattcgtccggcgcttttttgggcactgcgagtatggaccacgcggttgatctatggcacattggcaaagca

SEQ ID NO: 49753 - DNA, 504 bp, Heterodera glycines
gcactcgcactgctcaagcaggacgtgttcatccaggccaggaagtaccctctcgcctctcaacttaacgacattcccaattacattttttccaccattggacttgacggaacgcatgtcgaactttatgacgaacgcaaacccatcgcgagttctgccgaccttaagttgccctttcccggcatggataagagtggacgcggtgtctgccttaaaaacgaagtcaaagcgtgcatgtttggtgcattatgtcctctccgacacatcatcaaggacaaacaagttgtgtgcaagcattggttacgcggactttgcaaaaaaggggaccaatgcgaatttctccacgaatacgatctgagtcgaatgcccgaatgcttttttttctcaaaatacttggcttgcagcaacagggaatgcccatttcgacacattgacccggagagcaaaatcaaggattgtccatggtacgaccgcggtttttgcagacatggaccgttttgcaaa

SEQ ID NO: 49754 - DNA, 478 bp, Heterodera glycines
agtgttttcgcgaaaagtgtttatcggtggtcttccgattgacatcactgagacggagttgaagcaggcttttcataagttcggttcgttgctagtcgattggcccaaccgatcatccgattcacactttgttaaaaaagaacattatagtggcgctgccagcagagtcaccggctacgcatttctcatctttttggaggaggcgtcggtgcagcgtctgatcgctaagtgctactcggagggcgaccgtttctacatgctgatgtccagtcagactgttcgcgagaagcccgttcaggtgcggccgtggcgcctcgccgacatggactacatgccgcgcccgtcggcccacttggacccgcgccgcaccattttcatcggcggtgtgccacgaccaaccaaagcgaacgagttggcatttgtgctcgaagccgccttcggtccggtttgctacgcgagcattgacgtcgacccggaa

SEQ ID NO: 49755 - DNA, 252 bp, Heterodera glycines
  unsure (1)..(252): unsure at all n locations
cccatttggaatagtcttttgattccggtcaaccccctcaatcatcgcaaaaatggtccaaaggctccagtaccgtcgtcgcttgtcgtacaacaccaagtccaacaaggtccgtgttgtcaagacccccggtggcaagcttgtctaccactacgagctcaagaagggcctnggcttcccccaagtgcggtgactgcggctcggctctcactggcatcccggccctccgcccccgcaagtacgcgaccctct

SEQ ID NO: 49756 - DNA, 409 bp, Heterodera glycines
ctcttttcatcaatgtgtccatcccgaagacgacttcgagcgtcttctgccaaatggagtgaccaattctttcactcctgtgattcccggccgtggacgtcggaagatgaaccgcggattgaaccgaaagcacaaatctttgctcgttcgtctgcgtaaggctactctccattgtcccaagctgatgaaaccggagtgcgtgaagactcatttgcgtgatatgatcgtgctgccggagatggtccgctgtgtggttggcattcacagtgggaaggcatacaatcaggttgaaattctagctgacatgattggatattacttgggcgaattttctattacgcacacgcctgtccaacaccggcgtcccggaatctgcgcaacacacagttcgcgtgtcatcccactcaaa

SEQ ID NO: 49757 - DNA, 511 bp, Heterodera glycines
tcttgactccattcttccaccgctattaccaactgacaagccattgcgtttgcctctccaggatgtgtataatattggaggcattgggacagtgccggctggccgtggccagactggcgctctcaagcctggaatggtggacacttttgctccgcaacgcatttcctgtgaacccaaaaaggtggaaatgccccgccagcccttgccagaagcgcttccatgagatttttttggcttcaacgcgaaaaacatctctgtgaaggatattcttcctcgttcgggcgcgacggacgcgaaaacctacccggcaaaggaagcctttatcttcccagctcaagtgatcatcattaaccaccccggactgatcactgctggttacacacccgtgggagactggcacaccgctcacatcgcatgcgaattcgcccaacttaaggagaaagttcgaccgaccgcctgaaaaccacagcgaaggacgacacccaaggcgataatcgccgggaaaacgggg

SEQ ID NO: 49758 - DNA, 364 bp, Heterodera glycines
tcgccacccggacgtgctgtgggcgcaacgtgccaacgtaggcctgctctcgatcgaggtccacgactgcaagaacccaaagttcaagctcgacaagaacaaggtcattttcgaggcgcagggccagggcattgccacaggcaccgattccaagctgtaccgcgccgagctggacctctatgctccgattgaccccgagaaatcgtcctaccacattggcgcccgcctcgtgacgctgacgctggccaaggccgacaccgacgcgccgtggtggccgcgcctgctctcggacaagcgcaagccctcatggctcaaggtggatttcgcgccgtggaaggactaggacgaagacgacgaggaagag

SEQ ID NO: 49759 - DNA, 647 bp, Heterodera glycines
gtttgagcaaataaactatggagcattatgatcgtgcaattacgattttttctccggatggcagactttttcaagttgactatgcgcaagaagcagtgaagaagggctcaacagcggttgccgtgaaaggaaaaaattgtgttgtaattggagtcgaaaaaaaatctatcccgactctgcaagacgaacgtaccattcgtaaaatacatgcattggattcgcatgtgatggtcgcattcgccggactcagcgccgatgcacgcgtccttatcgaccgtgctcgagttgaatgcgaaaattacaaattgacgcttgaggaccgcgtatctgtcatgcatatctctcgcatcatagctgatataaaacagagatacactcaaaccactggccgtcggccttttggaatttcaatgcttgtcggaggcttcgattctgatgggacccctcatcttttcaagacggaaccgtccggagtttactacgaattgttggccggttcaatagggcgaaatgaaaagattgtgaaggagtatctggagaaagaatacggcaacgacaacacagctgatgaggagtctacgcttaaactgatgctcaagtctttagccccagtggtccaatcgggggcgcagaatatcgaaattgcg

SEQ ID NO: 49760 - DNA, 262 bp, Heterodera glycines
atataccatccatttgcacaaacgcttccacggaatacgcttccaacatcgagctccgcaagcgatccaagaagtgaaaaagctcgctgagcagcatatgggcacaccctacgtacgcgttgacgcgcctctgaatatatttctctgggctctaggcgctcataatgttccattctcgcgctctggcctgactttcgctctcacgcatgtgacggacgacgactctcgcggcaaattataccctttggcgacacatgtgcct

SEQ ID NO: 49761 - DNA, 502 bp, Heterodera glycines
agactattctaataccgatccctttgcactaagtatgcctcttccttgcactgctgcggacactcccaactcgcttccgggccccgccggtgcttccattggtgccttcaccggtgctactagcaatggcacatcattagatcgagaattggtccaatctgtctacaatcaaaactctccttctttcgaccgatgctgctcatacgattatttgctaggcaacactgacgacaccttgccgggcggttacgcttcttatttggtctacaaaattggaggaggttttgattacacggacacgactgttgcattgggactgtacggggcgacggtgctcagcggctgttttttggtgcccatgctcaagaagcaggatactaaggcgctgactgccaacgctgttgtccttgccggactttccgtcgccacttctgtggctttctacaacatcgacaagatttccgcttattggaccatgcccttcactctatgggccattttc

SEQ ID NO: 49762 - DNA, 248 bp, Heterodera glycines
  unsure (1)..(248): unsure at all n locations
cgacttcagcaagtgccgagcaagaaatgccaaatgtaacgacagaaggcaacaacatcgggtcgtacgaggaattacgcaggaaatgccgtgacttgttccccgtttgtttcnaaggtgccaaggcaatggtccaaaaggggctcagctcgcattttcaggtttctcataacatcagcatttctccagcactcaatgggtatcgcttcggcgcgacttatgtgggatatatggagggcgaccccagc

SEQ ID NO: 49763 - DNA, 145 bp, Heterodera glycines
gatttaccaccgatttgatgagattggccgtgtcgtttacattgccaaggggaaggaccaaggcaaactgccagctcttgtgaatgtcatcgacagcatcaacgttttattggacggcccctcctcaggtgtgactcggcgagtc

SEQ ID NO: 49764 - DNA, 655 bp, Heterodera glycines
gaagctcaacattgccgacccctcgagcggttctcgaaagacctttgaaatcgatgatgagaagcgctaccacgtcctcatcgacaagcgcatctcgcaagagattcccggagaccaggtcggctacgagttcaagggctacgtcttcagaatcaccggaggaaacgacaagcagggtttccccatgaagcacggagtgctcgtcaaccaccgtgtgcgcctcctcctctcggagggccactcgtgctagcgcccccgccgtaccggcgagcgcaagcgcaatgcgatccgcgggtgcatcatcaaccacgacagcgcgggtgtttcccttgttgacttcaagaagggcgaggacgacattggcggtgtcacagacgtgactgtgcccaagctccttggttcccagcgcgcgtccgagattcgcaagacgttcgaattgacgaaggaggacgatgtgctcaagtacgagatccgccgtgaggtgcccaagaaggctgggaaggccgacttcaaggtctccagaatccagcgtcttgtgacccccttgactctccagcgcaagcgcgcccaccatgccgagaagcgcatccgcgccgtggctgccccgtgagccgctgcttcctacaagaaagtgctcgctgaccgtgcccatgag

SEQ ID NO: 49765 - DNA, 613 bp, Heterodera glycines
gcaacataacagaggaatttcggcaaactgttaacttcatagaaaattgttataaagacggattcaaacagccgctgattttgttttgccaacgagcggattatatgacacatgaaagtaaagagaacaatgagaagaaattggaattgaagcaggtggaaattaataccggcccaattggcggccttggcacttcgtcccgtgtcactatgcttcatcagcatgtcctttccatggccaatgccgacatttcgcctcgggcgcttccgcctaatcacacggacacaatggtggccaaagcactgcacatggcatggaatgagttcggtaacagcgaggcggtgatcctctttcttcactcttctccttccgacacacgcttaattgaatcgcgccaagtccaaaatgaggtggcgcgaatttcgaacggacaaacaaagtgcgttttcctcattctgcgcgaagccattaaccggctgaagctccatccgaaggatttctcacttattttggacgacaaatatttggtggccgtcgctgtccatcgctacagtagtacaactccacaggaattgacatttactcgagaaattatacgccggtcaacggctat

SEQ ID NO: 49766 - DNA, 599 bp, Heterodera glycines
gtttgagaataattttgtaattaatctgctgctcacccattcgcggcaaagtgcaatgctccaagtggggaaagttgttctccttggcatatctgaaaacaaaaatagaagccgccctccgggaaaagaatgacccaacgtcggtctctgtcccaaaacacctgaaagtatcgtataattatgcccagtgtttacatgactgacaatgagtgcccaccttttggaggtgtcccttcagtctgatcagttctttgtctcgcgtcgctttgccctgctgaatgaaataatcgccatgcattcgtccgataatcccaaaagctgacccaattacctttcgagtggccacgccttttgtttgaaggacagtgaacaaagtgggcacatcggcggtgctctgatggttcacaatgacaaggacgcgatctttttcaccgtacttcctgatgtcttcgccatattcgtagactaatggggaacggacgttccaatatcgcaacaattgaaggattaccgtcataatcagcagtgtatccccaataagcgatgaacgcttgcaaccacatgtacaattttccctcgtaaaaccaataaaatcgtgg

SEQ ID NO: 49767 - DNA, 226 bp, Heterodera glycines
gaatgtcgatctctccgtattccagcaccaatcttgttcctatatcctcaagagcactttccccatgcgacttattctccacttatctcactctgaaaaggcctaccacaacccattgtcagtttcctaaatccccaacacgtcctttgagccggccaagcaaaagatcaaaagcgatccacattttggtaattatgtccacatgtgccttctctaccgaggagat

SEQ ID NO: 49768 - DNA, 648 bp, Heterodera glycines
gttccattcgatccaatctctggcttcatggcgacccatgttggagccgtctgacaggatgccgcggtttaatgggtgggccatccagcgcaaagatggcaatgcatctggtaaaactctgctcgaggctcttgactccattcttccaccgcaaagaccaactgacaacccattgcgtttgcctctccaggatgtgtataacattgtaggtattgggacagtgccgggtggctgtgtcgagactggtgttctcaagcctggaatggaggtcacttttgctccgccaagcatttccactgaagtcaaatcattggaaatgcaccaagaatacttgccaaaagcgcttccatgagacaatgtgggcttcaacgtgaaaaacatctctgtgaaggacattcgccgtgggtcggtcgcgtccgactcgaagaacaacccggctaaggaaaccaagagcttcacagctcaagtcatcatcatgaaccacccgggtcagatcgctgctggttacactcccgtgttggactgtcacaccgctcacatcacgtggaaattcgccgaacttaaggagaaagttgaccgacagtctggaaagataagggacgacaacccgaaggcgctgaaaaccggcgatgctgggatcgtccattt

SEQ ID NO: 49769 - DNA, 608 bp, Heterodera glycines
accacgttgtcatatcacatcaactggcgcaattttattggctgacatcattccatcacttatcatcaaattgttttctccctttattattgaccgagtgccatttgggtttataattttatttttatcaatcattaatttattaactctaacgctaattaattaatttatttattagttttcgacatttacttgtgtgcataatgcaggcactcagctttgtcattgtggcattttcccaatcattcacactgtcattaattggcattatttttgcatcattaggcagtggtttgggcgaaaattgcttgctggccctctcatctcattacaaacggtaaaaaaattcatatgggtaaaattcatgaatttatgatgtttaattaattaatgattattagatcaacaatttcggcatggtcatccggcacgggcggtgccggaattgttggctcagtggcatacgctgcacttacagagccaaaattgttcggattgtcaccacgaaatgccctactttccatgctaattgtgccaatcatttttgcaattgcgtcagttattgaattttaaaaataaaaatttaatttagtttaatatcttaaaat

SEQ ID NO: 49770 - DNA, 552 bp, Heterodera glycines
caagttagctgctctcgtggtgaactatgggtccggaatgtgcaaagccggtttcacggacgatgacgctccccgcgcggggtttccgtccattgtgggccgaccccgtcatcaaggcggcatggctttgcatggatacagaacgactacctactctgtggaggactatgtcgcagctccaagcagagatattctgacactgaactacccgattgagcactgtatcctcaccaactgggaccacatggagaagatctggcaccacaccttctacaacaagatgcgtgtcacccccaaagatcacccggtgctgctcacataggtcccgctgaagccgatcgccaacacacaaaagatgacccagatcatgttcgacacgttcgacacgccggccatgtacgtggccatccacgccgtgctgaccctgtacatatccggtcgtaccacctgtctcacgttagactccggctatggtgacacgcacaccgtgcccatctacgaggggtacaccctgacccacaccatactgacgatggacttgggcggacgaga

SEQ ID NO: 49771 - DNA, 606 bp, Heterodera glycines
gctcgaaaagaagaagagcggtggattcaacacgaagaagtttttgttggacctcacatccagcggaactgctgctgcagtctcaaaaaccgctgttgcacccatccagcgtgtcaaggtgttgttgcaggagaaagatgcttccattcacatcaccgcggacaagcgctacaaaggcgtcatctacgtcctcgtccgtgttcctatggagcagggctttctgtcgatgtggcgtggaaacctggacaacgtcatccgttagtttccgactcaggcgctgaacttcgccttcaaggacacttataaacgaggcttcacgctaggagtggacgaagagaaacagctcttgaagatcttcgccatgaatttggcttcgggcggtgccgctggcgccacgtcgatgggctttgagtaccctttggactctgcgcgaacgcgtttggcagcagatgctggaaaggccgatgcccgagagttcaaaggatcggcggactgcatcatgaagatcctcaagtcggacggtcccatcggtctctaccgcggattcttcgtcgacggccagggcatcatcatttaccgcgccgcgtacttctgctgcttcgacac

SEQ ID NO: 49772 - DNA, 619 bp, Heterodera glycines
ttttcccagcctttgttttctccccaatggcgtggctcagtcgtgcgactttttgtcctcaccaattacaccaaaaagctgtcaaaacgccgttacagaaagcggtcacttcggcggcagagcgtgcgcttgacattgtcggcaatgcgtcgcgagtgcggcttcaggacttgagggacaacccgggcgcgaggacggtgggcaggcaagtgcgcgcgaaggtcactaccaagcgggtcacaccattggcgagttgcaacacgcgtcgaagccgccgctcggctgggtttggggcgactattacaaaccttggcagcggtcctttgacggcgacagacgcttcaacggggacataaatctccgccgtgaatacattcccatttctttggtcgagcttcagcgcctcatcgacttgggctggttggacacgagtcgactcgtcgacatcgccgcaatttgtgccaccaaattgttggaacagaaattcaagccggaattgcgtcagtttggcattcatctgactgatgaacgcgaagaaatattctcaactccgatcaatttggaggtccaatgggccctcggcactgcaattgctgccatcgaacgcgctggtggtcga

SEQ ID NO: 49773 - DNA, 514 bp, Heterodera glycines
ggactccactgatcagtacggcagtgtttttgtcgagagtgggtgccgtcgcagcccacttctgcgtcttttttctccacaaaataaagcccttctgtggcgccagctttggatttggctggccgaatccgaacgcgaattgggccttgaggcgcaaatcagtgccgaaatggtggccgagctgaaagcccaaaagcacaacatcaactgggacaaaatccgagcaaatgaacggacgatgaagcatgaagtcgtggcacatatccacgcctacagcgaagtgtgcccgttggccaaagggatcatccatttgggtgccacttcgagtttcgtgcaggacaacacttgtttgatactccaacgggaggcgatcgaccatttgcttgaacgtttggccatctgattgggccgagctgctgattttgcgcaaaatacgccgattttcgatccatgggcgcaccatttccaagcgggcgtcgtgacaaccgtcggcaaagggccacaactttggccg

SEQ ID NO: 49774 - DNA, 251 bp, Heterodera glycines
ccgcctacttcatcagatattataatcggagaaactgcccgtaactaatttccattttggacttacttgaggcctggataaacgaattccctcctgaagatatgggattgcaacgctttggcaacaaatctttcaagaaatggttcgagcgcctcatgtcggatggacaaagtttgctgagcgatttgtttcccgaaaatttaaagtccgctgttcttgaaatctggccttatttgatggattcgtttgga

SEQ ID NO: 49775 - DNA, 313 bp, Heterodera glycines
ttctgcggcgcttctgcagaactatccgcgctgtttggaaagagagcgcctccagcggaatccctccgggtgggaatttgggaagaatcgagcgcaacataacttcatttacagggtcattttttgtcctactataaatgctattgctgcccgagtcacccattactaagatggaattgagatcgaagcgtcagctcctgtcaagactgtccacagtcaactatacagtctgactgatgtctccgccgcttataacattggtcggatgatggctcatcgatgccatatggccgcgattgagcattgcatgtct

SEQ ID NO: 49776 - DNA, 262 bp, Heterodera glycines
  unsure (1)..(262): unsure at all n locations
gtcttctgtcgtctccggccagcgcatcatcatttaccgcgccgcttacttcggctgctgcgacccctccaacatgctcttctctcgggagggcaagcagatgaacttcttcatcaactgggccattgcgcccgtcttcaccgtggcgtccatagttatacactacccgcgggacaccgntcctaaacgtatgatgatttaattgggccgtgaggacttgatggcccaaaactttggggactgtgccgtcaaaatcttcaaa

SEQ ID NO: 49777 - DNA, 487 bp, Heterodera glycines
gggacgtcgtcccgctctttactatcgctgccttaggaacaagccttatcccaagtctcgcttttgttgcggcgcccctgaccctaagagtcgcatttttgacttgagtgggaagcgcggatctgttgacgagtttccttgcggtgtgctcctgatatccaatgtatgggaacatttctcttctgaggctctcgatgctgctcgaatttgtgcgaacaaatacatggtgaacaattgcggtatggacgtcttacacatgagcctccgaatccagccgttccgtgtgattcccatcaacaaaatgatgacctgttctggtgctgaccgtcttcacacgggatggcgctgatcctgtgggaaacccctcgggttgttggcacgtgtctgcatcggtgatatcctgacgacggatcgtgtccgtgactggcatcgcgccctcgctctttagacattccgtcaagcaaagttaatgttccctcgccatcta

SEQ ID NO: 49778 - DNA, 856 bp, Heterodera glycines
gttcaataaagaattttagaaaatggatttgttagaaatcattgcccttaaaagaaaacagattgaggatattgcaatcgaacatgggagtggtgcgaaaatgatcagacattctgatctgtttaagaaagagaaggacgcttatttggagcgacaaaaacagctgggaaaggaacagcacctttctgtcaagggtttaaacaccgaggaacttttggacgcaaagttttcattgaccggctcggattcgatgccgcgtcccgaagttgtgcgtcgattgagggcccgagggcagcccattcggctttttggtgaatccgatgcgatggctttaaagcgattgaggcgtttggaaattgaaaagacggaacaaaatgaggggtggaagaacgactttcaagcggcactcagtcaggtggagaatgaggaactgatggagcaagtgatcagggggaagcgtggaaaagacgaaatgggcagacacgacgtgcaaattgaacagagtgaggatgacgccagctgggaccaaattgtgatgatggcacctttgcttggcagcggaaatgaccaggccgactgcgacctcatccgggcttttctttcctacattttgaaacgctggggcaaagagctgaacgcacgggaagagagcataaagcgaagtgcaacaggcaaaatgcaagcggggatgcacaaacaaacggtggaacatctctccccgctgatgaaatccctggaaaagtacacagtgaacaacgacatccgactgtacttgaccaacattaccaaactttgtgttgtcgaacgcaaatacatcgtcgcaagcactgcttacatggaaatgtcaattggcaat

SEQ ID NO: 49779 - DNA, 852 bp, Heterodera glycines
agcccatgaattattttttattaaatgccgactttaaatctttcatctttcgccccaagacgacttttctcgacgactgcagcgaatttttgttgtcacagcaccattggtttggtggcatcaccaatgccaacagcgactggattcgccgcctatgcccgtttttccaccagcgatgggccgccgtccggcagcagtgcccctcacaacaatcagttggcatcgccaaagccaagtgcggacaaaatggccgagatgggcaatgcggacgaagagttcgacgaaaatgggcgtgagacgcgggaaaggatagggacaattccgaacatcatttgcatgctaagaatggcttccactccgttgctcggctatttggtggtccacgagcagtatttgccgggttgcattctctttgtgctcatcgctttcaccgacattttggatgggtccgtggcacggcacttcccttcccagcggtcgctgctcggcactttcctcgacccaattgcggacaaatttctcatcagcactttgttcatcactctcacttatatgcaactaatcccagtccctgtgactgccatcgttttcggcagggatttgctgttggtgctctgcagcattgtgctccgtttcaaaatggtcgatgctccgctgactgtgcggcgcttttttgaccccaccgtttcgcccatgcgaattcagcccacctcgctgagcaaatacaacacatttctccaactttcgcttgtttctctgagtttggcagcaccggtgttcaactttcccgggcattacgcgctacaaggccttcaattcctaactgttctgactaccgttttctcgggccta

SEQ ID NO: 49780 - DNA, 812 bp, Heterodera glycines
gtccccttaagattattttctcaacaaacttccgcttaatcttcacactttcacgattttcttgtttaaaaaagttgcaacgatggtgaaaccaaaggttggcatcaacggttttggacgtattggacgcttggcattgcgtgcagcgattgaaaaggacactgtccaagtggtggcggtcaacgacccgttcatcgaactcgactacatggtgtatatgttcaactacgactccacccatggccgtttcaagggcaaaatttccacaaacgccggcaatttggtggtggagaaggaggggaagagcgcgcacaccatcaaagtgttcaacctcaaagacccggccgaaatcaaatggggcgaagcgggcgcggaatatgtgatcgaatccccggagtgttaccaccattgagaagggctctgctcatctttaagcggtgcaagaaggtggtcatctccgctccgtctgcggatgcccccatgtacgtgaagggcttcaacaggaacagtacgacccggcttagggacgagggaacaaccatgcctcgtggcccaccacctgcttagcttccgttggcaaagtgatcaacgacaagtttggcttcatccaaaggctgattaccactgtggttgcggtgaccgcccatccaaaaacgggggacggggccaccggcaaacattggccaaaccgaacctgtgcgggccaaaaattctttccgcccacaaccgggccgccaaaggggtgggccaatctttcccggaatttaacgaaaactgaccggatggggttccttggcccattcccaacggtc

SEQ ID NO: 49781 - DNA, 665 bp, Heterodera glycines
accttacattagtccattccatcatgtccaatccgctctcatcttccttcctttgccgcaaatgttttcttcgacccgttcattttcattcacaacaaaagcatggcatttcttcacttttgaaagggaatgccgacaattttgtcgtcgttatgtccaacagttatttggccgaaggatttacggaaacgtttaaatttttgtcttccgtctctctgctcggtccgtcctcctccgttcttctgctcgccgtcggtctccgattggccaccgttccggtgagaattctcaccgaaaaactgacgtctcaacgtctgatgatggtccacttggtgcgcaagcaggtgtacgagaaaattggctcccattatggcattgcgacaacatttgacgcagtgaacggcaaatggacactgaacacgcgtgactcgctcattcggaagagtgcagacgaactgtcagaggaaaatgtcaaacggcaagtcaatgaccagaagttgaccatgtctcggctggtgatgcttcgctactgtttggtccccatttggatcccatgcaatttcggcattctccgatacgtcgaaggtctttttggacaacaaattccgggcttttttgggctcgactcgtttactctcccggaccctttcatggtcttccgcttt

SEQ ID NO: 49782 - DNA, 591 bp, Heterodera glycines
atgctttcaaaaatcacggtggttttggcatttctctgcctgctgttggcattattggtgggcatcgatgctcagcaaagtcaatgggagcagaagcagaaccgtgcagcaccgcgagggttggcaagtgtgacattgcgccggatggacaccgtccgctcgcggctggcagccgccggttcactcgtccaattccgtaagcatttgcgccaggcgctgcgccaacgcttggaccgtctgtacagtgacaaaatggcacgcgcagacgtggcatttgacaccgatgccgcggcaagggaaggcattgacgaagtgttgcgcaattacatggatgctcaatattatggtgacatttctattggctctccaccgcaaaacttcaccgtgattttcgacaccggttcctcaaatctttgggtgccgtccaaaaaatgctcatttttcgacctcgcatgccgctaccatagtaaatatgaccacaaaaaatcgtccacctatcagccggacggacgcgaagtggcaattgaatacggtaccggatcaatgaaaggcttcgtctccaaggacacggtttgcattatggacggtatg

SEQ ID NO: 49783 - DNA, 310 bp, Heterodera glycines
tcttgacattgggccgttgggcggagtgtttctcttggccatggtgctaagggactgtctgttctagaatctcaaccagcaaaacttctaatacgcgggggaggcgaagtatttcggcacgattactcttgacgaggcgactcgcaaacgctgcgagcacttaccatggttcgtcatgttctcctccatcacttacggacgcagaaatgccggacagaccatctactggctggtcgcactctacaatggagtctatcatcggacagcgacgtgcggatggtttccctgctatcgcatccgatggggcgca

SEQ ID NO: 49784 - DNA, 310 bp, Heterodera glycines
gggatagccgaacggaatgagaaccgcgctaaaactgacaaaacatcgccaggagcaccgctggaatgacgagcgttacgagaaaaccaatcgtggaactcggtggaaagccgatccttgcggcggagcctgtatggccaaaggaattgttctcgacaacattggcgacgaagcgaaacagccaggttctgcgattcaaagatgtgtccgtgtgcaacttatcaaagataggagaaagatcactgcttttgttccaaacgacagttgcttgtattgtatccaggacaacgacgaagtgcttgtgtctggg

SEQ ID NO: 49785 - DNA, 634 bp, Heterodera glycines
gtttctgaatggtactaccacactgtactttgtgtacaagccgaagacaccgcaagacaaaggcggcgttattgtggcggtcgattctcgtgcaacgggcggaacttacatcagctccaaaacggtagaaaaaatcattccgatcaacgaccaattggtcgcgacgatggcaggcggagcatcggactgtcattattggacgcgggtggagagcgaatattgtaatcttttcgaacttcgcgagggtactcaaatttcggtggctgcagccaataaatattttgccaatgttatgtaccactatcgtggccaagagctgggcgttcactcgatggtttgcggggtagacaagttcggtccttccatatacgtggtctaagctgaagggactcacttgaatattgacaccatttgctcacgtctgtcgggcatgttacactccatgcacattttggacaccaaatacaatgaggcgatgactgacgcggaagccttggagttaggcagagaaggcattgagtacacgacattccgcgacgcagcttccggtggtcattgcaatttgtgacatatcacttccgaaggacagaccatatacgcgccattcgatgtcggtgataagtattatgaattc

SEQ ID NO: 49786 - DNA, 394 bp, Heterodera glycines
tgccaacgaatctttccagaaatggtccaagcgcctcatggcggatggacaaaggttgctgagcgatgagcttcccgaaaatttacagtgcgcgctgatcttgaaatctggccttatttgatgcattcccttggaaatgtccactctgactgagtaaggatcaagtcgcgaaacttcttttctcattttcctcttctgcctggaccaaattggtgtgctccgttcccccgacaatgaccgagcttccatcttatggattttccatccatatctgaaattagctagacgacttcagagcgagtatcgaatggaaccctgtggatccaaaggagaccctgccattgatgactttcacctttgggctcttctgactgggagagctcggctaattgac

SEQ ID NO: 49787 - DNA, 178 bp, Heterodera glycines
aagcaaaggcaactcgttggatcttctcatcggacatcacaacattgacattgtctctcgatgccatggacttaaccatgcttgccataccgtactggcaaatggccgcgagtatcatttccacctgatgccttcccgattggcctcacaaaaggtgttgaacattgtcggaaacgga

SEQ ID NO: 49788 - DNA, 490 bp, Heterodera glycines
ggaagccttcgttttagaagcatgtcgaactccacttggctctttccgatctcaattgggttcctggacatggacggcattggtctccgaatgcattacaaaattgttgaagagaagtaacgggccggccaaggaaactcatcacgtatatctaagtcaagtttgtcaggctagtggtgccaacgcaccgacaagaccagccgcacttggttccgctttggatgtggcagcggcggtatgtaccgtctccagcgtgtgcaggactggcctaatatccagcatgctggccgccgccataattgtcctgaatcatcagtaattggacatcgggggagagatggaatctatgagtcatgtgaatttctatttggagagaggcaaattaccttatggaggagccaaactaattgatggcattgcgagagatagactgacggatgcttactattcggagcatatgagcgattgtgcggagaggacggcaaaagaa

SEQ ID NO: 49789 - DNA, 628 bp, Heterodera glycines
caaatatcgcatggcagggtccccgcccccgatggctcggactgtgacgacaacgaagctgagccgcgctcaaaaagggcatatctaactgaagaaaaacgcggatgcattcaatatgcatattcccaagaaattctgaagaaaatcactgagaaccagaaacgcctggctgatggccagaaataagcaactttttctcatgcgcaaagcgaaattcactgccggcgattcctctcacatggtggaactaaatgaggcttcccccgctcagaacacactcagaatgaatcgccaaaatgtcgttggagattgtctgcccgtgatccaaccccaccgagaagacggctctgacggagacacctactacctgacgggactcgaccaaggcggggctaactctgagaagctcaagcgctactacaacgacgctggggaactgctggtggagatgcccacgctggccactggctttatcacgctgcacgaggccatcaaaatgaccaatcggcccgagaacactcttgaactcataatcttccctaagactgataacacgcccactcaccttgtcaccgagttcgactagacggaccgcgacgaattctttctcatgacgaacatccgagcc

SEQ ID NO: 49790 - DNA, 670 bp, Heterodera glycines
catccaggtggagttgaccagactgcgcgagctcgacaacgactatccaatcttggacgtggacaccgaatacccccgagacatcgctacggcggcgggtcggttccgcaggaaagaggatgtcaattatctacctgtcaagctccaagtggactgcttgaagctcatccaggtcggcttcactctgatgattgagggggggcaactgcctccctcccgtgtcttttgacacttcattttacacttcgatccgagcatcgattcgttcgcgcacaattcgctggaactgctcccaactgaggcctttgacttcaactaacaccatactgagggcatcctattggaggactgtggcgagctgctgaccacttccgggctggtggctgatcggcgcatcacctgactgacctttcacagctgtttcgactacggccacctcatcagggccattatgctggtcaaactgcccgaggacgaccaagacttcttccgctaccatcgcaaattgatcccgaaccgtttccacttcgagattctgttgcgactgaccgggtcgcgcgacaccatgctcaatggccgacttcaggagctggccgaccaactgcacgtcccgcgcattgccacatgccaccaagtcggctcggactcgttgctcactgcgatgactttc

SEQ ID NO: 49791 - DNA, 403 bp, Heterodera glycines
ttcccagcaagcgataactaagaagcgtaaagctgtgcaatacggaattttcagagccgaattatacaactttctcatgaaagagatggactaggaaaagaattcccgtgtctaagtgcctaatgcaccttcccggactgaactgatgctcatggggacccgcacccaatgtgtgctcggatagcgcgggcaatgcatccaccaactgtgagctcgcgtgcagaaatggcttgggtattcctctgaacaaattgagctctatgacgagaaagtgtccagccacgatctttgcgcggaggccaactgtgaccatttgcgaatcaacttagtcggggggctccacgagggcatgcgggctactgcgtgctgctcttcatcgtggaaagtaatgacagtgggtgct

SEQ ID NO: 49792 - DNA, 706 bp, Heterodera glycines
caacattcgtggatcaaaggctgatgcggatgcggtgctgacgactcttgggcctcgggcaatggacataatgatcctgtcgggcgacagaaaagtgactattacccacgatggggcaactattctcaaccacatgtcggttgtgcatcccaccgcaaaaatgttggtcaagctgtccatggcacaagacattgtggctggcgatggtaccaccactgttgtggtgttggccgggtctttattggacgctgcataaaaacttcttgccaaaggaattcatcctaccaccatttccgactcatttcaacgggcggccacattttctgaaacagttctcgaggaaatggccacacccattgacattaacgatgacgacgagttggtgaagctcaccatgacgagtttgaactccaatgtcgattctcaatattcccatcttttgacaccaatggcggtgccggcagtgaagaaactgatgagttcaccggaggactcaagtgaccatctgaagtagattaaaggcgataatcagttgggccacacggtggacgagtcacagctcattgatggggcgctgatcgatcacaaatcgatgggccactgaggtcccgcgcaggtggagaacgcgaagattgggctcatccaattcctattctcaccatgaaagcctaacatggaaaatcaagtggtcatctctgactatgct

SEQ ID NO: 49793 - DNA, 826 bp, Heterodera glycines
ggaaaatccttaaaatggcgcaagcagttgctgctgttgctcccgcacccatgaaaacgcagcctcggctcaggcaacccaaccgcaggttatggcaccatcctatccgttggcttctctctatgtcggcgatcttcatccggatgtcactgaggcaatgctctttgagcggttcagcaatgctggtcctgtgctctccattcgtgtttgtcgtgacgcgatcactcgtcgttcgcttggctatgcctatgtgaattttcagcagccggcggatgccgaacgtgctttggacaccatgaactttgatatgatcctgaacaaaccgattcgcatcatgtggtcgcaacgtgacccaagcattcgtcgctcgggtgctgggaacattttcatcaaaaacttgggcaaggaaatcgacacaaaggccatctacgacaccttttccatgtttggaagcattctgagttgcaagatttccactgacattgatggaggaagcaaaggatatgggttcatccattttgagactgaggaagcagcgaacagtgcaattgcaaaagtgaacgggatgcttttggatgggaagaaagtgtttgttggaaaatttttgccacgttccgctcgtgacaagcaaattggtgatccgtccagtcgtttcaccaatggttatgtgaagaattttggtgatgcaatgaattcggagaagctgagcgaagtgttttcacagtttggcgaaatcatcagtgcaaaggtgatggagggatgacagcggcagtccaagggggtcggcttcgtcgcctacaaggaccctgaaagtgctgcgagggcg

SEQ ID NO: 49794 - DNA, 546 bp, Heterodera glycines
tacctctaaacttaaacccccttttgccaaaacgcaccggtctcgcttctctttgaactgtgggtcaacggtgttgtaacgcacatgctcgtgcagtttgtctgcaggaatgcgttcgtttgtcagcggcgaaattatgtacttctccgtggaggcagccgcagttttggacaccggaccaccacgcgctgaaaacaaataaaacaaagaattaaactcatcggaaatcaaaaatattaacagttaaagttattgagttgacaagtcctcgtaaaattaccagaagtcaagcattaaatattgtaaaatacccacattttttagggtcgtagtcgcggatgattactctgccggcggtcggcgccgcgggtgccggttgcgtcagcgttgagccggtgtgttgcttctccgccccgatgttcaagcgttggtgcagttcgccagccgcatcctccgccgcttcgattgcggctcgttctttggccgtttcctcgtcacccgactcggcgccgccctcctcgtccgactcgaccttagcgtgggggg

SEQ ID NO: 49795 - DNA, 397 bp, Heterodera glycines
ggatgaaagtgtttcggcatcggctgctgcaattcaggagagagaacgccgtgaacgccttctgacgatatcggacgcaatgaagttttacctggagaggaagcatgaccacatggccattctggacaaggagaatttgctgtacacgcagggaaagcgccacttggccaacattatgggcttcaatcccgactcgatcattggggaccaaatatcgcattccatccgttatttgttccccagcggcctattccacaatgaagcgctacccgtgatgaaacccccggaggaagtgttcccgaaaatcgtgaagattgacgtggactcctccggctctccgaatcattcgctgtttttcactgccgaacccaaattctattctttgctttcggacata

SEQ ID NO: 49796 - DNA, 265 bp, Heterodera glycines
  unsure (1)..(265): unsure at all n locations
tgggagagccagcatcactgacattgaattcgggccgtattatttgggccnttaattgggcgcttgcacttcctctggtcgactgatcatttacgaagctgaggacattatggcattggacaattggaacgttctccacgactatgaagtgagaaagaatcggcttagttccctttggtggaggaaaaatggatttgacgctcctcatattgttgtctcgtttgatgatgtcgatgctgctccagcagagaaagtgttcgttttt

SEQ ID NO: 49797 - DNA, 579 bp, Heterodera glycines
tagaagcaccaatcccaaccagacttaatgtgcgacgaagaagttgctgctctcgtggtggacaatgggtccggaatgtgcaaggccggtttcgcgggcgatgacgcgccccgcgcggtgtttccgtccattgtgggccgcccccgtcatcagggcgtcatggtcggcatgggacagaaggactcgtacgtgggagacgaggcgcagtccaagcgtggtattctgacgctgaagtacccgattgagcacggcatcgtcaccaactgggacgacatggagaagatctggcaccacaccttctacaacgagctgcgtgtcgccctctatgagcacccggtgctgctcacagaggccccgcttgacccgaaggccacagagaaaagatgaccccaatcttgttcgagacgttccacccgcccggccatgtacgtgggccttcaggcccggctggtcctggaccgcctcgggccgtacaaccggtcttcgtgttgaactccggggatgggggcaccccaacccgggcccctcaacaaggggtatagccttgccccaagcattctttcgtttggatttggcggg

SEQ ID NO: 49798 - DNA, 832 bp, Heterodera glycines
gaaatcgtaaatgaaggcggtcttcctgggcttgatgatcagacggcttatcgaagcggagaagggcgtttgcgaggcggacgatcgcgatttttacggaaacaaacgcattgagttggctggatctttgctttctctgttattcgaggaccttttcaaaaggttcaactccgaattgaaacgaattgccgacagtcacctcaaccgaaatatggccgctccgctggacatcgtacgacacatgcgccaagatttgataacaaatggtcttgtcaatgctcttgccactgggaattggacaattaggcgttttaaaatggaacggcatggcgtcacgcaagttttgtcacggttgtcttacatcagtgtgttgggaatgatgacgaggatcaattcgacgttcgaaaagacacgcaaagtgtcagggccacgttccctgcagtcttcgcaatggggaatgatttgtcccgccgatacgcccgagggcgaatcttgcggtttggtcaagaatttatcgttgctcagtcacataaccacggacagcgacgaagcgcccattttgcaacttctctacaatttcggtgtccaagacgttcgtccgttgaaatttagcgtcgttcatgaaagacgttatcacatcgttttcctcaatggttccattggcggaattactgatgacgttgaaaaaatcattggcacggtgcgactgatgcgccgaagagggaatttggggtgcctttgtctcgggcggtttcaacaccgccacaaatgcgctgtatttggccaccgaggggggcgactctggccgccctatggcatcgttgaaaatggg

SEQ ID NO: 49799 - DNA, 547 bp, Heterodera glycines
cgaagaagctgctgctctcggggcggacaatgggtccggaacgagcaaggccgcgttcccgggcgacgacgcgccccgcacggcgcttccgtccagtgcgggccgcccccgccatcacggactgatggccggcatgggacagaacgactcgtacacgggaaaccatgcgcctcccaagcggggtactccgaccctgaagaacccgattgagcaccgaagcgcctccaactgcgacgacgtggagaagagctgggaccacaccttctactacgagctgcgtgacgcccccgatgagcgcccggagctgctcacaaatgccccgctgaacccgaaggtctactgagaaactacgacccaagtcatggacgagacctacaacactccggacatggacgcggccatacaagccgtgctggccctgaacgcctccgggcgcaccaccggtctcgcgtaggactccggcgatggggtcggcctcagcgagcacatctgctagggttacgacctgccccacgccatccacggtatggacttggcgcgccgagac

SEQ ID NO: 49800 - DNA, 665 bp, Heterodera glycines
cacttctctcttaattctcttcccttaatggtcctgctttttctccaattggcactgattttgctctgttcggtgtttgcttttattgtaatgatgcgcaaacatcgcaagtactggtccaaccgtggcattccgtccccaaccccgcagctgatcagtggcaatttcggctcgctgtacggcgattatccgagcatgttccagctgcgggattggaccagacagtacggcaagcagtacggtgtccagtacggttggcgcaacgcgttggtgatttcggacccggcattggtccacgagttgctggtcaccaaatttgaatatttccacgcaagaaatgttggcacttttgtttttgaaaattcttttttggtttctctgctttttgtcccttggattagcttacgccaatctttggcaatactgacacaaacaaatggatcagcatgttcttggccaggggaggccggtggaaaaggctccgaatgattgcgaacccggcattttcggtagcgaatctgaaaaagtgcatgtgtctcattgacgattcagttaaaaatgccatcaattttctggaaaaagcgcgcaacaaaggcgaatcctttaacattcacaggcatttcgtagaaatgagtttcgatgtgatcgcccgcgtggcgttgggg

SEQ ID NO: 49801 - DNA, 634 bp, Heterodera glycines
gtgctacgaacaagttgctgctctcgtggcggacactgggaccggaatgagcaaggccaggttcacgggcgatgacgcgccccgcgcggtgattccgtccattgtgagccgcccccgtcatcaaggagtcatggtcgacatgggacagaatgactcatgcgtgggagacaatgcacagtcccagcgtggtattctgacactgaaatacccgattgagcacggcatcatcaccaactgggacgacgtggagaagatctggtatctcaccttatacaacgaactgcgtgtcggcccccatgagcatccggagctgctcacagaagccacgctgaacccgatggccaaaatagaaacgatgacccaaatcgtgttcaagacgttcaacgcaccagccatgtacgtggccatccatgccgtgctgtctctgtacgcctccagccgtaccaccagactcgtgttggactcaggagatggtgtctcccacaccgtgaccatctaagagggatacgccctgcgccaaggcatcctccgatgggacttggacggccatgacctcactgaataactgatgacgattctcactgaacgaggttactccttcgtgaccacggccgaacgtgagatcgcacgtgaa

SEQ ID NO: 49802 - DNA, 888 bp, Heterodera glycines
  unsure (1)..(888): unsure at all n locations
attcttcttttagtaaaaatgtccgagaataagtccgaaggtggcgctgcatagaagagagcgttggattcaacacgaagaagtttttgttggacctcgcatccggcggaactgctgctgcagtctcaaaaaccgctgttgcacccatcgagcgtgtcaagctgttgttgcaggtgcaagatgcttccattcacatcaccgcggacaagcgctacaaaggcatcatcgacgtcctcgtccgtgttcccaaggagcagggctttctgtcgttgttgcgtggtaacctggccaacgtcatccgttactttccgactcaggcgctgaacttcgccttcaaggacacttatgattttttcttcacgcaaggagtggacaangagaagcagttcttgaagttcttcgccatgagattggcttccgggggtgccgctggcgccacttcgctgtggatggggtgacctttggactttgcggggacgggtgtgggaggggatggtgaaaaggccgatggccgtggggtcggaggttggtcgggcggcggcggaaggggctggggggggaggggcgcagtcggggcggggggggggtggggggggggggggcccggcgggggggtggagcgggggggcgggagtgtggggcgtggggggggggggagggggggtggtcgggcggagggggggaggggaggaggcgtcggcggcgcggtggggcgggtcggcggagcgccgggcgtggggtggggcgggggcgtttctgcgaggcgggggggcggggcggcgcgggcggcgcgtgcggactgcaacggcgggccgcggcccgggggggcgtgcggggggcggggcctgggaatggccccggggcggaagggcggccgggggggcgggg

SEQ ID NO: 49803 - DNA, 223 bp, Heterodera glycines
gcttactacccacgggagtctcgaacactctgactgtctattaatggttgacaatgaagtcatctaccatatttgtcctcgaaatttggaggtggaacgctcttcttacaccactttgaagcgtttgatttcataagctgtctcttcgatgaccgcttaacttcgatgtgatggcgctttgaatgtccatctcactgaattccataactgtcttgtgccttat

SEQ ID NO: 49804 - DNA, 538 bp, Heterodera glycines
  unsure (1)..(538): unsure at all n locations
anncgcgggagaagacgcgccccgcgcggagganccgaccanngngggccgcccccgncancagggcgncagggncggcaggggacagaaggacgcgnacgngggagacgaggcgcagnccaagcggggaanccngacgcngaagnacccgagggagcacggcaccgncaccaacggggacgacanggagaagagcnggcaccacacccnccactttttttttgcgnngccgcccccgaggagcacccgtgtgctggtcacagaggccccgctgaacccgaaggccaacagagaaaagatgacccaaatcatgttcgagacgttcaacacgccggccatgtacgtgggcatccaggccgtgctggtcctgtacgcctccggccgtaccaccggtctcgtgttggacttcggggatggtggcacccacaccgtgcccatctacgaggggtacggccctgccccacgccatccctcggttgggacttggccggggcgggacctcactggactacggatgaagaacctcgacgggagcggg

SEQ ID NO: 49805 - DNA, 424 bp, Heterodera glycines
gactgacgatgacactctcaaatattgggtgtgcgactctcacgtcggaccccacaatatggactaccagatggatcattatgcgtggatccctctatcaaacgggattcacatcctcaacattccccaaacgagggagagactgttgctcgccatccgtgccatctcggccattgaaaatccctccgatgctgtggatggctctgctccacccaacaccccccgccctatgctcccgctcgcctgtcacatctgtgccactcccatcggtggacgcttttggcccggctcattgaccaaccgaagtctaatgaatttcttggaaccgcggatgctcgcgatgggccacgactctttgtaccacaaggagaaccgagaggtcccctacatcaaccatccgatacttacactggtcgacacggac

SEQ ID NO: 49806 - DNA, 565 bp, Heterodera glycines
  unsure (1)..(565): unsure at all n locations
agttnnngagattaaantgttngggaagtggtntnttaatgangtggangtgtnngaaatttnantngtggattatgttgnggtgaaagaaaagggggnnaaatatttgnngnanagngnnggtngttaanagnagaagngtttnngtaagggganntgtnnggtggtggaanggttggtntngtnaatgatgatgnangggttgaataanggnaagaaantgatggnggtgngtattgtgaagnatgnnttngaaatnattnatttgntnannggagagaannnngtnnaagtgttagttaatggtgtgatnaanagtggacctngngaggattnnaagngtattggnngtgngggnanagttngtngaaaggaagtngatgtgtngnttttgngtngtgtnaatnagggaatttggttgntttgtannggtttccgggagggnggttttagaaanattaaaaagatnggggaatggtttggggatgagttgatgaatggngntaaggggttnaagaatttntaagnaattaaaaagaaagaagaattggaaggggtgggnaaa

SEQ ID NO: 49807 - DNA, 806 bp, Heterodera glycines
ttgagctttacataggattaagaataaattgctaatcacagattattgcttatgattagttgctgttagatgaaaattgagcataacaaattcatactcaacaaacaaacaacaaattgtacaacaaaaaaatgtcaagcgatgatcaatcagacaaggagtgccctctttgcatggaggccttcgacattgatgacatcaacttttacccatgcaattgtcagtatcaaatttgcagattctgttggcacaggatcaggacaaatgaaaacgggttgtgcccggcttgccgccagtcgtaccccgaggacccggtcaattttcagccgttgtccagcgccgatgtgcggaagatcaaaagtgagaagaagcagaaggtgcagcagcagaagaacaaagtggtggagagcaggaagcacttggctgagtttcgggtgctccaaaagaatttggtgtacgcggtagggctcagccatcggatggcggacccggagctcttgaagaaacccgaattctttggcaagtttggcaaaatcatcaaaattgcggtcggcgctgccccggccatcaacagtgctcagcccgcggtgcacaccgcgtacattacttacacacggagcgaggacgcattgcgcgcaattcacgcggtcaccaacatgatggtggagggccgctttctgaaggcgtcgcttggcaccaccaaatactgctccaatttcttgaagggacaagcgtgccataagccggaatgcatgtatttgcatgagggggccgaggaccagatcagcttcaccaaggaggacatg

SEQ ID NO: 49808 - DNA, 127 bp, Heterodera glycines
gagcaaccaagaaattgctgctctcaaggaggacaatgggtcccgaatgtgcaacgccggtttcacgggccatgacacgccccacgcggtgtatccgtccattgagggccgcccccaccatcagggc

SEQ ID NO: 49809 - DNA, 806 bp, Heterodera glycines
ctggacgttcagtggcggagctgaaacaacgcatcgacgagttaactccttgaggggagaacacgcaacgtgagctgcgaggcgcactcgccgagcttcagaagatgaagcacctgtacgagaaggccgtcgagcagaaggaggcacttgcgcgtgagaacaaaaaactgcaggacgacttgcacgaggccaaggaagcgcttgcggacgccaaccgcaagctgcacgagctggacctggagaatgcacgcctggcgggtgagatccgtgagctgcaaaccgcgctgaaagaggcggatgcggcacgacgcgacgcggagaaccgcgcgcaccgtgcactggccgagctgcaagcgctccgcattgagatggaacgccgcctgcaggagaaggaggaggagattgagaacctgcgcaagaacatgcaattcgagattgaccggctgactgcagcgcttgcggacgcggaggcccgaatgaaagcggaaatttcacgcctgaaaaagaaataccaggccgaaattgcggagctggaaatgaccgtcgacaatttgaaccgtgccaacatcgaggcacagaagaccatcaagaagcagagcgagcagctcaaggtgttgcaggccagcctggaggacacgcagcgccagttgcagcaaacgctggaccagtacgcgcttgcccaacgcaaagtgtccgcactggcggcagagctggaggagtgcaagactgcgctggacaatgcggtgcgcgcacgcaagcaggccgagttggacctggaagaggcgcacggacgcatcaacgacctg

SEQ ID NO: 49810 - DNA, 478 bp, Heterodera glycines
  unsure (1)..(478): unsure at all n locations
tgctgctctcgtgggtggacatgggtccggaatgtgcaaggccggtttcgcgggcgatgacgcgccccgcgcgggtgtttcggtcatttgtggccgcccccgtcatcaggncgtcatggtcgggatgggacagaaggactcctacgtggaaaagaagggcaatccaagcgtggtattcttgaccttaatataccgaatggagaacggatctgtcaccaattgggacaacttgaaaaaaattttggaccccccccttttaaaacaaatttggtgtcgccccccaaggaacacccgggggttttttcccaaagcgccccctttaccccgaagggcccacaaaaaaaaaattacccccattctgttttgaaaaattttcacccccccccctctttaattggcgccttcagagcggggggtttccgtgtaacctcccgggcggacaccccggttccctgtgaacacccccgaggatggtgtc

SEQ ID NO: 49811 - DNA, 744 bp, Heterodera glycines
gtgcgacgaagaagtggctgctctcgaggtggacgatgggtccggaatgtgcaaggccggattcgcgggcgatgacgccccccgcgcggagtttccgcccattgtgggccgcccccgtcatcacggcgccctggtcggcatgggacagaacgactcgtacgtgagagactaggcccagtccaagcgtggtattctgacgctgaagtacccgattgagcacggcatcatcgcccactgggacgacatggagaagatctggctccacaccatctacaacgagctgcgtgtcgcccccgaggagcacccggcgctgctcacagaggccccgctgaacccgaacgccatcagagaaaagatgacccaaatcatgatcaagacgttcatcacgccgaccatgtacgtggccatccaggacgtgctgtccctgtacgcctccggccggaccaccggtctcgtgatggactccggcgatggtgacacccacaacgtggccatctacaaggggtacgtcctgcaccgcgacatcctgcgtttggacttggtcggccgggacctcactgactacctgatgaatatcctcactgagcgtggccactccttcctgaccacggccgaccgtgacatcgtccgtgacatcaacgacaaggtgtgctacgagacactctacttcgagcaagaaatggtcaatgccgactcctcctccgcggtggagaagagctacgaactgaccgactgccaagtgat

SEQ ID NO: 49812 - DNA, 765 bp, Heterodera glycines
aaataccgtcataggcgacagaacaattattcctctctacttttggctcttggagctgcgtcaatgtcttctatatctacattacgtcgccaagtgaagaatgtggcctgcaattacactgatgcacaagtaaaagttagagaggcgaccagcaacgacccatggggaccaaccacagtgctaatgtctgaaatcgcagatttaactcacaacccagtttcattcaccgaaattatgtctatggtttggaaaaggctaaatgaccacggaaagaattggcgtcatgtgtacaaaagtttggtgctccttgactatttgataaagtgcggaagcgagaaagtgtcagctcaatgccgcgagaatctcttttcaattgagacactcaaagatttccaacacatcgaggacaaccgtgaccaaggattgaatgtgcgtgcaaaagccaaacagatggtcgctttgttgcaggacgacgaaaaattgaagaatgagcgagcccgttttttgttgactcgaaagcgcttcattcaaaacggatcttctgggatttcatcggacggttcgagacgatctgttggaaggagaaacatcgaaacaggcgcaacggatcctgaatttgaagaagcgcggccgtcttcccttggagaggaggaaatgcaactgcaaattgcattagcactttcaaaggaagaatgtgaaaaggaacgtgaactccgtcgaggtgatgacatccgcttgcaaatcgcaattgaagagagcaagcgt

SEQ ID NO: 49813 - DNA, 784 bp, Heterodera glycines
gtgtttccgttcaatcaaactatttttaaaacccaaataggggttcaatcttacaattttggaatttatgaaagtgtcgtcgaaaaaatgctaaaattggcacgattttgtggatcagcggtcgcaaatgtagggacaattcttaggaggacgaagaaaaaaaaaatcaaaatccccgaatttccggaagaatgatgccgaatattttaaatggttgataaaaaaaatgtttttcgaccgtttacaaagctgaaaattttaacgcggaatgaattcctcttctcccgttggttatattccgctgctctaccgagacaggccagaatggcgagacgtgaccccaatttacaacagtgctgaggagaatgccgttgtccgaattgccaccagcgaggaatttgacgatgcctttgcgtatttgcgtgccgtaatgaatgccaatgagctcagtgagcggacactcgaactcacacagacatgcattgcacaaaaccccgcaaattattcagtttggttatatcgccgtgccattctgcgcgctttgaacaaggatgtgagcgaagaactgcgctactgtgaggagatcatcattgaaaatccgaagaactaccaagtttggcacaatcgtaaaacattggtggacgagtcgggcatttacgctgctgaactgccattcattgcccagcaattgcatgacgagccgaagaattaccacgcatggcaacacagacaatgggtagtccagcggttcgacctgttcaacgagcaggagatggattttgca

SEQ ID NO: 49814 - DNA, 223 bp, Heterodera glycines
agaagaagagcgctggattcacacgaagaagtttttgttggacctcgcatccggcggaactgctgctgcagtctcaaaaaccgctgttgcacccatcgagcgtgtcaagctgttgttgcaggtgcaagatgcttccaatcacatcaccgcggacaagcgctacaaaagcatcatcgacgtcctccgtcgtggttcccaagagcagggctttctggcgttgtgg

SEQ ID NO: 49815 - DNA, 739 bp, Heterodera glycines
gttatccatgcagttgtgactgactgttttttgttaacaaaagtgcactttactacacactttagccacatttatttcttgttatgatggccatggaagctcagcaacaattagcaattaatggtgccattttgggaatgccgaaaaatgaacctcaaacggtgcttcgatgagtaagcctgacttggattatttgtcccaactgctcaaggacaagaagcagctcagtgcttttcccaacatttttgcgcacgtcgaacgccttgtggacgaagaaatcaacagagtccgcgtgtccattttccagtgcgagttcagccatgagccgttgcaattgcccgagcccattggcgaagtgaccgttcgccaggagaaagtgttcgtgcccgtcaagcagtacccggagtataatttcgtcggtcgcattttgggcccgcggggaatgaccgccaaacaattggagacggagacgggctgcagaataatggtgcgcgggaagggctcaatgcgggacaaaaagaaggaggaaatgaaccggggaaagcccaattgggagcatctgagcgaggaattgcacgtgatcatccagtgtgaggacgcgccaaaccgtgccgaagtgaaaatggcacgtgccgtggaggaagtcaataaattgttggtgccagctcccgagggcgaagacgacttgaagaagaagcagctgatggagttggccatcataaacggcacttttcgcagc

SEQ ID NO: 49816 - DNA, 634 bp, Heterodera glycines
  unsure (1)..(634): unsure at all n locations
gcggctccnnggagccgagcagcaacaacgagaacntcgtcagcggcccgcggaaagcaaggcccaacggcgcaaaacagccggagaggaagcgcaccaccaaacgccaacgcccgcgagggggcgccccccacgagagaagagccacaaacggccaaaaggagaatttttttttggcatcgccgtccttaggccttctcgagagaatcatcaaaggagtgccggtgggagagatgaggtacagcgtcgagtctccccgacgcgagctgttcagcgacacgatggactgcagatgctccaaaaagtacacttccgttgatgaacccgtacatgcactcggcctcagcgtcagcaccatttctccgcttgcagggatttcccttggcattacaattgtgcccgcctcacaatgaaagggcaggcggtgccgatttatacacctttgccttcagaacaatttctgcgggcgtcgaggcacaacaaaagcgaacgaatgaatgtactcgaaaaggactccgttcagttggcacttgaagtgggagaaactcgactgccgcgagaccaaatgccgtttgatgtattccattccagaagcggcaattcccggacacgaccatcgaagagagaatagcga

SEQ ID NO: 49817 - DNA, 748 bp, Heterodera glycines
gtgccacaaaaaatgctctgctctcgtgggggactgtgggcccagaatgcgcagcgcctgtctcgcgcgatatcacgccccccgcgcggtgtttccgtccattgtggcccgcccccctcatcggggcctcgtgctcggtatgacacaaagagactcacacgtgagacacgacgcgcactccaagcgtgatattctcactctgaaacaccatagtgagcaccgtctcctccccctgtgagaccatgtagaaaatatgtggcaccacattttctaccacgatctgcgtgtccccccagaagagcacccggcgctgctcacagacgcccctctgaacccaagggcccacagaaaagatatgacccatattgtgctcgacactctccacaccccggacgtgtacgtggacatacagggcgcgctgtctgtgtacctctccgggcataacaccggtctcgtgttacactccggatatggtgtcccccacagcgtgcctatatacgaggtatacgctgtgccacacgatattctccgtttacacttgcgcggccgagatctctcagactaccagaagaagattctctctgagcgtggacactccctcgagaccacccgcgagcgagatatcgcccgacatctcagagagaatgtgcgatacgtggcactacacttcgaacgagatatggacagtggcgtcttcttctcctctggagaaaagatctaaaatgtgcgccagcgacaagtgctcacc

SEQ ID NO: 49818 - DNA, 318 bp, Heterodera glycines
gagttctttaaatttttcctccattgcttccatggacaatttcgcgagtgtttacaggcatatgctcgctggacagttggtcattcgtctcgtctcttttctcctcaatttcgctcttttacgcctcgtcgacccttcccttttgggctttttcaatgtgaaaatgactttgctttacaccaccatttgctttctttcccgtgagcccatccgccggctctgtctcagttccgattttccgctccacaaagtgccgtcctacgcttctctaagtccagtccgctgttcgccttggccaccctttccctctgctgtgtc

SEQ ID NO: 49819 - DNA, 526 bp, Heterodera glycines
gaagatgaacgacgtttccgcgccagataacgagaacgtcgagcagaagtctaccgtgtgccgcgcgcacaagaatagcgagcgccaggctgagctgaaacgtcattactagcactacaaaagatgagcgcatccagcgttatcagggactgatctgtacgtacacaacctgcaccataccctcaatgatgagacacttcgaagcaattatgaatcctaccgacacctcccaagtgctaagggtatgcgcgatgaacatggccgctccgaacgattcggttctgtgtgcttcgaaagggcggataaagcaaccgacgctgttgtggaaatgaacaacaaaatcatcgaaaacgaaccgctttacctcgcgcttgctgcaacctgaagaagaccgcacagctcaactggcctcgcaggactgcagcgcttagccgcgatgcgcatgcacaaccctgctggcctcatgctgacaatgtatgcgcctgccagcgacggattcttcctgccacaggccatctacaaccaa

SEQ ID NO: 49820 - DNA, 720 bp, Heterodera glycines
gtgcgactaagaaattgctgctctcgtggaggacaatgggtccggaatgtgcaaggccggtttcgcgggcgatgacgcgccccgcggggggtgtccgaccattgtgggacgcccccgtgatcatggcgtcatggtcggcatgggacagaaggactcgtacgtgggatacaaggcgcagtccaagcgtgggattctgacgctgaagtacccaattgagcacagtatcgtcaccaactgggacgacatggagaagatctggcaccacaccttctaccacgagctgcgtgtctcccccgaggagcacccggtgctgctcacaaatggcccgctgaacccgaaggacaacagagaaaagatgacccaaatcatgttcgagacgatcaacacgccggccatgtacgtggccatccaagccgagctgtccctgtacgcctccggccgtaacaccggtctcgtgttggaatccggcgatggtgtcacgcacaccgtgcccatctacgagggttacgccctgccccacaccatcctacgttgggacttggccggccgtgacctcactgactacctgatgaagatcctcactgagcgagggtactccttcatgaccacggtcgagcgtgatatcgtccgcgacatcaaggagaagtagtgctacgtggcactcgacttcgagcaggagatggacactgccgcctgctcctcctcggaggagaatagcta

SEQ ID NO: 49821 - DNA, 388 bp, Heterodera glycines
gaacctttctgctctcgtgggtggaacattgggtccgggaatgtggcacggccgaatttcgcggggcgatgacgcgcccccgcgcgggtgtttccgttcaattgtgggccgccccggtcatcaaggggtcatggtcggcatgggaaaaaagaaccctacgtggaaaacaaggccaatccaaccggggattttgaacctaaataacccaattgagacgggatcgtacacaatgggaaacaaattgaaaaaaattggacccaaccttttaaaaaagaagtgggtgccccccccaagaaaaccggggcttttcaaaaaggcccccgttaacccaaagggcaaaaaaaaaaaaataaccccaaatttggtcagaaaatttaaaaacccggga

SEQ ID NO: 49822 - DNA, 247 bp, Heterodera glycines
gtgcgacgaataagatgctgctctcgtggcggacaatgggtccggaatgtgcaacgccgggttcacgggcaaagacgctccccgcgcggtgtttccgaccattgtgggccgcccccggcatcaaggcgtgatggtccgcctgggacagaaggactcctacttgggagactaggcgcactgcaaacggggtattctgacgctgaagcacccgattgagcacggcatcatcccatctgggacgacatgg

SEQ ID NO: 49823 - DNA, 667 bp, Heterodera glycines
ggaggcgcccagcgccaccatggagaccaaagtggcgggcggcggcgctgcgccgaagcgcgtctggcgctggacgttgtcacagctgcgccagacggacggcatcatcccgtcccagggcggttggaacaagggagactcgcagaagctgatgaccaactttggtacgccgcgtgacaccaccaccaaagtcaaagtggagaatctggccgagattcgggaggacattttgctgaaaagccacggggaggtgcgtctgcagtccggtaccaaccggttcgcctcccacaagggctttgattcgatcggtaccggacgtgatgtgtgtcgtgaaggtgtgaatgtgaacatcctgccggccgacttggacccgctgccggaagagacaatccgcgccagtgactggattgtgcgtctgcacgccggtgcgacccgattctactcgcagaaaggtgtgaccctgttcggtaccggacgtcctgagaccaccagaatgaaggagagcacgcacccggagtactctcacgagcgcgacattgacaacacggagattccgcttctgatggggacgaacaaattcgcctcgcataatggcatgactggcttcggctcaaagcgtcgtgagaccaccaaaatgttggacacctcgcccccggagtacagccac

SEQ ID NO: 49824 - DNA, 412 bp, Heterodera glycines
tcccttcagttcaatcgcccaccgaccctttgtaccctttccccggtatttgaagaacgacggccaatcaaatgggaaaccgcggcttgatctgaacgtggagaaggcgtgggctctcggatacaccggcaaaaacattacaacggcgataatggacgatggggtcgattacatgcatgccgatctccgcttcaacttcaatgccgaggcgagttacgacttcagctccaacgacccttacccgtacccgcggtacaccgacgattggttcaactctcacggcacgcgctgtgcgggagagatttcagctgctcgcgacaacggaatttgcggggtcggcgttgcctatgacagcaaagtggcagggatacgaatgcttgaccagccgtacatgaccgatctgatcgaagcc

SEQ ID NO: 49825 - DNA, 727 bp, Heterodera glycines
gtgcaatggccgtttcgcgagcgatgacggaccgcgaacggcgtgtccgtacactgcgggacgcccccgcaataaaggcgccatgcgccggatgggacaaaaggacacaggcccgggacaataggcccaccccacacgtgcgattccgacacggaaaaagccaaatgagcaccgcatctacaccgactgggaccacgtggaaaagatgtggcaccacctcttctacaaccagctgcgtggaacccccgaggatcacccagagctgctcacaaaagacccacataaggctgagggcagcacaaaaaagagaaccacagtccagtacgagacaacgcgcactccggccatgaacggggacataccggccatgctggcgatggaccactacgggcgcaataccggtaaccagttggactggggccaaggtgtcgcacagaccgagaccagaaaccaaggtgaagccccgcatcaagacatccaccgtgaagactcggccagccgggacaacactgaatacaagaagacgaaccgacacggagcgagggactcgttcgtgaccacggccagactgcgagatcgcaccagacccccggacaagatgtgctactagggggtccacttcgagcaagaattgggcaaagtgcgcgccgcaccctcgctggagaatagctcacaaccgcccgactgtgaattgatcaccgacagcaaagaccgcttacgtggtcca

SEQ ID NO: 49826 - DNA, 727 bp, Heterodera glycines
acagcgcttctgcatccttgcaaattcgccgctatcgctgattgcagcatcgttggccactaaggatttattcgctctggcatcgaaccactccacgacgtacgcgaagcgtccaatgcaagcaaaacatgccaattcggcgaccagtggtaaaatagccaaaaatattgcataacatatggagggaaggattgacctcagttaggtgaataatgtcgtcaacagccatattttgggatttgagaacgactaagtgtcgattaatgttgctcccaaccaactgatgcatgagacaccagcccaatatattccaattcgctggttgaaatggctgtgtatgagaccaaggcacaccatggtaactctggtgggaaacagcagtactttgtcggagaagttgaactggcccgagaaacgggcgatgacacgggccaaagatcagggggactgcggctcgtggtggacattcaccgacaacggtaccattgagggagcattgggatagaaaaccgcctcgaagagtatttcatagtccgaacgaaacctggtcgacagtgcgtccaagtacggtaacaagggctgtgacggcggactgatggacagcgcatttgaatatgtgcgatacaacgaggggttggacacagatgaggcctacccgtaggaggccgaaacgggcaaatgccgatgtcaaaatgagaccgagggcggaactgccgttaggttcaaa

SEQ ID NO: 49827 - DNA, 601 bp, Heterodera glycines
gaacttgcttataaggtatcatgaagacaaggtcctccagtttgtgtccttcacacacgtcatcgttgacacggaacactcacctgatttgtctgagttccaactgagaacttggagataggctgtgacatgatctaacttgatgctgcctactcctacctttatatcggactgccacactgtgggagcttaccgtcagaaaattgaccatttgttcaacaaatatgcttgcgatggggacgacgaagcgcataaagctggacccgatcggatctgcccctatgggatggtgcttttccttcatgacttgtacatcactcctaccattccggcagtgatggttttggcgtggaaattgcgtgcccacaaacggtgcaaattcacactggacgagttccatcaccgtattgccacactgattcccaccggtgcggaggacataaatcgactgcgcaccattttgctcaaagcggaacaagacttctgtgctgaaagaacattattccgcgaactgtaccagttcatattcatctctgtgaaggctgccgaacagaccagtatcaagttggacgctgctcccgcttgttaccaaatgctgttg

SEQ ID NO: 49828 - DNA, 375 bp, Heterodera glycines
caccctaaacacttacgtcgcttgcgaagcgattcagcaggtgactgcgccgtgcgtttggaatgaccagcagtgcgagctgagcatccaactcgaccggggcatcaaactgagcaccaccggcgacggccaaatgctgtggcagtaccctttcgaggccattcgcgcgaccggcgacgatgggcagcaatttttgtggatggattttggggaaccaattggtgaacaggtgagcgaacgaacggaacagcacgagaccctaaccaaaacgaagaaattgaaaattgttttttatggaatgatcatcctcaaaaactattaactaacaaaaaaaaattatttttttttgctaaaaaaaaaaaaaaaaaaaaaaaa

SEQ ID NO: 49829 - DNA, 220 bp, Heterodera glycines
agccggtgaccgtggaacgtttggcacgtctgggggggaccgggccactatcgccccacataaccccgacattaagcgtacgcgagcgcatcttccatcaggtgggaagagggaaaacccagccgccacccatgtaatgatcgttgttgttgctgcccgtggccccacgggccgaaaactgaagaaggcccgaccagactaccatcctataagggcaaac

SEQ ID NO: 49830 - DNA, 486 bp, Heterodera glycines
  unsure (1)..(486): unsure at all n locations
gtcctataaattcgaacttgttgggtgtggcgtaagaacaaccgctggtgacgttatttgccgcgacgtaacgactcccacaacctaatcgacatggacgagctgggcgaacaatgcgccaccttttccgacccaatgcccgccgatccacccaaactttgggtggcgtggctgtacacagattcttacgggtcgggacganagatcagggaccaggtgacaaagctctttggcaaagacgcgaaaacgggcgaaatgcaagtgttcaaaaacacactgtcgaccaacaaacagttgtggaagaataagcatctgctcgaatacgggcggtaacatttcctaacggagagcccggggcgggaaatgcgacacatttggagattatggcggatggacgctgtgtaatccacccgcaaaatttggctaatgtcgaccaatttccactgattggacgcagcaagccagtcagcccgcggtatttggctt

SEQ ID NO: 49831 - DNA, 814 bp, Heterodera glycines
cgtcctagaaggttgtgacccggcggatgtcgacgtgtgcatggcctcatacacaaagagtttcggggcggccggaggctatttggccggaaaatcgtcgctgatcgcccatctcaggcgccattcgccgaccagcttttactccttggcaatgtccgcgccggtggctcagcaagtgttcacttccatgtccatcataatgggtcgtgataacactgaccagggatggcgtcgcattgagcggttggcacgcaacacgcgctacttccgccttcgactcaaacagatgggcttcattgtgtacgggtcgaacgattcgccggtcattccgataatgatttaccaccctaccaaatgcggactttgggggcgtcttttgctggagcgcaaaatcagcgcggtggtcgtctcttttcccgccactgcaatgacagaaagtcgctgtcgcatttgtatcagtgcggcacatgacaaagagatgctggacagagtgttggatgccatcgacgaagttggcgacatcagtgccaccaaacattcgcacagaacgcaccgttaccgccaattggacgtgaaatggtgaacaaagaaaggggaggacggacacacgagaagagaagagacaatgacgggaaataaacaaaaggaccgacttttgccttattttatgttttttgttagatcatccgttgagttttgctacgtatttctttcacgcgaacttttgccattgccttttcttgccgaccctttcctccctaattttgctcatcactttgcttcttctaatgccctccccctttcgtctgctgat

SEQ ID NO: 49832 - DNA, 655 bp, Heterodera glycines
tgaaagcgttgtggacatctgtgtttctaccctaatgtcgaagcttcaaaattacacagaggaccaattgcagaatttgttacacgatgagtcaagattgaatgcgatggtggatagtatgccgcaggtttcgtctcttcctaatgacaaagagatcaaattggcccacagcaaatccttggccgagtacaatctgtccattgagccacaactgaataaggctcttaatcatttgcgcgaaacgcatgccaatgccgtgagaacgaagggggaagtgaatgagatgaaggcgaaattggattcggttgctgaggcaagatctctggattccgtttgcgtttctctaaaaaatcttgcacaaaatgctgaagatgaaagcgagacagcggccgaacttttttacaaaggggctatggaaatagatgatttcataaagaaattcacggaaaaacgcgttattggccatacgacaaggctaaaggccgaaaagcttgccgaattgcttcgccaacaatgccaataccaaccgcaacacccgtctccttctgcacttggaatgaccactcaaactcaatattcgtctccaggggtggcagcctcaatgtatcctgtccttggccaggcttatacgagcccagccaattttcggcattct

SEQ ID NO: 49833 - DNA, 558 bp, Heterodera glycines
tcctttaaacactcgtcctcgtactccccctcaaacccccccactctccttctcaacatgggtcgcatgcacgctcctggcaagggtatctcctcgtcggctttgccctaccgccgcactcccccctcgtggtgcaaggtcaccccccagaaggttgtcgagaccatctgcaagctcgccaagaagggtatgaccccctcgcaaattggtgtcaccctccgtgactcgcacggcgtgccccaggtcaagaacatcaccggtaacaagattctccgtgtgctcaagtctaacggtcttgcccccgaaatccccgaggatctctaccacctgatcaagaaggccgtgtctgtgcgcaagcatctcgagcgcaaccgcaaggacaaggactccaagttccgtctcattctcatcgagtcgcgtatccaccgtcttgcccgttactacaagaccgttggccagctccctcccacctggaagtacgagtcgtccaacgccggtgcccttgttggtatgtaaggaccttacgtcggacgagcacctggtccatgtcccaagacg

SEQ ID NO: 49834 - DNA, 671 bp, Heterodera glycines
atgcagtgagggacagttcaaaatgatcttgaaatttgaagttcccctgattcaatgcgctttgcgttctgccggttgtgataatgtcggtctgacattaattgtctcgaacaaactgcagaatgttcgcttcttcagcaaacagattcaacctaatgcgaagccccctgaacaaaacatcaaaccgggtacggtcatcgacacggctgtagtgcatccgtcaaactgcgaattctttctcaattctcatcgtactcttcaggggactgcacgtaccccaaaatacaccgtagtctacgacgacaacaaattcagtctcatggacctcgaggaaatgtcttaccacttgtgctttggccatcagatcatcaattcaatagtttctttgcctgcgcctgtttacatcgcaaatgaatatgcaaaacggggccgcaatctcttcaattactatgatgctccacgtgacatggaaacgttcgctgatctgaatcagaagctttgtctggaacatgccggttggattgcacctcatcgagtcaatgcctgattttgagagaatttcttcgtacaccatttgatttccctttgtcccttttttaaatttaatttgttcccacttaagatttaaattgttcccacataagatttaaattgttcccatttttaagatt

SEQ ID NO: 49835 - DNA, 824 bp, Heterodera glycines
cccctctgttcaccaaatctggaattatattttcgttagaaataatgcaaccatttgtccattggtcgaaatgcatattcaaacgtccattttctaattcttcaaaattattttcgtcgtcattttcaatggggtttaattttgaatttaccgaagaacaaaaacaactccaagcggctgtaaagaaatttactcaagatgaaatcattcctaaagcgtcacattatgataagacaatggagtttccatgggaagtgataaagaaagcacacgccaatggatttatgaacgttgacattccgtcggattgcgggggtcttgacttggaacttgtaagcaacgtgctgatcagtgaggtcattgggtatggatgcaccggaattggaacggcaattttgggaaatgacttagccgcgactcctctggtcattggtgccaaagaagaagtcaaaaagaaatttttatcccgtttgattgatgagccaataatggcttcttattgtgtgactgaaccaggcgccggttctgacgttgccgcgcttaaaacgaaggcggagaaaaagggcgacgaatgggtcatcaacggatcgaagatgtggataactaatggtggagttgccagttggtattttgtacttgcaaggactgacccggacccgaaggcttccacgggaaaagcatttactgcatttgttgttgacgggaatactcctggaattgttaggggaaaaaaggaaatcaacatgggccagcgatgttccgacactcgtgccatcagttttgaggatgttgtcgtcccaaatgcccaggtcatcggtgcgccc

SEQ ID NO: 49836 - DNA, 718 bp, Heterodera glycines
gtccaataaagggaaaatcccaaaaattttttaagttttgcagttctggcgattatgattactgccgattttcacgcgtcccatccgtcgttgggtccctcccaaattgtctatcgaattgaccaattgcccaacactctccgcctcagtctgaacaatttcagtttgccgctgttccgacaattcactcaattggacattgaccagggaacggtggcgttggaacacacgccgagcagcgaaatggccaaatgtgacgtaatcggacttcgaattgggatggaggggcacgaagacggacacggacagcagcagaaggcttctccgcagtttgtccactcgcgcgttttggccattcgcatcgacccaatggcactgttgagcagcgcccatttgggcgccgaatcaaacggagaacgatcggccataatttacaatgtgacgaaacggcccgaaaatggcactttcttttgggtggacagagagaaggaggcgggcagtttcagccagcggagcattgaccggggggaagtgctttacgcgcagatgaacatggaagcatttcaggacattttcgaatatgtgttgagcaatgatgaaatggagttgttgccgaaaaaaggcattgtgcgagttcagcccgtcttccagcccccaccaacgcacgcaccgttactcagcttggtctggcccatctcaacaccactgcgcttgaagg

SEQ ID NO: 49837 - DNA, 253 bp, Heterodera glycines
ggtgagccaatatgtgaacaaacggatcagcaatcactacaaagccacgattggtgctgattttcttacaaaagacgtgatgatcgatgaccgacttgtcaccatgcagatttgggacactgccgggcaatagcgaatgcactcgctacgcgactccttttaccgtgacgctgactggtgtgcgctggcttacgatggcactcacgcgccgtccttctaatcattgaagagttggcgcgacgatttccttgtg

SEQ ID NO: 49838 - DNA, 830 bp, Heterodera glycines
cggcagtggacaaaacgcgggagcaggagacacgccaacgttacaatttgccacgggtgtccggcctgatgaggccgttccccgacacgtccaccggctccatttactcgaccctgacactgaacgaagtgaactcggaggcgatacggcaacagatcatcaactactatcgaatcccgggctccggcgaacgcttcacggactatcagcagcaggcgttgaaccaattccaaatccccaccgacaacatgttcaccaccagcaaggaggaggacaagaagttcgaggcgttccccgaggcgtccatcaaaagtgagcccatctacaaaacggcggccatctacgaaacgcctcagtatcgttttgtgcctcggaccggcgctgtgctaatgcaaatgctgcagcagtgcaacgatttggccaaccgagagacaattggtcttcagccgtaccaaggccaaatgtactgggactgggccagccaatgcccggacaatcccggaaaaatcttgcaagaatgtggtgacaatgtgccttgtctgtacgattacacgctgctgaacgcggaagtgttgggcaacgaagtgaaggacacgtggaacgcgttcttccatgaccgttggtccgccattcaaaattataacagttgtggcccgatcaacattgagtacccggaatatctgatcaaaactccggcactctcctccggctacctccagggggacattgcgcgtttcgagtgcttccaaactcactggatcaaaggggatgccgagtttaaatgtacccaagtggtggactacaactttccgcaaatgtggcgttttgaa

SEQ ID NO: 49839 - DNA, 322 bp, Heterodera glycines
gcatacatgcattttgaattcaaagcgaactcttctgtagacgataatgcacgatgcgaatggtcgtgaactgaaatgttgggcttattcgaagactaacaatgaggtgattgtcgcgagtcgggagacggtctacttctatgacattaaccactgcttggaaacgggtggagaaaacagacgatgttgcgccatggggaaatgaagcgacaaagtgctgtcactggtggagaaatacgcgcaaatcgcagtgtttagtgagcacgaaacgcgatgtcaatcagacgacacatgagtgaatgttctctctgtgatggacatc

SEQ ID NO: 49840 - DNA, 220 bp, Heterodera glycines
  unsure (1)..(220): unsure at all n locations
ananggnggaggaggagggaagggcaagaagaacacccggaggaagggaaaggtgcgcgacaaactcgccaacatgggcgtatttgaccaagccaccgatgacaaattggacaaggaaatcatctccgtcaaacggatcagtccgagggggggcgccgaagggctcaaagggcgcgcgtcgctgggcaaggcggggcggggaggagtggaccagaagggg

SEQ ID NO: 49841 - DNA, 415 bp, Heterodera glycines
caaattcgcgcacaaactcagcgagcgatacaactttgttcctttcggagaactcatcacaaagttttgccttaaagattcagaaattgaacataactttatactttataaattccagaaaaaacagcaaaaccatgctcgatttgaccattgctgaaaatatctggagcgagtgcgatcgttggcccattggtacatcgatgcggtctcttacactgacaatgatgaccatggctattacaattattttctgtttgccgtgcgtcaatcttactatggcgatggttcttccgtccatcggttcgacaggtacggcaatatgtaccgtttttaccaccatccggacaaggaacgagtgcgcattgcacaaattctggtgccaccaacttaccagcgcattgcgttgggtccgcca

SEQ ID NO: 49842 - DNA, 630 bp, Heterodera glycines
  unsure (1)..(630): unsure at all n locations
ggccctccatgtttctcctcgttcgtnatgttttatcacgacccctacgaagacgattatagtcatgataaagagttaaaacagttggtacaaatggacgaccttgcaattcccaaatttgtaatgcctccgctcggcattaagccaaaaaaatttgtgcgcaaacattttgggccgaacagtcggcttccaatggcgcagtttctgaagggcactaccacactgtcctttgtgtacaagccgaagacaccgcaagacaaaggcggcgttattgtggcggtcgattcgcgtgcaacgggcggaacttacatcagctccaaaacggtagaaaaaatcattcctatcaacgaccaattggtcgcgacgatggcaggcggtgcagcggactgtcagtattgtacgcgggccgcgagcaaatattgcaatcttttccaactaaaagaggggacgcaaatttcggtggctgcggccagtaaatattttgccaatgttatgtacgactatcgtggccaagagctgggcgttcactcgatggtttgcggggttgacaagttcggcccttccatttacatgggcgaaactgaagggactcgcgtgaagattgacaacatttgttcacttcggtcgggg

SEQ ID NO: 49843 - DNA, 537 bp, Heterodera glycines
cggcaggcgatttcactgacgccagctgcagttgcgcgagtgcggcaactgatcgaacagaggccaagcgccagggcattgcgggttggtgtgcaacagcgtggctgcaacgggttcacctacacattggactacgctgaacagaagaatcgttttgacgaggaggtcaaacaggacggagtgaacatttggattgacgcaaaggcccagctgacactgctcggctccgaaatggatttcggcgagtctaaattggcctccgagttcgtcttccacaacccgaacatcaaaggcacttgcggatgcggtgaaagctttaacatggacgacaacacgacgatgggtgctgctgctgttaccaattcgtccaccgcgccaacggaaatggcatcatcgccggagaggcaaatgccatcatcgacgaacgcgcaaagctattggactgaaggcagcagcagccacagttcttacagtggtggcggcagcagtgattacagtagcggtggcagcagcggttctgacagtagttccagtacg

SEQ ID NO: 49844 - DNA, 666 bp, Heterodera glycines
gtccataaagacagttcacaaaaattttattgcctttcaccaacctttaaaagggcactatttaaggtcaatttaagccctccctcgcaacaacctccacaatcgtcctccgcgacccatcaaggaggtcatcatcgccacacatcttcaggccatcaccattcgtctggaatgactgcttcttcttcgcgtgctccgaataggacacgtaccggagatgacctgcacattggcaagtacaaactgctgaaaacaattggaaaaggcaacttcgcaaaggtcaaattggcaaagcacgtgccgaccggagtggaagtagcaatcaaaatcatcgacaaaacggtactgaatcagagcagcttgcagaagctttttcgtgaagtccggatcatgaaacaatgcattgtaagtgacgaaacggcgcgtgcaaatcccgaatcacttgagaccgaccgaataacggaaatgcattcgatcagaggatgcgttttcagcacgagggcactcgtttttgtcggcaatgggaacaaagttggcggttttgcattggcaagggcttccggcttcaaagtgaatttggcaattgcccgtgccgtgaaaaaggcggcgcgcgaccttttccacatcgaattgcacgaggacagaaccgtcttccaagactttttc

SEQ ID NO: 49845 - DNA, 705 bp, Heterodera glycines
  unsure (1)..(705): unsure at all n locations
gncctaaaagggctgcaatttcaattccattttttaaattttgcctacaaattaaacagtgccgaaaactaaatgacttccagggatgacgaatatgactatttgtttaaggttgtattaatcggcgactcgggggtcggcaagtccaacctgttgtcccgcttcacgcgcaacgagttcaacctggaaagcaagtcgaccatcggagtggagtttgccacgcgaagcatccaggtcgactccaaaacggtgaaagcgcaaatttgggacacggcgggccaggagcgctaccgggccatcacttccgcgtactaccggggcgccgtcggtgcactgctcgtctacgacattgccaagcatgtgacctacgagaatgtggagcggtggctgaaagagttgcgcgaccattccgaccaaaacattgtgatcatgctggtgggcaacaagagcgacctgcgccatctgcgggcagtgccgaccgacgaggccaaggcgtacgcggaacgcaaccagctgtcattcattgagaccagcgcgttggacgccaccaatgtggaggacgcgttcaccaacattctgaccgaaatttatcgctctgtcagcacacgacaagtgccaccggaccggatggtgccaatccacagccagcacaacatcacactgtcctcctccaccagtgccaacaaggagaagaaggcgtgctgt

SEQ ID NO: 49846 - DNA, 699 bp, Heterodera glycines
ctccatgcaagagactcacattgttctcgggattgcctcggtgcttctcagttggctatcatcgccacagtcgtcactctgccatctctgtactcggagatgagccaaatgaacagcaaagtgcgcgatggagttgaggccttccgcgtcaacaccgactcggcctggactgacttgatggacgtgcaagtggtcgtgacgccgccgtcgaagccccgtgataaccccttcaactccatcttccgtgccaaacgtcaactgcccggacactgccagtgcgctggcctccaacagccaagctgtccccctggtccgcccggcccgtccggaccgcctggacagcctggacagcccggacgccccggagccgctggccaacccggacagcctggagcgaacggagttgtctcacgcccaattcctggcccgaagggaccgcctggagcgcctggccagaacggaaaccccggaggccaaggtcagccaggacagccaggaggccaaggaccgcccggacctcctggcgcgcccggtcagcccggccagcctggaaactctggccagcctggacagcccggagcaccgggacagcccggcaaggacagcggctactgtccgtgcccgccccgctcttccgtgttggcagtcaaaaagaagatggcggcagccaagaaagcataagcgacaagcgcagggaga

SEQ ID NO: 49847 - DNA, 504 bp, Heterodera glycines
cagcataccgtgtttattcgtggcttgcccggcaatatgagcaccgacgaaattcgtgaatttttcgagaaggactttggcgcttgcacgttcgactttgtcaaagtgtcccctgaccgtaccaagttgtacattgcagtccgatttgacagcaaagcggcggcacgtaaagtcatgtttaacttttccactgacggagaattactcggcttcaaggttgagatgacatggttccgtgacattcgccgctatttggcccattgtgctaaacaaggaattcgttcaagccgttttcgtggccgttccgactatcgccgggatgacgagcagtacaaagggcgcgggcgttcaaggtcacctactcggtcccccgaacgtgaagagggcgcgcgcagtcgctccgcgtcggccgcttcgcgccaattcaacgccaaccgccgtcgttcgcagagccgttcacactccgcccactcacactcgcacagtcgttccctctcgtcgggg

SEQ ID NO: 49848 - DNA, 676 bp, Heterodera glycines
tgcttttgatcaacccggcagggtgagcttcgccccttgccccacgggggaacttcatttgggctccgttcggactgcttagttcaattttctgtgggcacgtaaatacaacgggaaatttgtgttgcgaatcgaagacaccgacagagagcgattggtggagggatcggagcaaaggattgagcagaccctctaccactttggacttacacccgactaaagtccgttgcgtggtggccaattaggttcctattaccaatccgaacggatgcctctttaccgggaattggctgatcagtcggttgacatcggccattcgtacaagggattctgcattcaaaaacgactcgactatttgcatcgaaaagcgaactccgaacgcattccgttccgtaaggatggcatttgtcgacaggtttcgacagaagaaacgcgagctcgggaacaaaacgaagaagaatttgttgttaggctcaaatgggacgggagaacgaccggatttacggacatcgaattctggtattatgaacattattccgagggaggggattttttggacctcaaaagggatggattccccacttatccctgatgtacggtgggggagaagaaagggaagaaaagtcaggaagggaaagaagagggagcggaatggatatgctcgagcgcgaagaga

SEQ ID NO: 49849 - DNA, 326 bp, Heterodera glycines
gcccctttgacctttggctcacgcaaattcgccaaaacactaaacccttgatggacctttgtcttcgtccgatggcttttcgtccgccattttttggtgggaattcattctcaacggcgcatttgccaaccatttgcccgaactgcctctgaatgttgacacaattctcggctctgattcaccgatggaaaattttgtgacaacggctccgtttgatgtgctcaaccccttaaatttcactgccatttgggctagtacggcttaacaaatgcacattgtacaaattggtcctctccttgctcagatccctaccttttgatgataaa

SEQ ID NO: 49850 - DNA, 607 bp, Heterodera glycines
aaacgatgttgaaaagcgttacggactcctcatcgacaaccgcatctcgcaagagattcccggcgaccagctctgcgagtagttcatgggctacgtcttctagatccccagtggaaacgagaagcagggtttccgcatgaaccagggtgtgctcttcaaccaccgtgtgagcctccgcctctcggagggacactcgtggtaccggctccgccgtacccgcgagcgcaagggcgagaccatccgcggttgcatcgtcaacctcgacatctcggttgtgtcccttgttgtcggcaagaagggcgaggccgacattgccggggtcaccgacgtgactgcgcccaagcgccttggccccaagcgcgcgtggaagattgcgcagatgctcaccttgagcaacgaggactatgtgcttgagtacgtgctccgccgtgaggtgcccgagaagtcgggctagcccgagtccaatgcccctaagatccagcggcttgtgacccccttgacgctccagcgcaagcgcgcccaccatgccgagaagcgcatccgcgtcgtggctgcccgtgaggccgctgctttctacaataatttgctcgctgaccgtgcccatgag

SEQ ID NO: 49851 - DNA, 304 bp, Heterodera glycines
ctcaagaaaattgaaaccacatcgtcaggagcggcgctggaatgacaagcgctgcaaaaaaacccctcttggaactcgttggaaagacgatcctttcagaggagcctggatggccaaaggaattggtctcgactagattggcgtcgaatcgagacagcctacttctgcgattccaaaatgcgtccgcgagcaacttgtcaaaaatagcaacaagatcactgcttatgttccaaacaacggtcgcttgaatttgatcgacgaaaacgactaaacgcttgtgtctgtgttctgacgaagtggacag

SEQ ID NO: 49852 - DNA, 517 bp, Heterodera glycines
acatcccttcccctggacgcgcacttttaaaaccggccagacccactatcagtacatctgctctcccgacaatcctgtgctgaaacaggcatcgcgaaggtccccggcgaccaagacacaacccgctgaacttaccgctgctgaccacagcgtctggacgaggcatagcgccatgtacgccaatgacatcgcgaaagagcgtggcagcattggggacgccgttcctcccttccccgcctagaaatcgcctttacacctggtgcttgaagtgctcccgcgtctccaggaccactattacagcatttcaacgacggaccgcctggacaccccactcctcccgctcactgccgatgagctgcactacaacacaagccacgagcgactggacaaacgggagtgcaccaactccttggaggacctggcccccgccgagtccaccgagccagtgtacttctctcagtcccaattgctcttgccacagcaccggctgcagcccctgatcataaccgaaaccccg

SEQ ID NO: 49853 - DNA, 382 bp, Heterodera glycines
  unsure (1)..(382): unsure at all n locations
aggngaaaaggnnnnnggngnggagaananannagaggaattccatgagacttttgttcatgtgaccgatttgtctggacgtgaaaccattgtcaaaatcaccgggggaatgcgtgttaaggacgaccgagacgaggcaagttcgtacgctgttatgctcgccgcgcaggatgttgcggaacgttgtaagcaggttggcattaatgctcttcatgtcaaattgagtgaaacgggtgggaccaaaaccaaaaaggcggggtttttttttcaggcagagatgagggcccacgagcgttcgggtatgaagattggtcgaattgaagatggcaggcctattcctttagactagaatagccaaaaaggaggcagtcgtggaagtcgt

SEQ ID NO: 49854 - DNA, 810 bp, Heterodera glycines
gtcctctcacgttactgtcgcatgagagagtaccaaagtctttccttttgcggcaccgacgaatatgggacggccacggaaatgaaggcactttcggagggacttacaccgcgacaactttgtgacaaattttacgagttgcacaagaaaacgtacgattggttttccattgattttgacttcttcggacggacatcgaacccaaatcagacagaaattgcgcaggacattttcaacaaattgtttgctaacggattcacttcaattgacgcgcaaatgcaattgcattgtgcgaattgcaacaagtttcttgccgaccgttttgtcaatggcatttgtccccattgtcagttcgccgacgcacggggcgaccaatgcgacgggtgtggccatttgttggatggtgtcgatttggtcgaaccgaagtgtcgcatttgcgggggcaaaccaacacttgagcaatctcgacacattttcttggacttggaccgactcaagcctcatctccaagcatttctcgaccgcacaatggcaacgtccgactcgcgttggtccgccaatgccatttcgatcactaaacagtggcttaaccatggcctcggacggcggggcatcacacgtgatttaaagtggggcacaccggtgccgttggccgaggttgcctccaaagtgttttacgtttggttcgacgcgcccattggctatttgtccattaccaaatcccaccttggcaacgattggcaccgatggtggaagaacccggacgaccgtgagctgttcaactttatcggcaaggacaccgcgcctttc

SEQ ID NO: 49855 - DNA, 406 bp, Heterodera glycines
aagacacgcattggagatagcgataggaacccaaatcttggacctttcggtcgagacacatctcttcaccgggacgctgctttccgagagacgaaatgtttttagccaagaaacgctgaaccaattcatgggactgagtcggtagtgttggctcgaggagcgtctccacctcccatcgttgctagtacatgccaacccaatgcttatcgatgatagcgaattgcgcgaaagggctttggctgcggagacagaggccaagatgcattttcccgaccaaattggcgattacactgacttttactcctctatttatcatgccacggatgatggcacaaaggttcgtgtaaaaaacaacgaccttatgaaaaatggaaatgggttgccgcttgtttacctgggaagggct

SEQ ID NO: 49856 - DNA, 220 bp, Heterodera glycines
cggcaacaaaattgtgcgcattcttcgatcaaaggggatggcaccagaaattccggaggatctttaccatctgatcaagaaggcgggtagcatccgcaaggcatttgagcgtttccgccaggacattgaatcaaagtacccgtctaattttggtgggaaagtcgaatccaccggctcggccctttactttcaaaccaaacggttgctccccgccccttgg

SEQ ID NO: 49857 - DNA, 418 bp, Heterodera glycines
aaagccgacgggaattagaaccgcaagacaactgaaaaaacgtcgtcaggagcagcgctggaatgacaagcgttacaaaatcgccggtcttggaactccttggaaagccgatcctttcggcggagcctgtatggccaaacgaattgttctcgagaaaagtgggggcaaacccagacagccaaattctgcgattcgaaaatgtgcccgcgtgcaacttatcaagaatagcaaaaagatcactgcttttgttccaaacgacggatgcttgaattttattgaggaaaacgacgaaaagcttgtgtctgggttcggacgaagaggacatgccgttggagacattcctggagttcgtttcaaagtagtcagacgagccaacacggctttgctcgcacttttccgagtaaacaaagagaggcct

SEQ ID NO: 49858 - DNA, 448 bp, Heterodera glycines
  unsure (1)..(448): unsure at all n locations
tgtctgtccgtctctactccaaggcccgcattctcggctacaagcgttcccagcgcaaccagcagaccaaccaggtcttgctccgcgtcgagggcgtcaacaccaaggaggacactgagttctacctcggcaagcgtgttgcctacgtctacaaggccgagcgcgccatcaacggctccaaggtccgcgtcatgtggggccgcattgcccgccctcacggcaactctggtgtggtcaaggtgctcttcaagaacaccgttccccccaagtcgttcggtgcccgtgcccgcgttatgttgtacccctcccgcgtgtaagagtcgctttgtgttcttgcgtgcccaacgagcgatgcaatcacaatgcttccatgacaaatgcatgaatgattcttgtttttgccatgcatcattgataccacnnnnnnnannnnnnnnnnaaaaaaaaa

SEQ ID NO: 49859 - DNA, 761 bp, Heterodera glycines
attcttttgattttttgaaggaacacgacgattgtgtcaagtttccggaaaagctgaaaagcggcagttgtgaatcgaatgggctgaaaccgattatgatcactgattgggacggcactatgaaggattactgttctcgatatgcaaccaatttgcagccaatttacactgcgattagtttggctaaattttcacaggcctacactcgtcttagtgctgtactgacagccggtcctctgagaggcccgggtattctcgatttgatcgctctgccgaaagacgggccaattgtatttggaggctcgtatggaagagaatggtggttcgacggaaaacggattgttcatgacgaaggaatttctgacgcgggtttaactgcattggacagtctttctgaaaagatggccactttgctgcaagacaatgaatacgcccatttcgctctcatcggtagtggtgtccagcggaaggtcgaccgtttgactttgggcgtacaaactgtttctaagcacgtagatgttgcactgtctcagaaataccaaaacgaagtcattcagctggtgcaaagagttgacccgaattcgcaatttttgcactttgcgccgtcgaatggatgcgaagtcgaagtgatggtgcacgaacaaggaaaggtttggaccaaagctaaaggaatggcgaaaatagttggaacgctcggcgaatccctggaaaaagggacggtgcttatttgtggggacacgcattctgacttaccgatggtg

SEQ ID NO: 49860 - DNA, 686 bp, Heterodera glycines
atcgtaaggagccaatggattttgaatatattgttgccaacccctccgaggggggcacagattctgcatttcttgacgaagattttgagggctgcaattgtacggacggccaatgctgcacgtcggcagcaggcggttgcagctgtttgcccggcaaaagggacaattacaatccgatcaccggcaaatggattgatcaggggggcactgatcagcggcagggtgtgccacatttggagtgtcaccagaattgtgtgtgcgcatgggagccggacaaatgcgcaaatcgtcaagttcaattcggtgtccgacaaccgatcagggttgccccgtgtactagtggcaaaggcttcggtgtttttgcttccgcgttgatcgaaattggcacttttgtgatcgaatatgttggcgaagtgcttggggaagaggaggcgcggcgccgaattaacattgttggacggcacgagcacaattatctgttcacaattcgcgaattcttcggaggtgagtgcaggagcactttcattgatgcacggcacaagggcaacatttcacgcttcatcaaccatagctgtgagccaaatttgtcactgcaaattgttcgtttgggtcgccaatgtccgtcgttggcgatgttcgcctccagagatatccaatcaggtgaggagctctcgtacagttacggc

SEQ ID NO: 49861 - DNA, 473 bp, Heterodera glycines
  unsure (1)..(473): unsure at all n locations
tccataacgccctggggcgggcccgcctacctgcacaggggatcttccagaaaggacctgctcgccgacatggagccgaacggagttgacattttccgcgtggcgaaaaaaatttcgccgaacattgtctactttttgccgaaaaacacccgcactgatcagttaattgcattggcaggccccggaggccgtgtggagttggagcaaacggtgcttaacgagaagatcaaggcgttgcatgcttattttggcctgttggcggccaattgagtccctcgtcttttttcgcgcttttctttggttgttacactcacggattatctcaaattattatctctttgaattcgttgcttttccattttctcttgatcattttgaaaattttgatattgtttcaccttctcttgctacaaattttccaataaattttcccatttcnaaaaaaaaaaagaaaaaaaaaaaaaaaaaaaaaa

SEQ ID NO: 49862 - DNA, 448 bp, Heterodera glycines
cagacgatcatggcttcacgtagacaacacaattggactgtgcctccaggttattgtttcacttggaactccaaacttccgaaagccttgccccggaatgtgtcatacgattgaaggctaagataacggttaagtgcgagtcatccgacaagactcattttacgacggatatgctgctgcccgccttaaatcatcgatccgacccacaaacgaccattcgtgcgccgacagactcttcgccctcaatctttcactgcccttacaaacgcccgaactgattgtctccatggtctctgccgaagagccgatccggctgcacgacttcgatccttctcaataccttcgcgaacattccgcccaatccgtcccaaatgattaccacatgcccggcccttctctccccaaacttatgctgctcgtcgtttctcccgcctccagcaaaagcact

SEQ ID NO: 49863 - DNA, 547 bp, Heterodera glycines
caaaaacggcacagaactctggtttcggtgtgctctatttcatggaggagaattgcagttctactcgtgagctcaacattgaatcggatacttttcggatgctctcattgtcctggcaccatattgcgatgcacctttgattgtgaatctgaccggagttgcaattccgacgatgaagtcaacatccacaccattcaggctactgagactcccgggcttttcccgcttagttcttgtcgacaaatgcccggagatcaacatgacaacccgaagactcaagacgactggcggtggtacagtgactttctccaatcccatcaagaggaattgactggctgtgccacgcattaagccacgaaaagagtgcatgatcacaggtcacgcttaactatacaaagagagcgcgtacatcgcatcgcgaatgattgacgggactcaacagatgcttctcggaagcctttctgacgtttacattaccattgaccagaggattgtgccccaggactgactatcactcagatatggaatcttcttgacggctgataca

SEQ ID NO: 49864 - DNA, 710 bp, Heterodera glycines
ttcccggggaattcgctcttgccaggattcttggcaacaatttatgcgggattctgatggcggtgctatacatcctcatcattgtgttggtcggtgccaatgccgcactcgccgccacagtttacttcggtctcgctctgtttaccgtcgtcctttgcattttttctttccattttcttcaaaaattgaatttctacaattactatgtccaaaaagcggcgaaagcgcgcgcgaacaatggaacgaatattctgcacgaggaggaaacgggcgaagcgaaggccaatataaaagtgacgcatccgccgctaaaaacatacatcgcaattttctctgaggtccgtcgccagttgctcgatgtttggcttgtcttttttgtcactttggctctgtttccgaccgttttgttgaaagtgtctttaattagtccgttcaacgaccagaaaacttccgaatcgctctacaagcagctgacagttttcctcaatttcaatgtttgggccgctgtcggctgttggctgtccggcttttccccgaggccttcccccgattatttgtccctgccgatttgcctccgtctgctctttcttccgttgttttgggtttgcgattaccaatatgaccatttgactccgcgtcgcttcgtgttcatccacaacccatgggtgttcactgttctgatcactcttatggcactcagtcacggctat

SEQ ID NO: 49865 - DNA, 328 bp, Heterodera glycines
gaatacgacggggaagaagttggtgagtccctccgcggaaggccttgagctgccagagagtgaggaggacaacaagaaatttgaacaggacaaggtcacgttcgacaagctgtgcaaagtcattaaggacatcttggacaatagagtccgaaaggtttctgtctcagaccgtttggtctcttctccgtgttgcattgtgaccggagagtacggatggtctgccaacatggaacggatcatgaaggcccacacattgcctgactcctccacactgggatacatggcgtccaaaaagaacctggagatcgtccctgaccattcgatcgtc

SEQ ID NO: 49866 - DNA, 716 bp, Heterodera glycines
  unsure (1)..(716): unsure at all n locations
ggttcgattggtccaactcatcctcgtttttgtcattgctctgttttgctcaaatatttgcttgcttcgtcctccctcacctttggctttctctccgtcttctcaaaatgccttctgtttcttttgtggatgtccccgttaattcgccgtttacctttgagaatctcccgttcggcgtcttctcaacaaatgaaaatagcaaaaaacgcattggagtagcgattggagcccaatccgggacctttccgtcgtgaaacatctcttccacggtcgctgctttcgagagacaaaatgtttttaagtcagaaacgctgaaccaatcctgggactgaatccgcaatgtttgctccaaggccgtcttacccttccattccgtgctgtcccaatgccaccccaatgcttcccgatgacaacaaatttcccaaaagggtttttnttcgcaattcgaaggccaaattcatttgccccccccaattgggattaaactgacatttaatcccctattaatccggcccccaatgtttgaccaatgtttcctgggaaaacacaccccttttggagaaattgaaattggtgccccttgctaccatgggagggggtcaaattttttgtttccggaccggaaacatttcccccggggccaaataaagggggaaataatccccccccaccttttgacaaaccggtatgggcttttgttggaaatgggttttttt

SEQ ID NO: 49867 - DNA, 774 bp, Heterodera glycines
tctcctaatagcacatgaatctctccccagtcgactccgttacccattgcacaacaacctccaccatgactcaaattaccaagcccgtcgacccctggaacgagtgcctcaacacctcgctcgaggtcgaggacccggaaatgttccgcctggtcgagctcgaaaagtaccgccagtactcgtgcctcgaactcattgcctcggaaaacttcacgtcgcaggccgtcatggaggccaacgggtcggccttgaccaacaagtactctgagggcttgcccaacgcccggtactatggcggtaacgagttcattgaccaagtcgaagtgctctgccagcaacgtgccctcaaggccttcaacctcgactcgtccacgtggggcatcaacgtgcaatcctactctggctcgaccgccaacttttcggccttgacagccttgctcgccccgcacgaccgtatcatgggtctcgacctcccctcaggcggccacttgacccacggttaccaaacggccaagaagaagatttcctcttcggccatctactttgagtcgatgccgtatcaagtcgacatgacgaccggtttgctggattacgaccgcttggagcaaaatgcggccttgttccgccccaagctcatcatttgcggcgcctcggcgtacgctcgcgactgggattacgctcgcctgcgcaagattgccgacacgcacggcgcctacctaatggcggatattgcccacatttcgggcctggttgccgctcaggagcaaaacaacc

SEQ ID NO: 49868 - DNA, 244 bp, Heterodera glycines
cgccgtatgcgcccatgacggccatggggtgcacttctgagtacaggcatgccgcgcttgtgccggcttgttccaacgctccaccatcgcggaacgcgtctatcggtgccgataccacggaaactgtgacatctgccaaagggaagtgcgttgtgtgtgccacgcgtgtccattagacaaatgtttggggcttggcatggacccggacgctgttccacgacaccgtgaccaaattgggccccga

SEQ ID NO: 49869 - DNA, 688 bp, Heterodera glycines
ccgcgaccagggccgctgtggctcttgctgggctctcgctgccgtcaccgctatgtccgaccgtgtctgcgtcgcctccaatggcaaaactcaagtgagcctctctgccgaggacttggtatcctgctgccgcatctgcggtatgggctgcaatggtggataccccgccatggtctggcaatacttcaagcactggggtctcatctccggtggctacctgcccgacaagtccgagggctgcctggactactccgtcctgccctgcgaacaccacaccgccggcccccgcggcacctgcgacgaaggccccacccccaagtgcaccaagaagagcagcgctgcgtctggcctcacctacaagaagagcctgtactacgccaagagcgcgtactccgtcagctccgacccctaggccatccagaaggagatcatgactaacggacccgtcgaggttgccttcagcgtctacgacgacttccccaattacaaggacggtgtgtaccaccagaccaccgacaacttcctgagcggtcatgcactcagggctattggctggggcgaggagaatggcgaaccctactggctcatcgctcactcctgagacaccgactggggtaaagatggtctgttcaagatcaagaggggcaccaacgagtgcggtattgagggtcaagtcgtcgcgggcatc

SEQ ID NO: 49870 - DNA, 376 bp, Heterodera glycines
tgcactgatcaccatcgattcctaccgtctcagtgatcgtgctcatagggctaacatttattctgagtgcatggaacatggggacatcatactcatttatatgtttacttcttttgaccgattgcttaatgttgttcggaaaacggcggacctccacaaagttgaggacgccttcttacggctgatcccactgcgctactatggcattgaactcgacattttattctctcggttggcgttgatacaaataaaggaataccaaaaactctcagacgacaatttgcttaacatcttggacgataacacttttccctctctgaatggttgtcatgtggccgatgaaattttgccattggtcccaaatcgactgaatttc

SEQ ID NO: 49871 - DNA, 819 bp, Heterodera glycines
gtcaacagaatgacgcacaaaatgcggttgacccgtgtgctcacgtggtccacgtgctcatgtgctaccaaatgggcggggaggacgaagaatttgtgcgcaaagcaatcgaaagtttggtgaagaaattgaaggatcgtcgtgagcaattggaatcgcttatttccgcggtcacttccggcggcaaacaatcaaccagttgtgttacaattccgcgttcattggatggccgactgcaagtggccggcagaaaagggctgccccacgttgtctacgcgcgcatttggcggtggccaaatgtcagtaaaacggaattgctcaagttgcgcagttgtgccacccccgctgaccatgtcgatttgatctgtgtcaatcccttccattacgaccgcgtcgtctcttccggcctttccgctttcgatttggcctcttttcgcttggatcctctttcgtcttcgtccccttccgctgcttttcgtcctcctccgccgagtgatcaaatgccaatacctttgccaattggccattcgtttgcccatttttccggtgcctttgactcccatccgtccttttctgcttcctcttctcaccatttgccttccgtcccaattgaccaccaaagtgccaattccaatgctttcgatgcgccattccctcccattccgtcgttcgttccccacccccaacaaaatcagcagcggtgtccactgatcgttcactgtttgggcgagggacaacaacagcaaatcgggccgtttcagcagcagatgtgtcaccaaaatacgactgaccaaagtcaaacgcatcggttcactcatt

SEQ ID NO: 49872 - DNA, 441 bp, Heterodera glycines
  unsure (1)..(441): unsure at all n locations
gcgcatgtgcgaccgtttgacccaaatccaagaccttgtcaacgatttggccaaccacatgtgcaattcggtcggtgttctgcaggcgagtgccgggccgtgcgaatttgggacagctccggagacactttacaaaatcgccaacaaggtcaaaaacttcgccgtcatttacttggtggacatcagtgaggtgcccgacttcaacaaaatgtatgagttgtacgacccggtcaccgcgatgttcttcttcagtctatcgtcaaacttctttgcctccacacattgctgtgtttgaacaatggactgcacaaattctccattctgaagggcaataatgaacaataacaacaacaatcaatcatcgcatatttgatatttttgaacactttttaactgtttaagaaataatcgtttgattttanaaaaaaaaaaaaaaaaaaa

SEQ ID NO: 49873 - DNA, 325 bp, Heterodera glycines
cccgcccgccaaacgtcagagcatgaaccgcggattgaacctaacgcccaaatctttgctccctcgtctgcgtaagggaaaactcaactgtccggaggtgatgaaacccgaatgcgtgaacactcatttgcatgacatgatcgtgctgccggagacggtcggctgtgaggcgggcactctgagcgggcaggtggacgatgcggaaggagtgcgagctgagatgatgggctattacttgggcgaattatctattacgcagcagcctgtggagcacgggaccactggcaccggagcaaagcacacggcgccgggcataccactaagg

SEQ ID NO: 49874 - DNA, 310 bp, Heterodera glycines
acgcactttcatcgccatcaaacacgacagtgtacagcgcggattggatgccaaaatcactaaacagttctagcagcgtgggtacaaaatggtttgcatgaaacttgccaaaggcactgtcccccatttggaggtccactaccataacctcaagaacaaacttttctttgccgggcttcccaaatacatggcatcaggcccgattgtcccctaggttttggaaaggtttggatggggttccccggggccccggttgctccggccttaaaacccttgggccagtggcccgggacaattccgggagattttt

SEQ ID NO: 49875 - DNA, 247 bp, Heterodera glycines
cggtgtccagcgcggattggttgccaaaatcattaaacagatctaccactgaggttacgagttgattgccatgaaacttgcaaaggcacctgtcccccatttggaggtccactaccatcagctcaaggacaaaccttactttgccgggctcatcgaataggtgacatcaggccctattgtcgctatggtttgggaaggtttggatgagggtacacagggacacgttttgctcggggctacgattccg

SEQ ID NO: 49876 - DNA, 702 bp, Heterodera glycines
ccctttataatacggcgctctttcgtgctcgggcaacgattttgcaataaaaaaacggaagagtcatttagggacaaagaaaaagttttgccattggacggactgcagaaagaccttcgtacgacagcaacttcgagcttctctctttactgctcccatgctcaccaaattttgaccgacgtaactgaattgcgcgatttggtgttggacaaacgcaaggagtacattttgtgcagcaatgcattttcgctttacggtgtccagaaatttatgtccgatgaggacaggaggaaattcgaccaggaaacggatttggcctttagacattgcaccaaattgatcaagagtcttgaggcacaaattgaatctgatcgcactttgcgtccatccgaccaattaaagcatctgcttgccgtgacgaatttgctcaatgtttatttgaaagaagtgctttctatcgttacgcaattaagggcaattcatgtgcgaaaatcacgccaaattcgtcgtatttgccggttggccaatctcgttgaaatgtatggggcacgaattgaacagacgcaaaaggaggaggaagaaaaggcgctgaaattggtgcgaatgttagaagagctaaaagagaacgaaaaatgccagtggaggaaagaggaaacacgggaagaagacaaagagaatgttatgttaaagaaaggaccaagg

SEQ ID NO: 49877 - DNA, 220 bp, Heterodera glycines
agccaaggaagaagccgacgaggaaatggacgctgctgacgaggctattgccgctctcccccaattcagcgacccattggctgccttgcccccgggctcatttgtgatggacatgttcaagcgcgtttattccaatgaatacaccgcatcgcaaagcattccttattcttgggatgatttcaaccccacaaggtacagcctttggttttctgaatacaat

SEQ ID NO: 49878 - DNA, 307 bp, Heterodera glycines
atacgcgcataatatgaatgacatgttgggcatggaaacctggtccggcaaatactgcctgtgctacaaaaaatacttgataaccctgctctcagacaaggctcagctggtgatcctcttcagcaacaccccatctctcagactgagtgaaattgattactacgccatgttgactgagaccggcgtgctcgattactatggaaacatcgtcgagctgggcaccgagtgtggttaactgctccactggtacatgctgaacatcactgacccgggtgagtcggactttattcactacatgccgacggag

SEQ ID NO: 49879 - DNA, 807 bp, Heterodera glycines
gcccattagactgctaaaatgggtaaaaacaaaaaaccgttcattgaccgaaaaagtgccgtaaattacacactgaacaacagagagttggaggagacgcagcggatcagtgattacaagagcttttcgtttcgttcactcgacaaacgttttgagggtatttacgaggactatgcgaatgaagaggaggagggagcggaggaaatggacgacgaagaaggacaaacgggggctgattctgcgattttccgttctctgctggcggatgggcaatcccagcggagttgcgaagaacgttttcaccgggagctgcccgattccgagctgaagggcgcggtgttgcgttatgcaaaagcgatggaaattggcaaaggaagggccgagccgacggaggacattttggtggacagtgcgaagagaagccgctgggattgcgagtccattctctccatgcattccaccctttacaatcatccgaccgaaattagggagccgatgaaagtcattgggaggcgaagggggaggacgaccaaagagaaggaaatggccaatttggaggaaacggaagttgacggagaccaaagagacgggccaccggcgccgtccgtccgcacgcgcacttcgatggttagcgtaattcgaccgaagggggagacgacggaagagcggcggatgcgtaaaattgcagtgaaagaagaacggagagagcggcgtaaggaaaagaaggcgaacaaagaaacctttcgggcggagagactgaaattggaggcacagcgaaaaacgaatcagccgaagacgcgacaaatt

SEQ ID NO: 49880 - DNA, 437 bp, Heterodera glycines
  unsure (1)..(437): unsure at all n locations
ctttactgatctgtacaccagnaancctnccaccagcaacctcatccaaagcacgctcatccaccatggncaagatcggcatcaacggtttcgggcgtatcggtcgtctcgtcttccgcgcgtcgctccagaaccccgacgtgcaatgcgttgccatcaacgatcccttcattgacctcgagtacatgacctacctcctccgctacgactcgacccacggcctcttcaagggcacgatcgaggtcaaggacggcaagctcgttgttgacggccacaccatcagcgtgtacaagtcgatgaagcccgaggagatacaatggggtgctgccggtgctcattattttgtcgaggcaagcggggtcttcctctctggggagaaggcgggactccactgcaatggtggcgccaaaaaggggggggggaatgggccatcaggc

SEQ ID NO: 49881 - DNA, 855 bp, Heterodera glycines
cgtactttcatgttgtctgatcttaccatgggagagatgaaaatcttgcccaaagatgtacaactttgtgctgaggttgcgactggtgttgaacggatgggccaatatcagtaccaagacctggtgatgctggataaagaaacagttggagtaatcgttcgtttggaacgcgaaaatgtggaagttttgagtatgcatggcaaaatacttcgtgttaaccctcaaacgattgaatgcaaaaagaattcgcggttcgtcaaggcacttgattctcaaaagaatacaatccaagcgggagatacggtcaaagttgttgagggcttcctggcgcgaaagaaggaaactgaagaagaacgtcagggcgagatcaagcatcttttcagaaattgggccttcgttttttcacgtaaatatccacaaaacgggggaatgtttgtttgcaaagcgcggaatttggcattgattggtggaagcaaagcgtcggagtcacaaatcaacactactattttggataacagtcaacttatgagtcctcgtcctaatccgctcgaaagtcctcgcaccattcacggcggaatgactccccattccgggtcaagtgttgttggtgcacaatctgtccgtggcgatcatggttttaaagcaccaagtgtggtcgggagcatcgcaacatcagcaaccggagttggtcggcaacatgtacgtcggaacatggaaataatgggcaaaactgtgcgcgttctggctggtccaatgaagggttacattggaattgtgaaagatgcaacggaatcgactgtcaaggtggaactgcacaccatgccaaaaacggtcaattttgacatcaacaaagtg

SEQ ID NO: 49882 - DNA, 780 bp, Heterodera glycines
gatcctatgcgttcaaaattcgtaattgttgcgccatgaaacccactaagcgtccgatgaagcatccctctgctcccttttcgcgcgactccccgcgctcaaaacggttgaaacaatcaacagacggtgccggcgggaaacggttgttcgttgtgattgaggactgcagtctcgaagtggccaaagtcggcgccgaacacgtcgtgttgtgcagtgacaaacacgcgaattggctgcgcaaacagaacagggacccggcccagttcaggccggacattcttcaccagtgtttgctgatgctgcaggacagtccgctgaacagtgccggtcttttgcgcgtctttttccgcaccaaacagaatgtgctggtcagcgtgagcccgcagtgccgacttccgcgcacttttgaccgattttgtggactgatggttcaacttttgcacaaattgcaaattcgggcggctgattcttcacaaaaattgttgaacgtggtcaaaaacccggtgaccaaccatttgccggtgggctgccgtaaatttctgagcacactgaactgccccaatttggtgtccaacatggccgagaaggtacagcccgaagcggaagagccggtggtaattgtggtcggtggaatagcacatggaaagattagcaccgattacacggaggaggacatcaaaatttcaaattatcctttaagcgcggctctctgttgtgccaaattgacaagtgcttttgagcagttgtggggcgtcctttgacgacacatttttttttttg

SEQ ID NO: 49883 - DNA, 853 bp, Heterodera glycines
gttccatgaatacaaatttggccacaatgtcggcacattccttcgtctgcttacgttcagccaatttcattttttgttttatgcgtcgcgaccattgccaaatacttttgcgatggtattggtgctgctcgtcttccaaaagttgctcgactttcgttttctccacgccgctgcctttgcaacggtcgccacttttttgttccgttttgaacttctccttctcttcggcccggcctttctttttgcttttgtcgtttattggcgtcacatttcggtgctcaaaactttgctcgttggattttgttcgctgattatcgtcttgattttgtctgtgcttctcgactctctcatgtggcgtcgttgggtttggcctgagggggaagtgattcactttaatgtgtggcacaatcgtagcagcgagtacggcgtgttgcccttttggtggtactttttctccgctttgcctcgtgccatgtttctctccgtctttttggtcccttttggccttctcatccatcaacgtgtccaattcgctttggtttcgctgtgtcttcccgcctttctttttgtgcttctcttctcctttttgccgcacaaggaactccgtttcattctctacgctgtcccattgttcaacacttccgttgctgttttttgcgcttggatatggaaaaaggctcgcgactcgtggttcttccgcttctgtgcctttttggttgcgttgcatttgctcgtcaatgccattttctccgtcagttttgtttatgcgagcgcacaaaactacccgggcggagttgcactgctcaaattgcagcataagcaccgcttccttcgggacaagccaatcgccgtt

SEQ ID NO: 49884 - DNA, 374 bp, Heterodera glycines
  unsure (1)..(374): unsure at all n locations
tccctttttcggtttatttttgtcactttatttgtccccaaaagcagaaaatgccgcgccaagtgctcgaattgtccgattacttcgctccattagctgccttaattatgttcgctttggccatcctcgtcttctctttcttcgtgatcaatttcttttacatcaccgatcgggacgacttgacagtgtttgagaaatttggtgcccatttgcacctctgtttgggcccccattcgatgtccgacatttaccgagggggaccacgggattatccgcagccccaaggaacggacaaggagatgaacagctgaaaagtcaaactatctgattaaataaacgattgtcaatacgctaaaanntnnnnnnnnnaaaaa

SEQ ID NO: 49885 - DNA, 471 bp, Heterodera glycines
caatgtgaagacgaagatccaagacaaggagggcgttccgccggatcagcaacggctgatcttcgccggcaaacagctcgaggacggacgaacgttggccgactacaacatacagaaggagtccacgctccacttggtcctccgtctccggggcggaaatgggaagagaaacacgggtaagaacaagaaaagcaataaaaagcttgatcagaattgatcagcagcgaacgcaccatcacatgattgattggcacagtgattttccaccaccaaattcacaacacttttctcttttccgggttatctttgatttccattttcggttattgttttctgtttttctcctctatcttttgtaaaattctgttactttgatccttagttttatcatttatcatcgcatatatagaagttatcatagtccatatttctgtccctttttatttatttttttgactataaaacttttgg

SEQ ID NO: 49886 - DNA, 537 bp, Heterodera glycines
ttcttcgctgtttcaatttttgctctccaaacaacaaaaatgtccggacgaggaaagggcggaaaagcgaaaacgggcggcaagcagaagacgcgttcatcacgggctggacttcaattccccgtcggacgtctccaccggctgttgcgcaaaggtcactacgcggaacgcgtgggcgccggcgcgcctgtctatctggcagcggtgttggagtacctggcggcggaagtgctcgagttggccggcaacgcatcgcgggacaacaagaagacgcggatcaacccacgccacttgcagttggctgtgcgcaacgacgaggagttgaacaagcttctctcgggcgtcaccatctcgcagggcggtgtgttgccgaacattcaggcggtccttctgcccaagaagacgcagcacggcgaaagtcagtgagcggaggcgaggagagaaagcatcaaacaaaactatcccaaacggccctctttagggccacaatcattcaaatggacggattgacatgctttttaatttttttgttttgga

SEQ ID NO: 49887 - DNA, 346 bp, Heterodera glycines
ttccacaaacatcggaattcaccccaaagaaagcgttcttttggctgcggaaaggcactcaatgaccaaattggtggcggaccactccctgatcaaaatttcacaagttgacaaccacattgccgtcgactcggccgctctcatcgcaaattcacgcacttgggtcgaacgctcccgcgtggacgctcacctcttttgtgttacttacggggtcaaaattctggcgaaacacgttactctatacggctcaagatcgccactgcattttagggacgacgactctactatcgagctctatcacccagactgtagctctatgctttttgccgtgattgattgccaggag

SEQ ID NO: 49888 - DNA, 515 bp, Heterodera glycines
caaacttttttgcaattttatatcttattttatattcttcatttttattggcttatcaaatgcttccgtctaatcctgacgacaaaatagatgaggtcgacaagattctttcaaaacttgatggaaaaattgaacgtaaaatgggccctttgatgtgtcgccataacccaagacagaaatgcacaaattgtctcccattggacccctacgatgaaagatttctgcatgaaaaggacatcaaacatttgtcttttcatgctcatgtgcacaaattgaccgatttgcatggccgagggacgcgctcaaacaatgtgctggagaatgtgtgctgcaaactgcgcccgaactgcgcgggtggccatttgccatacccaaaaggcatttgcacgcgttgccgcccctcaacattgacactcaacagacagccatttcgtcacgtggacaacatcgaatttgccaattcgcacattgtcaacaatttcctcaacttttggcgtcgttcgtccttccaacgc

SEQ ID NO: 49889 - DNA, 458 bp, Heterodera glycines
atcgattcaccagctctcttcaacaaaaccttcgcctctccacatttcgacgacaaaatgcctccaaaaccatccggcaaaggagcgaagaaggcggtcaagtcgaccaaggcggtgcgcacgggagacaaaaagcggagaaaggcccgcaaggagtcttactcggtgtacatctaccgtgtgctcaagcaggtccacccggacaccggcatttcctccaaagcgatgtccatcatgaactcgtaaggcccaatttggcgtttttccgtcccaagattctcaattttcccatttttaaggtttgtcaatgacgtgttcgagcgcattgcggcggagcctcgcgattggcccattacaacaagcggtccaccatctcatcgcgcgaaattcagacggctgtccgactgattctgcccggcgagttggccaagcgtgccgtgtccgaggggaccaaggcg

SEQ ID NO: 49890 - DNA, 394 bp, Heterodera glycines
tggcaaacagtcgaacactctcagctacgccttgcgctacattcagcccacttggatattttcgggaactcttgcgccaaccgaactccatttgtgttactaccacaaacagagtgaacacttgcagttcggcgttgaatttgaggcgaatttcaagcttcaggaggtgaacacgaccttcgcctatcaaattgagttgcccttctcgctggcgatcagtggcgtgctcgatcacgtcaaagcgcagggaaagttcggcatcggactgctcattggctgattggcgactgatgaggggagaagcggcgaatgttcgcaattgttagcttctgccaatttacattttacaccattttttgctggccgaccattttctgttgtgtcgccgttgttt

SEQ ID NO: 49891 - DNA, 531 bp, Heterodera glycines
ttgaaaatttatacggaaattttgatggatttcaatggcgcagaaagacactgccaaacttattacgatgaaagaaatgcatcgactcgcaacattttcttcgaccttttccattattatataaaaggcgaaatgcctcaaaaagaggtcattcaagctgaaagtgattacgaaattcggcgcaaaccaaacatttcggaggcgctgaagttgttcaaaaggcatccgaccaaaatagacacagtgggcgcttttgctctcattccgccgacaactgcattcaacagaatttgcgaagcggttaaagctttgtttgggtctctgaacaatcaattggcctcaaccaatttgattgtctctttcacaaatttggtgattagaagaacaaagaatcgcctggacgaattgaagcggcaacgcatttcgatcaccgagaatgtggaatgctcaatttgtagaaaaaggatcatgaacagtgcctccgtcagaaaccgcggacattccttcgctcactttttctgctacaaaaac

SEQ ID NO: 49892 - DNA, 528 bp, Heterodera glycines
  unsure (1)..(528): unsure at all n locations
aggaaggcagccgtaaagagaccaaatcccttaaagaggtgctgcaaaagtttcgtcatgccaaagaaacgcgtaaacgcaagaaaaatttggaccaggccaagaaggtcattgtcactgcacagcgcaagaaggaagagaagcgactgcccaaagacatgaagcaatgcaacatggaagccatcaatgccatctacgaccctcagagttttgtggaccgtctcttcacgacgctggagggtcgtcagcggaacgagaaatacgcgattagacttctccaaattgcactgtgtgctcgagtgattggtgttcatcaactacaaacgcttggtttttactcatatttgcatcgctatatacgaccaaaacagaaggaggtgacacgcattttgctatacgccgcgcaggcgtgccacccattggtgccgtcggatgtcattgaacaattgattcgagtggttgcacaaaattttgtttccgaccgcaacacaccggaggcaatcactgtcggnctgaatacaattcgtg

SEQ ID NO: 49893 - DNA, 536 bp, Heterodera glycines
gagtaattgggccgcggtgtgacaaatgcgagcctaaatatttctgagacccgaaaaacggcggcacctgcacatatgaacttgccattgacttcatcttcacttttaagctggacagcaatgacattcgggacaaatacgttaatcagatcaactttttcagcgtgccttacaaacgtgacacggacgttcaattctcgatcacatgcgaatgcgacaccggcgcaaaagtgaccattaacctgaccactcagttgctcgaaggccgtccgcctcacacaaagcatttgatggccggtcagttgtgcacggcttcagggataaagcgcacttacagctcaacagatcccggatttgcattcggaacagaaacaaatacgacttttcacgttcgggttaatgatttcgagacaccaattaagatccaaatttcatttgcacaatcattgccaatcaattggattttgttttttgttatttttgtagcctgattcattgttcttctcgatgctgcgggattgatatggatatcaaaa

SEQ ID NO: 49894 - DNA, 542 bp, Heterodera glycines
tgacatttacaatggttgaaccaaaaattccaacaacaagcgattttaacgaagaaaaccctgtaaaatcgacgccagaatcacattcgttaatcaagaatggattttttatgagtgaagaatatgggatgacaacgaaaagtgtctacacttcacaaatttcacaatctgtgataaaagctggactttattctaagaaaaatctgggagtgcatgtttctgcggcgggtagtctggaaaatgctatttggaatgcaattgaaatgggttgtcgttcatttgcgttgtttgtccggaatcagcgtcgttggaatgcaaagcctatggatgagtcagttgttgagcggtggaattgtgcaattaaaaagacaaaattcccgttgcaccaaatcgtcccacatggctcgtatttgctgaatgccgggtcacccgaccaaaaaaaattggagatgacacggaaagcgatgctggacgaatgtcagcggtgtgaaaggctgggaattcaattttacaatttccatcccggcttcacaactggaaag

SEQ ID NO: 49895 - DNA, 534 bp, Heterodera glycines
aaagccaattatttcactcgcattatttcgctttacgaagaatacccaaaatgtcttttggtcggtgtcgacaatgttgggtcgaaacaaatgcaggaaattcgcggggcaatgcgagggcatggtgaaatattgatgggaaagaacacaatgattcgcaaagccatccgtggaaatcttcaaaaattcccgttgcttgagaagctgttgccttacattgtcggcaacgtcggattcgttttcaccaacgaggatttgggtgatgtgcgcaaaaaactgttggagaacaaacgaggcgcgcctgcaaaggctggtgccattgcgccatgtgacgtgcgattgccgcctcaaaacagtggaatgggtccagagaagacgtccttcttccaagccttgcaaattccgaccaaaatttcgcgtggtaccatcgaaattctcaacgaggtccatctgatcaagactggggagaaagtcggcgcttccgagtcagccttgcttaacatgttgggcattcaaccgttttcctacggactg

SEQ ID NO: 49896 - DNA, 351 bp, Heterodera glycines
caaatcatctgccaaatccagaaagaagaccagaaaggaaactttcaacacttatatctacaaagtattgaaacaagtgcacccagataccggtgtttccaacaaagccatgtcgatcatgaactctttcgttgcagatatttttgaaagagttgctgaagaagcttccaagctagcaacttacaacaagagatccaccatctcttcccgtgaaatccaaaccgctgttcgtttgattcttcctggtgaattggctaaacacgcagtatctgaaggaaccaaagccgttaccaaataccagtcttcttaatgtgttctttaacataatataactttaatacacataaaaaa

SEQ ID NO: 49897 - DNA, 518 bp, Heterodera glycines
aaataaatgaactgtataaatgttcgacttcggttgcagagcgtttcttttccacttatggtctgttctcgaccaatttgtctcattgtcaggcattgaccaaatttttgcccgagtccaattgttgcattggaaatgagaaaagcggcaccacatcggacaacttaaaaaccccagatttcgttagtgaaaacagcacaactgtccgtttatatttggagggaattcgtgacaagctcagaccaaatattgaatccgatgttgaggctgccgatgaccatggcgatgagcgtgaagcggaagggacaagcggaacgactaagattgcggacaatgatgtgaaaaaagatgcatttccgatcccggatttatgtcctccaccaccgccatcgatgtttggaaagatagccgttgcgggcaatgagaaggaggcactgaccaacatgcttatgtcgtggtacatgtccggataccacaccggcttctaccagggtgttatgcatgaaaagacgacccgt

SEQ ID NO: 49898 - DNA, 500 bp, Heterodera glycines
ctttggaattgagctgtgagaaaatgccggcgccggaacgactcccccaattttgggttgacaataaattggcattgttggaattcatccgtttggcacacattggcatcaaaggaatggtcagcgatgcacgtaacggtgaaccaattgcaaatgccgtggtgtgggtgagaaatgtgaccgacggagacggacaaacggccatcaaacacccggtgaccacgtggatcactggcgattatttccgtccgttggtctccggctgttaccaaatcgcggtggaagcggacggttatgaaattggcatcaaaacgctgaacatcagtcagaaggacgtgaaggaagtgcccactctgatgctgatcaaggaggcgctcattgtggagaagtgctgacgacgacggcaagcgatatacgagaaatgcgcgcgatattattattataacttttttgttttaatatgatatggtgacacaatgtccagttactattacatattg

SEQ ID NO: 49899 - DNA, 420 bp, Heterodera glycines
gacgggcgactctttggtcacaatccgaggccgtaaagaatttgtcgagggagcgaaggctcgaattgaagcaattgtggaagacttggaggcccagacgcaaatccaaattgatgtcgacccaaaacatcaccggcacttcatcatccgtggcgcggaagttctcaagaatattcaaaaggaattcgattgccaaatttcgttcccgaagcaagagacaggcgactctttagtcacaatccgaggccgcaaggaattagtcgaaggagcgaaggctcgaattgaagcagattcaaaaggaatttaaatgtcaaatttcgtttccgaaacaagagacgggcgactctttggtcacagtccgaggccgtgttgataacgtcgaacgggccaaatcccgcattgaggagatcatcgaagaat

SEQ ID NO: 49900 - DNA, 511 bp, Heterodera glycines
aatcggagaaaagtcggaaagcggaaaaatggcggacattgaagcggcaccggcaccaaaatcggatgaggaagccaaacggcaggcattggccgccaaaaaggcggaagtgcgcaaacggttggaagaagcagggaaaaagggcaagaagaagaagggtttcctgacgccggagcgcaagaagaagctgaggaaactgttgatgatcaaagcagcggagaacctgaggaaccagcagaaacagcttgactcggaacgccaaaatgtgctgagcaagcgaattccgcaatgtccgaatatcgacgcaattgaggacaaaggacagctggagaagatgtacaacgacctgttccagcaaatgctcaagttggaggaggagaagtacgacatcaacttcgtggtctcgcaaaaggacgcggagatcagcgaaataaccatttctgtgaatgatttgcgtggaaaatttgtgaaaccaacgctgaaagaagtgtcccaatatgacaacaaattc

SEQ ID NO: 49901 - DNA, 550 bp, Heterodera glycines
ttctttgcacgagcaatatgttaacctgaaggaagtcactcgtgttgattatatttcatacctttcgaagttcgaccatctccacgaactttccagagaaaaaacgaagaagacgggtgcctacaaaacatatgtcctttctctggaggaatatctgagggatttcatttcccgggccaagccactcattgacattgttatggaattggatcgtgtggacaaagattttgaagaaaaattgaaggaaggcaaagtgattgggtggtccaacgaaaagccaagcggcgcaatgaaaaagttcgcgcaaccgtccgcagagatcgatgtgtccaacttcaacagccccgaggaattggaggaattaggcgccgaccgactcaaagcggcgttaatcgcactcggactcaaatgcggagggactgtgaaagaaagggctttccgtttattttccaccagaagctccgatggttcaaatgctgtcaatggaaatggaaaactcaccgctgaagacacaaaagaagagaatcggaagtacactcttgccaaggca

SEQ ID NO: 49902 - DNA, 436 bp, Heterodera glycines
ggaacagcaagcgaatagaattttgcgctgcattaagcggggagcattgatcagacaagcaaaaggtcgcgcacttcaattggcggtttccagcgacgaagcaatcgtttgctgtgtgggttccgactcaatgttggacatttacaggcatttcactgttgaagaaagcaaaaaacggtaccaaaagaaactgcggaaactccgactaagggcggactcgcaaccaacggaaagtgagaaagaaacaaatgaagcaatggaaagtgaagtatcgcgtgatgtcactactctgatcaccagaatcggggattttagagccgatgccaagctgaaatgggtcgatttatgtgaagagtttgatgacgcttcccttcacttttgtgccggacctttttgaaggaaatgggcaaatgcgtgcgttccaattacaaatccg

SEQ ID NO: 49903 - DNA, 403 bp, Heterodera glycines
gttcaccaaattgttgtacgtcgccaacgtgttcctgcaatttgtcattctgaatgccctccttggccctcagtacactttctggggcattggaattctctctgacatttggaacggaagagaatggagcgagtaaaaaccgaaagctttgcgattcgcaaacaaataaaaaggtccggccatttccctcgcgtcacaatgtgcgatttcaatgtgcgcgtcctcggcaacattcaccggtggactgtccaatgcgtgctgatgataaacatgttcaacgagaagatcttcctcttcttctggtgggtctgccgttgttcggcactctttcgtccttccgtttaggttttggttcatttttgtcggccttctctctctgctcagccttttttactgggcattc

SEQ ID NO: 49904 - DNA, 465 bp, Heterodera glycines
tgcagccggccaaccccatttacctcagttttatgtgcggaaaccccgctggggtggccgtccacgagacaatgcacgccctgggcttccaacacgagcagctccgcttcgaccgcgaccagttcatcaccatccaatgggaaaatgtgaatccgcagcagttggacttcttcaccatgtcggacgttaccaaattctcaagctacggaatcaaatacgactacggctccatcatgcaatatgcgagcacaattgcttcaagtgccccgggcaaaaagacaatggtggccaaattgaagccgaccgaaaatgaacggctaatgggacagcgggaaggactgtccctttcggacgtggaagcggtgaagaaaatgtactgccaaccgagttgtgacgacaaaataatcttttgtggcatttgggcgacgatgaatttgtgtgagttcagttgaaaatgattatctc

SEQ ID NO: 49905 - DNA, 453 bp, Heterodera glycines
gagttttgagcgttgcgacccatcggttcgacttttcgatgtgactgataatgcaacaaattcaagaataggctttttgtacgtcgacattttttcacgcgaaactaagaaaatcggccgtggtcaatggctctctatgcttggaaggcctcctaatcaactccgtgacttggacgctttggtttattttttgggtgcccatccccactccgaaaatgaacacgaatcgttcctccatcatgaagaattgagtgaaatgctgtccgcttttggccgtgctcttcaacttttactctcccgggctccgtgccatttcctttcgcttccattggctccttattacgcttcggacttcgacgcaaatgattttatgcctgcttttatgaagttttgcatatacaagccaagatttcttggacttttgagtagtccgaattcgcaaaatggacaaca

SEQ ID NO: 49906 - DNA, 557 bp, Heterodera glycines
tttggggggttaatctgctgattggcacggacacgggtctgatgctgttggacagaagtggccaaggcaaagtttaccatctgatcactcgccgtcgctttgaccaaatgtccgtcatggagggacagaacattttggtgacaatcagcggaaagaaacggcgcgtccgcgtttattacctctcgtggctgaagcaaaagattctgcggactgaagggttgcaacagacggagaaaaggaacggatggacaaatgtcggcgaattccaatgcgccactcatttcaaaatcgtgcgctatgagcgcatcaaatttttggtgattggcattgaggactccatttccatttacgcgtgggcacccaaaccttacaacagattcatggccttcaagagttttggccaattgtcccatgcgccggtaatcgtcgatttgaccatcgaagagaacgcgcgtctgaaggtgctttacggcagccttgccggcttccacgccatcgacttggactcggcgtccatttacgacatttactcgcctcacagagcacaatgtggccag

SEQ ID NO: 49907 - DNA, 268 bp, Heterodera glycines
gaagggctaccaccatacgacggaaatcgactccacgatccacccccttggaaatccacgctcaacttccaactgcaatagatacccaatgaccaacttcgacatctctgagaaaaacattaacccaacgactaatttcccccactatgggctgtacaagcatgacattccgatgatccgtgcctggtgcacactaagcaaaaggccttccatcacattgcgcaagactttgatcaagcacaccgcacggttacctctccataagaaa

SEQ ID NO: 49908 - DNA, 408 bp, Heterodera glycines
  unsure (1)..(408): unsure at all n locations
ctgtaccgttcaaacagttcactccattccgtgatcactttggtcactttcttccgatggcgtttctctagacgttcctccgcatcacggaaacgttcgtgctcattgccttgcgggtcgtccttaaagtacgggtcctgctcggcctttgcgtccgccgtcgtctccttctttgcggttttgtcatccggttcttcctcttcgtcgtcatcgccgtactcctcgtcgtagaaaacacaaatgataggggatgaaagaaagaaagaaacgaacgaattgtattgggtgtctgttggtcggagcatttactttcttcctgcgcttaaacgacagagggaacggacgaacagaagtcggaagaggcgggggggggggaaggancncnaacgggtcggggcgggcggagta

SEQ ID NO: 49909 - DNA, 271 bp, Heterodera glycines
agacaatcatttgtgggggaaattcaacttgaccggcattcctcctgctccccgaggcgttcctcaaatccaagtcacttttgagatcgatgtcagtggaattttgcacgtgactgccgaggacaagaggactggcaataggaacaagattacgatcaccaatgatcactaccgactggcgccggaagagattgagcgaaggatctattttgccgaaaaccccgcagaggaggacaagaaaaccaaggaactcgtctgagcgaggaacgaa

SEQ ID NO: 49910 - DNA, 396 bp, Heterodera glycines
  unsure (1)..(396): unsure at all n locations
cgtggccagcgtgttcggcctcggcttccccccgttttggggcggtccgttccgtttcgtcgatttgtacggggcgcaaaagttgatcaagcacatggagcgctacgggaacatttactcggccgtgcaattcaaaccgtgccaactgctgtctgactacgccaaagcgggccgcaaattctacccaaaatgagcgtccgaagttggaactgtgacaacaaaagaattgggatgaatgagttcgttaaatgatcgatgatatatgctgccttttatttcaatgtttatagcgcaggacagatcagaaatttgtatttaataattatttcattagatcatttctggcgttttgacaccaaataaatttttcggtcctcaaaaaanaaaaaaaaaaaa

SEQ ID NO: 49911 - DNA, 383 bp, Heterodera glycines
gaagatccaagacaaggagggcgttccgccggatcagcaacggctgatcttcgccggcaaacagctcgaggacggacgaacgttggccgactacaacatacagaaggagtccacgctccacttggtcctccgtctccggggcggaaatgggaagagaagcacgggtaagaacaagacaagcaacaaaaagcttgatcagaattgatcagcagcgaacgcaccatcacatgattgattggcacagtgagtttccaccaccaaattcacaacacttttcccttttccgggttatctttgatttccattttcggttattgttttctgtttttctcctctatcttttgtaaaattctgttattttgatccttagttttatcatttat

SEQ ID NO: 49912 - DNA, 481 bp, Heterodera glycines
ggcccagttgaactcacaaaactgtccctatttaatgggaaaaccaaaaatttttttcatccaagcgtgccgtggagaaatcaaagactttggagtgctccgtgcgttgccaattggcacggactgtgccgacggcgcggtctcttcaaaagcggcggcgtccaacaacagcaaaaggggcccactgagcatgttctcgcgcaacagttcaccacggaacagtttggcggcatctatccaaattccgttacatctgcgaaatgagggcgaatgttcagcaaatttgacatccaaggaaatatttcaaaaagatcccacaaatgctgacctttttggtggtccattcgaccaccccccattatgtgtcgtggcggaacagtgcaaacggcgcttggttcgtgcagagtttgtgcaaagtgttcagtgaaatggccccgaagcattgtgaaattcttgaaatgctaacgacagttaattatga

SEQ ID NO: 49913 - DNA, 484 bp, Heterodera glycines
gaaagaggagatggaaagtgcgcagcgcgagttggaagtagcacaagggcgaattcggcgcctggaagatcaaatttacgagttgaatgaggcaaaacgattgttggaagaaaaggagcacgagctacaaacattgaacactgaactggcatcagagagagctatgagcgaggaggaacggtcaagactgctcactgaaattgcaatgcaagaatcgcgcgtttccgaaatgcgattcgaagttaagaacaaaacggatgagatgaacaaactgaaggcggaggttgaaagtgggaagacaactgcacacatttacaacccgggcaatggtcatttgccgaccgaattcaatgacccggacgatctgacaaacgcccacattgaattgagtacattccacgagggagacgtcaacaatgtgatgccacagcgtgaattggatcggaccaacttcactgatcaggacatgtcgttgaagacaaac

SEQ ID NO: 49914 - DNA, 475 bp, Heterodera glycines
aaaaattgatacatttttaatggatataaaaaccaaaaagaaccgtcgatatgaaaaaattaaacatttgggtgaagttcgcaaatgtttaccaagcaaaggacattgaaaccgggacgatagttgctgtgaagaagatcaaacttggctcaagacatgaagcgcgcgatggtgttaataggacggcaattcgcgaaatcaaattgttgatggaaatacgccatgacaacataatcacacttttggacgtgattggtcacagaacgagcatccaattggtattcgactttatggagacagatttggagaatgttatcaaggatagtgaaacaattctccagcactcccacattaaaaatatgcttttgcaagtctttttgggccttgaacaccttcatttgctcttcatactccaccgagatctaaagccaaataatttgcttatgaatacttctggtcgcataaaaattgctga

SEQ ID NO: 49915 - DNA, 539 bp, Heterodera glycines
ctcatcgttttaagccgttttaaatctgagcaattttgagtttgggcccttaaaaacttatttattttttatgggacaattaaaggaagcgatacccacccaaaatggaaatgtcgacttcatttcttgactctttgcctggattttctgttgtagattttaatggaagtcatgagaaaagaacttgtgttcctggttagtgtaaaaaatttaaaaagttgtgattcgcttttctttaggtgaacaattattttcagtctcaagtggatatcatgcgggaaatggctgttatgaatttcatggttcaatatgtgcttctcttgcaggatttttgcacgtttattcacttagagattcgcaaaacaccgagacaaacattgtcgaagtgagacgcaacattgacgagagaagcaatgtgctgccgtcacagggaaagatagtcactgcaagggtgaatttgaaattttaatatacatagttctaatttcgattttgtattacttagcatatcgatttaccaacaaaaatatgaagagggg

SEQ ID NO: 49916 - DNA, 142 bp, Heterodera glycines
tctgaagaagttggtgtcaactcaagttggaaccaaatgggacaaattgcttctcaagaaatggaacaccatttatagggatcacatcacattgcccgactactagatccacgacggattcaatttcgagctgtactatcaa

SEQ ID NO: 49917 - DNA, 494 bp, Heterodera glycines
gtgatttcatctctgaagttcaaaatgttcgcgaactgttctccgtccacgacaatccctacgaagcagctattggctgttacgcggtcgtaattctaaccgagtgggacgaattcaaagatttggactataatcgaatctacggggacatgaaaaagcctgtatgtccgttcgacggacgccgaattgtcaacgaagagaatctgcgaaacatcggtttccgtgtttttaaggttgggtccgcgtcgaatcagactctcaatttcttcccctaatttttaatataattattgttattgcctatctcgtcatcatttgttatcaatttaaatcaattctttaattaggtaacttaatttgactgtttacttaaatattcctacacattaccaaaaattccagttttaaaatatgaaatcatgcatttggtttattcatttaatttaagaaatggaaacaaaaaatataaatcaaatgtcgctttgcttgttctg

SEQ ID NO: 49918 - DNA, 518 bp, Heterodera glycines
atgtggcgggcaatttgctgatggtcggcaccgcgcacatccattgggaccccgagttttgcgatgtcaaactgattcaggcgatgatgttggtgcatgaattacagaaaatccttgacagaattgctctcaaatatcatctacgcacgcaacaaattccggtgcttgttactggcgactttaattctcttccggagttgggagtgctcgaatttttgagcaaaggagccatttcgaaggaccatccggacctgaagagtttccgcgaggacagctgtttgagttgtttgtcagctgaccatgaggatcagcagaactttacccactcacttcgacttgacagttcggtggacgcgagtcaaatcccgttcacgaactacacgttggacttcaagggaatgatcgattatatttttgcgacccctcaatcgttggctcgtcttggtattctcggccctctcgactcctcttgggtgcagcaaaacaaattcgttggttttccccaacctcatgtgccc

SEQ ID NO: 49919 - DNA, 302 bp, Heterodera glycines
gactgcttccattggccacacatgtcacggaacagtgccattctttgacactgatcggtttgatgacgattggatcgattagccaaagtttgggaagcggagacgaaaatgcggactttgcactgctccgaaagttgcgtgacgcattgcaaacggaactgcggttgtccaccgagttggagttgtccatgggaatgagtgccgactatcaattggcgatcaaatatggcagtacaaatgtgcgcgttggttcaaccatttttggtgtaccaaattataccaaaaaaattggacaccgaaga

SEQ ID NO: 49920 - DNA, 650 bp, Heterodera glycines
gtcgcgggtgtgtggcgatcgtcaaatatttgacatttaacaaagatggctctgcgatcaacaaatatcgggtgcacccatttgttacggaatcgtaccgaaaaatcatggaatccggcgattttgagcagttgatcatggaacagggatggttggactcggccgtccaatggaactccacaatccttgcccattgggctgaccaaagtttggctgaactgctcgacaaaagcttttcaaggcttcaaacgccaaaattgcgttgggaatcgatgaaactccgatttgatgacgcaacgccaatcaatgcgcgagggatcaaattgccaccgacaccttccgatgaagcgagaccatttttcatttcattggtcatgacatttgcttatccgcaactccacgcacaagtcactgctgggctcaaccatttgctgaaatcgcccttctctgttcatccagaaaatggaaatgttaccattccattgagtaccaaagaaatccatacctgtgatcccaatgtagtgccacaaattaatgaattattaacacaccttagctcattacaatcctaccgagaaaacaaagaaaatcatcgttcaattatctatgcgcaaactttattagcttcacacattactagatttgaacaa

SEQ ID NO: 49921 - DNA, 510 bp, Heterodera glycines
acatcgccgatcagctgctggcattcagcgacgcgcacatcgctttggtgttgaaccgtcctgagaaaaacgaaaaactgagcgaattggccacggaacactcggagaatgtttcacagtttgacagtttcggtaccggcgacaatgcgcggatacgcgtctgctgggcaaatcgttgtgcgatggcattgtggcatttcaaatgggccaattcgaacgcacattcgacttggtctatccgatccgaacgcaattgtacaaaatcagtgggagcaatgcgcagcgagacattttcacccaaatgcttcttcacgcggcacttcgctgcgcggacaatgagagacggtcaaaagcgactgtcttaattgaggaaaggaacaaaatgaagccgaattcggcggtcattgaacgattgcttcaaaagcataagcaaacagcgcacaacaattgttgaattgacacattttcagcaaattataaaataaatcttttaaaaaaaaaaaaaaaaaa

SEQ ID NO: 49922 - DNA, 434 bp, Heterodera glycines
ctcccaaaatgtattctcacgcgacccccggtggcattgggtttcaagtggtggcacagcaagccaccaaattcaatgaccaatagggcaagctgatcctgcactgggtcaaaaagctaactggtgaaaactttagcacggatgggagccgagagaattcctataaatcggtgaacgatggtactttgttgtgcaaattgaccaacggcattcaccccggatcggtcaagaaaattcaacaaccgaccggcaatttcgcctgtatggaaaacatcaacgcttttgtgtcatttgccaaggcccaaggagtgccaacggaggaaacttttcagagtgtcgacttgttcgaggctcgcgacctgtactccgttagtggcactgtgctctcattgggacgaatcttggaaacgaagggcaagccaaagccgttctct

SEQ ID NO: 49923 - DNA, 534 bp, Heterodera glycines
  unsure (1)..(534): unsure at all n locations
gcccgtcactcattttcttccctttcctttgtcttccattcattccgcttttccctccccatttctcaattgttcttctccgcttcttctctccccgatgaatcactttgggctgacttttctgttcgtcgccgtttctctgctgctaatnntgcgcccggcttcgatggcatgcaaattttcgtgaagacattgacgggcaaaacgatcactttggaggtggagagctcggacactgtggacaatgtgaagacgaagatccaagacaaggagggcgttccgccggatcagcaacggctgatcttcgccggcaaacagctcgaggacggacgaacgttggccgactacaacatacagaaggagtccacgctccacttggtcctccgtctccggggcggaaatgggaagagaaacacgggtaagaacaagaaaagcaataaaaagcttgatcagaattgatcagcagcgaacgcaccatcacatgattgattggcacagtgattttccaccaccaaattcacaacactnttctct

SEQ ID NO: 49924 - DNA, 597 bp, Heterodera glycines
taatcctccaatccgtctccattcatttccaaattattcaaatccgataaaatataatacacaaaaatggaatattttccttctaaatttgtttgctgcttgctcattgcattgatcgctgttccgtgctctgttttggcactttctgatagcagccgcgtagcggtgctcgccttacacaacaattaccgctcacaactggccaaaggcactgcagcaaatttgaccggcacaatgccggcaggcagcaatctaattcaacaaaaatataatacgagcattgagtcggtagcgcagaattgggccaacggatgctcaatgtcccactcgagttcatcagggatgggagagaatttgtacatgaccagttcgtcgacaatttcggaagctgatgcgctgaaacaagcttgcgacatgtggtgggcggagctgaagcagtacggcttccagtcgagtcttgtgctggacatggatcagttcaacaagggcatcggacattggagccagcaagcgtgggccaacactgctcaaattggctgtgccatggcacgctgtccctcctcgacctggaagacatgggttgtgtgccactacaag

SEQ ID NO: 49925 - DNA, 310 bp, Heterodera glycines
gggcgacattactgaagagcagaaaaaagttgctgaggcggccgtactcagtgagcaggttgccgaaaagggctccaaacaatcgcgttctgaaaagaaggctcgtaaactattcagcaaacttggcctcaagcaagtgcacggcgtttctcgcgtatgcatgcgcaatttgaagagcattacgttcgtcatcaacatgccggacgtgtacaaaattccaggctccaacacatacgtcgtttttggcgaggcataaattgaagatttggcgcaacacgctcaaatcactgacgtggagaatatgaaacca

SEQ ID NO: 49926 - DNA, 569 bp, Heterodera glycines
cttcggtaaatgactactgaaaaagaatcatcgagtggctccgacgatgtgattaatgccagcgaatttgccagtgaggaaaccttttactcgcctcctgcccaaaaatcggtgaaggaaatcatcgaagctgaccataacgacgaaagcctgaaaaaatataaagagcaacttctgggcgagaatgcttcaggcccggtgttggtggagcccgacaaccccaaaaatgtgcttgtaagacgcatttcgctggtttcggacgaccaagtcaagcacagcatggacctccccgcaaagggtgacttcgtcttctgcgtgaaagaaagctgcacctatcggatacgcttcgaattcgttgttcagcgtgaaattatatgcggactcaaatacgcacacaaatgaccaaagagttgtacatgctcggctcctacggtccccggcacgaaccgtacacttacgaaacatcaccggaggaggcgccttcggccggggaaaatatcgagtacattccctcatcaccgacgacgacaaaaacatttggttggattggtcgtggcacatcgaaatcg

SEQ ID NO: 49927 - DNA, 400 bp, Heterodera glycines
cgacgtcgaccaacaatacattgtgccctcagtgacctcctttacaaaaacaattggcactatcccatcgccctactgggtggccatggacagctcgggcacatacacaaaggtgccacctaccaatccctactggtatcacgcgcgcccgtcatccctgcctccacctatgaacatccgatcaccgtccagtgactgctcgtgacctaacgagtatggtggaaaaaatcgccgcagattcgcacccatgcactacaccaaggcgtacggggcagtgattcataaggcattgcactcgttggaggaaatcaaatgggtggagaaagacggaggcactggtggacgcaaactgaccaaacagggccagaaggatctggaccgcattgcgtcacagctgcgt

SEQ ID NO: 49928 - DNA, 472 bp, Heterodera glycines
tccattgggcaggcctttgtccaacacttttacaccaaatttgatgtgcccgatggtccgactcgcaccgtcggccttcatgatttgtatgatgctgaacactcttttatgacttttgaggggaaccaagtgaaaggtcgacaggccattttggacaaatatggagcgctacctttccgaacgattcaacatgggattacaaaggttttctccaaattagtcttttgcctttcattcttttcggtttggaaatttattaaccaataaaacttcagactgacagtcagccgcttccggatgggtcaattttggtgacggtgattggtcagcttaagaccgacgatgacccagtgaattcattcaaccactgcttcattctgagaccaaattcttgcgggggatttttcatttcgaatgaagtgttccgtcttgttttgcattgaagtgctgaagccgttctctcgtggacatt

SEQ ID NO: 49929 - DNA, 699 bp, Heterodera glycines
gcaaatcgcacagctcgagacgcacataccataaaaggcacaaatcctcaatatttaattgaaaagatcatccggactcgcatctacgattctctttactggaaggaacagtgttttggactctcagctgaaacagtcgtcgaccgtgccactgaattgcgttacattggtggaatatatgctgggaacataaagccggctcagtttctctgtcttacactcaaattgctccaattgcaacccgacaaagacataataattgaatttataagacaagacgacttcaagtatgtccgtgctttgggtgccatgtatatccgtttggtatttaattccgtcgaagtcttcaaatacttggaaccgctgtacaacgattaccgaaaactgcgttacatgaacagaatgggaaaattcgagttgctatacatggatgaatttgtcgacaatttgttaagagaagaccattattgtaatatacagctgcctcgtctacagaaactgcaagcactcgaagaataggaccaactcgagttgtacgctttcgccttggacgaagacttagagcgtctctccaccgactccgaagatgagcaggagacgcgtaacagcactccaaatatcggttctctgcgccgaagtctcttgcgcatccgtggccgaattctgagcaaatccagagaacggatacgccgatcactt

SEQ ID NO: 49930 - DNA, 193 bp, Heterodera glycines
ccttcgtggtggaaaggtccacggatcattggcgcgtgcagggaaagttcgtgctcaaacacctagagaggagaaacaagaaaacaagactaagaagcgtggccgtgccttgcgtgacattcattacaaacgtagtgacgtcaacgtcgctgcaacaggaccgggccgacgacgtgggccaaactccaatgct

SEQ ID NO: 49931 - DNA, 519 bp, Heterodera glycines
agaaatggcttttgtaaattctttatcgtccaacactaaaacaattcactttttgaagaagtctttacttcttgcacacaattattgcactttttcgcgcgaatggtctgagatggaatatgaaaggcgcgctgaggacactttggtggcactcactgagtatttggacacattgccggaccgtgtcgattgtgaatctgtaagcatttaatcagagacattttgatgtaaaataaaggccttcgatgtttcatattcaatgggcgttttgaccgcgcacataagcccacgaataggcacttatgtgatcaataaacaaactccgaacaaacaaatttggctttcatcgccagtttctggtccaaaaaggtacgacctcagcgacaaaggccggtgggtgtataagcatgatggagttacgctacgcgaattgctcgagaaagaatttagacacattttcaaaaacgatcaaatttcgttacatcagagttaaagatttatcgttttttataccgatat

SEQ ID NO: 49932 - DNA, 295 bp, Heterodera glycines
gtcgccacatcatgaccgcgccgatgtctgaatgaatggcccaagatacaccgagtgcattctacgcacactcccgattgatgactaggtgactgtcacccgaggccactacagaggcaatgccggccgactgatgcttgtgtgtcggaagaaagatgtatagcacgttgacaaaatcactcgggacaaggccatcactaacaaccgcgccctcggaattcatacttgaagtgtgcagatcacagatgtgaagatggacaaggaccgacgttcattgctcgagaggcaagcggca

SEQ ID NO: 49933 - DNA, 525 bp, Heterodera glycines
cctcgatggtgacgtcatttcctgtgtcattttttctgtttttttctacggctctaatccacggcacaatgggaggccttttctggtcgaaaaagccggcggattcagcggacgattcgctgtggagccgataccatgatcaaaatgcaatggaagagttgttggagaaggtgcacagcaaatgccccaatgtcgctcgtctgtacagcgtcggccgatcagtccaaggccgcgatttggcggtcattgaattttccctccatcccggacggcatcaaattttgaagcccgaaatgaaatacatcggaaatatgcacggcaacgaggcgatcggcaggaaattggcatcaaaacgctgaacatcagtcagaaggacgtgaaggaacgacgtccacacattgtgaacttccaattgcgtccgatcgaagttgaagtgccggaggcgcgaattggaagagaaatgggcgaggaagaacggggggaggaggagaacggaccactgacaccagaacaagcagccgaatt

SEQ ID NO: 49934 - DNA, 488 bp, Heterodera glycines
aacttcattgtatttgattgacaacatgtgcgatgctaaaatggaaattgaggagagtgcgacgtctacttctgttgcttaattatcagcgattaagaagcgttttgaagtcaaaaaatggaacgcagttgcactttgggcatgggacattgttgttgatacatgtgccatctgccgtaaccacataatggatttgtgcatcgagtgtcaggcaaatcaggcttcttcaaccaatgaggagtgtactgttgcttggggcgtgtgcaaccacgctttccatttccattgcatttcgcgttggcttcgtactcgtcaggtttgtccgttggacaatcgcgactgggagttccaaagatatggacattgagttgccttgcggttattgcacacggctgaatatttgggatcacgatcattatttaaatatgtgttttgttaggtacttgacaaaatcatgactttgttttttctatgaaagtattaaaaag

SEQ ID NO: 49935 - DNA, 232 bp, Heterodera glycines
tgcgggaagcgctagattgattgtcccgagaaatgttcgtcgtcttctcgatgatttcggctcagaccacgcttttattcgattggaggttgtgtacgtggatcaggcgactgggcgaatgattcccggcaaaacgacgaagtactccatttgtggaaagctgcgcttcatgggcgagacggatgattgcattctgagcttggctgaaagggatggaataattccaccagat

SEQ ID NO: 49936 - DNA, 511 bp, Heterodera glycines
  unsure (1)..(511): unsure at all n locations
atgcaacaattgtctaaaaagtcggcttgggtttccaaagtttcgggcgagttgctgttggccaaagtgaagcaaatcaccaccatcggactgcagagggacacctgtgtcaaagtcaaaatctccaaaaacaatttctacgaatacaaccgaatgttcttcatgagttctgcctatgaatggtcgctcgaccccgagtccaaatgcagggtgggcgacgttgtgttgatcagacgcctctcagagatccacagaccatcaaaaactgtccagtacgctgtggaaaaggttgtgttccaacatggcaatttcattgatcccgtgacaaagagacgcgtgtttggtgccaaagaatttgagaaggaagtcgaattgcgcaaggatctcgtcgacaaaatatacagcgagccattgggggaggaggacgaaggcattaagaatgatgatcagctgaagcggaacaaaatccgacggaggatggaggagcanagggaaaggagggcaaacgacg

SEQ ID NO: 49937 - DNA, 562 bp, Heterodera glycines
gtttgacaacaaataagaactcgtccagcggtttaagttggctgagcaagctgagcgctgggatgacatggctcagtcgatgaaaaaggtgacggaattgggtgcggagttgagtaatgaggagcgcatcctgttgtcggttgcatacaaaaatgtggtcggtgcgcgccgctcctcgtggcgcgttatctcgtgcattgaacaggagactgatggctcggagaagaagcactagatgtgtcaggaatatcgggagaaggttgagcaggagttgcgagacatctgttacgacttgctggatttgctcgacatatatctgatcccgaatgctggctacccggaatcaaaggtgttctacctgatgatgaagggtgactactaccgctacctggtagaggttgtcatcggtgatgatgcgatcgctgttgtcgagacgtattagccgtcattccagtaagcgtgtgacattgccaatgacagattgcagccgactcatgccattacgttttatattgcgctgtacttgtgtgtgttctacttagaagatgtgatttcagcggat

SEQ ID NO: 49938 - DNA, 304 bp, Heterodera glycines
cgttaaaacaaaggaagaagactctaaaaaaacgacaacggacgacggatcgagttcagaggaagaagtgcccgagctcgaagagggcgacgttactgaagagcagaaaaaagttgctgaggcggccggactcagtgagcacgttgccgaaaagggctccaaacaatcgcgttctgaaaagaaggctcgttaactattctgcgaacttggcgctccgcgggtgcacagcgtttcgcgcgtctgcatccgtcaatcgaagagcgttgttgtcgtcatcaaccagccggacgtgtacgagagttcg

SEQ ID NO: 49939 - DNA, 187 bp, Heterodera glycines
tgaccatctgacttatgttcgtgagcaatgcgatcataccgttgcccatttgaagtccattttggaggaatgcaacgagcgcgtgcggaccactcctaagacgactgtaattagtcacatggagatgatcgactacatggagggcctagatcattgtgccaaacggaaggcattcaaagcactgaaa

SEQ ID NO: 49940 - DNA, 283 bp, Heterodera glycines
gattcacaaactctgtcccaacattcgcgtcggtgattctggggaccgcctcactcatgctgcaaaggactgagaacaattgactggtcaaactccggctctgtccaaggctcgtcacactgcgcgctcgctcggaattcatgggagtgaaaaaatcgctgggcattgcacagatcgtggaccaaaagctgatgaaatcattgatcgtgggctcaaagtctgcgaatatgaactctaccgcgagaatttttccgacactgccacttttgggtcccccattcag

SEQ ID NO: 49941 - DNA, 386 bp, Heterodera glycines
tgaaaatcgtctagacctatttaatttttcgaaaaatgtctgacaacaaagaagaactcgttcagcgggctaagttggctgagcaagctgagcgctacgatgacatggctcagtcgatgaaaaaggtgacggaattgggtgcggagttgagtaatgaggagcgcaacctgttgtcggttgcatacaaaaatgtggtcggtgcgcgtcgttcctcgtggcgcgttatctcgtccattgaacagaagactgagggctcggagaagaagcaactgatcgggcggacagacgttgaagaccaagaaaatgccccacgaaattttttccaccgaatcatttaatgacaattatgcttttctcaatatggcacttttgattgggtaaatttt

SEQ ID NO: 49942 - DNA, 391 bp, Heterodera glycines
cctttgtatggttttccaaagggtcgcaagccaagagaaatgcaggcttcgtgggaagaattggagaaaatgaaaatgccgattagtgagcgagattattgtgcccataaaatggttgctttgcgcaaatgcgtttgggatagggcgccatttgcctcgcattattgccatggacgtcgacacgatttgggactgtgtctttatgatgatcatttgatgcgtatgaaagaatttgagcgggagaaaaggctccttatgagaaaggcaagaaaggaaagggcaaaggctgcttaagaaactaatgttgatttgctagacaattgtatctttgtggcctctgattaggaatatttccatgtttatgtgtaaaatcattgcttaaaaaaaaaaa

SEQ ID NO: 49943 - DNA, 524 bp, Heterodera glycines
acatttgcgccttaaacagcatgcacaccggttcaaataatagggttggcattcggacggggagtgccgcatcttctgcatcagcgggtgctgtaagtgatgagcagttccgttcgtccttcgaggcggtgccaaatgttcgggtggaatcatttcgcgatttgattgccgaacttcaaaaacaagcggctttgctggagaatgtgaacaacgattggaccaagcgaataaaagcgcttcaaatgttacgtgcccttctcgtgacggacattggctgctatggtgccctcgtggaacagtcctacgccctgctcggcaatgcctttcttttgtccgtcaaagacctgcgctcccaattgtgccgcgaagcttgcattaccatcgcgttattttttgccaatttataaattcgatctgatttcttcaatgatctgggtttaggagaccgcccaaaaagactcgcattttaaaaatttgaaaaaatgtacggaaatatttttgtctgccattaccaattaatcaga

SEQ ID NO: 49944 - DNA, 472 bp, Heterodera glycines
ggagcatcaaacgcgagcagttttatgtgcgctattatgttggccacaaaggaaagttcggtcatgaatttctcgagttcgaatttcgcccggacggcaagttgcgctacgcgaacaattccaattacaaaaacgacactttgatccgaaaggaatgctatgtgggcaagtcggttatggacgaattgaagcgtatcattgaagattctgagattatgaatgaggatgatgccaattggcccgaacctgaccgagttggacgtcaggaactcgaaatattgagcgggaatgaccacgtgtcattcactaccagcaaaatcggttgtctcgtcgaagtgaacgacagcaaagatccggtgggactgcgctcgttttactatttggcccaggacttgaagtgtttggtgttctcactcatcggactgcacttcaaaatacgaccaattgcgcaatgatggactaattggtgacg

SEQ ID NO: 49945 - DNA, 378 bp, Heterodera glycines
atttgagggatgtctggtgacaattcggcacttattgcagcggagcaagcggcgtatggcccattttttggctcacttggcgtcactgcggcgatgattttcaccgcggccgggtcggcctatggcacggcaaaatccggtactggcattgcgtgtatggctgtagcaaggcctgacctcgtgatgaaggcgatcattcctggtgctcggtctctacggaatgattgtctcactgctgctaagttcctcctgaacaatggaaggaagaaagaaggaaagaatggcacgtctgctgaacattgtgccgaccgtcgtgttttgatgatcaaaatgaccagccaccgtatataatagataaactagcgggtgcgtaaaaaa

SEQ ID NO: 49946 - DNA, 468 bp, Heterodera glycines
ccgaagaataaagggaaaggaggcaaaaatcgtcgccgagggaggaatgaaaatgatataatgaaacgggaactcgtcgaaaaggacggcgacgaccaagcatatgcccaggtggtgaaaatgttgggcaacggtcggttgacagcattttgttttgacggcaaaaatcgcctgtgccacatacggggcaagttgcgcaaaaaagtgtggatcaacaccggcgacatcattttgatcggcttgcgagggtaccaagatgacaaggcggatgtgaatttaaaatacacgccggacgaggcacgcattctgaagaattcgggtcagttgccggagagcacaaaactgaacgaggtcggcgaggagcaaaatgagggcgaagtggaattcattgacaacggcaaccggtctgacgaggacgaagtggctgcgcaagaccgcaacttttcgctgagcgaaagcagcagcgaa

SEQ ID NO: 49947 - DNA, 219 bp, Heterodera glycines
caaaattcactactgcaagcgtccggacaacagcacaaagtcgtgcaaagctcgtggttcagatcttcgtgtccatttcaagaacacacgtgagacggcgcgtgccatcaattggcacgtggcgaattctgagtgacccgaggacatccccgaaccacactctctttgtgcggcttgttttgttatttggtggcgataaaatttgttgaaccttaaaaa

SEQ ID NO: 49948 - DNA, 500 bp, Heterodera glycines
agacagcactgtgctccaaatcgcggaatgcttttctcttcaaacgcctcgtcagccccgtccaaattgattgccgtccaatcaccggcggtggttttggccatccaatgaccaggcaaaagatgcaaatgtacagcccggaaatgagggcagtcaattaccaacaaaagcgcacccacatgcatgcaattctcaccaagaaaactgttgaagaccgagttatgctcaacttacatttgtttgacaaggtggacaatgacaaattgacgttcgactccgattttttcaaggatcttgggattgattcgcttgactttgttgagtttatcattgcgattgaggacgaatttgagttcgaaattccggacggtgactcggacagaatgcgaacgccacgagatgtttacaattacatttgcgacaagtgcgatgtgtacgattgaatgtatgacaaatgctgccgtcaaaaaattgttctttgttaaagctaggacataaat

SEQ ID NO: 49949 - DNA, 492 bp, Heterodera glycines
taattatcatcctttccgtcacattcttatttaaagcaatgccgaaaatggattttgacctcttcgatatgttcgcacccattgtggtggcattaattttcgcggcaattctccttattctttccttcacttgcatcaattggtactgtatcacgcaaaaggatgacctcacaatattcgaaaagctcggcgcccgtgccaacctccgtctcggcccccacacaatgatccaaatcaaacggggcgggtacgcgtccacctacgccagagaagaagacgacgaacgccgcaagctgaccatgacaagtcagcagcagcaacggatggagctgttgctggaggaggacaatccaaaaggaacagtcgcgcagatttaactaacaaaagaacacaacgttcagaggcgtattcaaatcttatgtctaatgaagcttccgccctcccccttttttgaagaaattttaagccataaaaatagcgaaagtgttaaaa

SEQ ID NO: 49950 - DNA, 545 bp, Heterodera glycines
cagtcagtccagagaagaacggcctcgaaaattgcctaaacaaaacaacggcgaaccaaacgaaaatattgtacgaattaatcgaacggaaatgccagaggaatttcaagctgttcttttatctgacaatgttgttcagcaagtaatgaaaagtggccaaaatacgactaatgacctgcggacacgcgaactcgacaaagaactcacaatgcagagagaacggaacaaacaactcacagaacaacttcgaactttggaggagaaacgggccgttgaaagtgcttccgccgctgtttctgcggcggtttctgccgtgaaaaccattgaaacatccgcacgaaattcgaaagaggaggaaattgaggaaaaacgacgcattttcgaagagaccgccaaacgattggaagaaacttttctcagcagacattggcctgatgcatgtgcagacgaacaaaaggaaatcgtcggatgtctcgccaaatttcctggccaagttctttcgtgtcattctcttctggacatttatcggaagtgtatcaacaatt

SEQ ID NO: 49951 - DNA, 604 bp, Heterodera glycines
acgctgaaacattcaaactttggcgcgtacgtaagactgttatgcaggtagttaatgtgaaggattttggtaaagtgtttgacttgcgtgtctttctgaccaaagaggcgattcgtttgttacataaatttgtctgcagatgtgccacgaccgagggtatttggttacgcaagacgagttggaccaaacgctggaccaattcaaggaccaattcggcgatagacccagcgaacggaggcccggcaggggcgagctgaccattttggtggcacataatgacgaccctactggtgaatcctacagagaaggagctttactaaaatgccgttttctagaccaaatatctgtcaacaaatgcaagaacagaacatcactcgagcgatcattgtggttcaaagtgggatgacaccgagcgcaaaacaggcgattgtggacatggcgcccaaatacattctcgagcactttttggaggcggaactgatgataaacatcactgaacatgagcttgttccggaacacgtggtgatgagcagcgaagaaaaagcggaactgttggcgcgatacaagctcagagataatcaactgccgcgcattcaagtcagtg

SEQ ID NO: 49952 - DNA, 397 bp, Heterodera glycines
aaatggtgtgtcccccgtcttttgagcgtgctccctccatcatcaacaaacccaacggttcggtgctgttcgagtgcatttggaacgcgaaccccgagccgacggtcaaatggtttttgaaggacaaagaattggcgggcgatcgcttcgtcagcaaagtgaagaagcaagtgggcaagtacttgtgcacactgaccatcaaatctccaaatcagcaagatcaaggcatttacaaggtcgtcgctacgaacccccaggggacgcactccgtctcccaaaattacatgctgatgtgcaccgccaacgaagtgttcaaaacccaaatggactgaaaacggataaatttttacaaaaatttccaacggattttcaaaaataaatactttcagattcaaaa

SEQ ID NO: 49953 - DNA, 472 bp, Heterodera glycines
atcacaaatgagctcatccgctttggtaaagataaagttggatcaggaagtgtgtgctgatgctgagaaattagtgcgcctttacactgaattggcagatgttcaccggaccagaatttcaaaattatattcggcgcatgatcctcaaatcgtatggaacggaaatccttacaaagggatgccagaaattgaaacattttggcggaatttacccgaaacttcgcatgacgtcgcttgtttggatgctcatcgaattgacccaaccagcgatgacatgtcattggtcgtgttggcgatgggcacagtcataatcggcggattgagccacgcctacaatcagtcccttttgctagttcttgaaggaagtacttacaaaatcaaaagtgacaattacagggtgatcgactgaatttaccacattgataatttgttcaaatctctatcaaagcgagtaaagcaaagaatgcaaaaa

SEQ ID NO: 49954 - DNA, 524 bp, Heterodera glycines
aatattatattgaatgcttatattgcaagaattggatccgccgacagaggcggtaatcgaaacggagggtcaagtggtcgctcattgggaaaatcattgccttggccagggaactttatatttgatagagagcgctttggtttggataagccacggcactaaaaatggttttcgtttgcctattccgtcaattgtcgtccatgcagcatccggagccaatgaggacttttccgagccatgcctttttctgatggttgactattcaaagactggacattgaatacgttcccgcggaggtcgacgacattgacgaagagaccgaggaggaccctgaggtcaaaactgtggcagttcgtctcgtcccgacaaatgcaatgcgaatttctgaactgttttctacattgagcaaatgtcatgaactgaatcccgagattgatgaacagatgtcagataatgacagccttctcggtgacgacgagtgcgatgacgacggcgaatgggcgcagaatggaaattccgaccat

SEQ ID NO: 49955 - DNA, 529 bp, Heterodera glycines
aagctgctcattctgcccaaatgaaaaactcgatctttataaatgcccacaatgttcatctttttattgttctcttcggtgttttcgatgtaaaaagcacataaaatgctcagaggatttttaccgcaaggaatgtgaaaagcataacgaattactttcaaatgacccttttgaattaaacccaacagatgacaaacaaaagaaaacgaaagtaatgacttttgaacagtatatggcgcagcaaaatcagaattctggtggcaaaaaagataagagtacggccaatcctcaaatagcagtcagggcggatgaggaaatattattcgattccgacgacgaaccggaatatctctccaaaatgattgcgtcaacgctcgagcaattcaattcgctggatgatcaggaattggacagacgaattctgaatgccggactgccaattggacttggggaagagcaaacggcgaaaggggagaccagtcaagaagagatggaaatactttaccagcaactgatgggcgaggaaaag

SEQ ID NO: 49956 - DNA, 526 bp, Heterodera glycines
cttcaccctttaggtgtttacagacgcccatttgacgactttggacattaacctaatcccggccgaataccgttaattgatccccgaggaggtgaccaaattctaccaccagctgaccgaggatgacaaaaaggcgctgaaggaagtggcagaacgccaccaggaattccaaacggaagatcatgcaatggaagcgctgaaggaaaagagtgagaagctgtacaacaaagcggtcgaactgcgcacccttgtcaagggaaaaattgaccaattggtgcccgactcgaaggcattcgttatcaggatgatcgaaaaggcaaagggaatgcgccctaaggccgtcgagaagccgaagcttgaggagctgcgcacggtggccaacgagctgatcgacaagtacaaagcattgaatgacgataccaaagagtcgctgaagtccaactgtccgcagattacgagcgtcatccataacgagaaattgcaaaccttggccaagagtttgttggaacacgaggcaccggccgcc

SEQ ID NO: 49957 - DNA, 413 bp, Heterodera glycines
tcggcctaagacggttccaaaagagcagcaccctttttacatcctccaccccgagcctattcgaatctctccgctgctccgatttgctcgttggtcggccctcggcctaggcattgtgtatggtttcgtccgtcttcgtatggtcagcaaataccacgcggacatccgcgaatgggaagtgcaaaagaccatccacaagaaggatgcggataagaaggagtcactgagagtgctgcgtgagcaaaacgaatggattatgaagatcaccgacatgaatttggaggagggaaagtcgcaattgggcgtggagcatttgtacgatttgaaatagaaagcgaagaatcgtctcacaacgacaaattgcgattagggatttctttgtgttatcagtcacagttgacgaacctttcaat

SEQ ID NO: 49958 - DNA, 468 bp, Heterodera glycines
tacaatggagcgtttattgcgattgggaggccttagtggtttgggagcaggttcattgaacgcaacaccacacgattcgaaccaagttgacacttcggaaactgtttacatcagttcattggctttattaaaaatgctaaaacatggacgagctggcgtcccgatggaggttatgggtttaatgctaggtgaatttgttgatgattatacggttaacgtgattgatgtctttgcaatgccgcagtctgggacggttaatttgtttttttttgtctgctttatttgccgataataattgaattttaagggagtttctgttgaggccgtcgatccagtctttctggggtcgatataaacactcagcagagttttgaggcgttgtctgacagagcagttgcttttgtagttgacccaattcaatctgtgaagggaaaggttgtcatcgatgctgttcgcacaattaaccca

SEQ ID NO: 49959 - DNA, 1066 bp, Heterodera glycines
gtccaattaagcgttaatacacttagaagtgaaatggcttctcgacccttggtctctatttataatgagaaaaatgagccaaccggcaagcaaatcaagcttccggccgttttccgggctccaattcggcctgacattgtgagcttcatccatgaccaaattcgcaaaaacaagcgacaagcgtatgctgtgtcaaccgctgccggtcatcaaacttccgccgaatcgtggggcactggtcgcgcagtggcgcgtattccgcgcgtccgtggcggtggcacccaccgctctggccaaggagcgttcggcaacatgtgtcgtggtggccgtatgttcgcaccgaccaaagtgtaccgtcgttggcaccgccgggttaatgtggcgcaacgtcgttacgccattgtgtccgcaattgccgcttcggcggttcccgcactggtccaagcgcgtggccatgtgattgaccagctcaacgaaattccgctcgtcatttcggacaaaattgagtcgttcacgaagaccaaggaagcggttggctttctccagcgagcgcatttgtgggacgatgttgagaaggtttacaaatcgaaacgcttccgcgccggggaaaggaaagcgacgcaaccgtcggctacaaacagaaattgggcccgctggtcatctacaacaacgacggtggcattgtgcgcgcatttcgcaacgtccccggcgtcacattgctctccgtcagccacctcaacttgttgaagattgcgcccggtggtcacttgggtcgtcttgttgtgtggacagagtccgccttccgccagttggacccactttttggcacatggactcggcagagcaatgtcaagaagggctttacgttgcctcgtgccaagatgaccaattcggactttgcgcgaatcattcgctcggaggaaatcaccaaagtgttgcgaccgacgatggcgcgaaaagtgcgccgggtggccaagattcatggcaacccgctgaagaaaccctcgctgatggccaagctgaacccgtacgccgctgttctgcgccgtgccgcggtgttggcatc

SEQ ID NO: 49960 - DNA, 1432 bp, Heterodera glycines
ctccactcatttcacttttcccatctgtccaattcgtccgtttcttcagggccttcttcttccatcggttgttgagcacgaacgtgaactcggcactttgatcggatcgtaagcgcagcagaactcgaacagaagcagcagagaatctgtagctcatccatctcttctcatcttcatcctctacttttgtccttctccccatcgccatgtctgaagaggaatcgcaatattccgacgaagaggttgaggaggaaagcattgccgcggatgaagtgagcgtgcaggaaccggcaccgcccaaagaagaggagccggcgccggaagccgaagcggaggcaccgccggcggaagaaaaggaagaggaggaggaagaagagccggggtcacccggaggggcaggcgatgcgccgaaagaagaatttcgtcgcaccagtgttacggagtccgtcgcgccgacggcgcaacttcgccgcgcgccgccccctcagccgaagccggcagaagaatcgatgacggaggcggaagcggcgatgctggcggtgaagaagcgccacgaggaggaggaggaagccaaaatgcgcgacaatgacgagcgacgccgccaggaactcgctgcagttgaggacgaactgcgcgttttgaaagaacgccaagcggagaggcgagcggagcgcgagaaggaggaggccgaattcgccgaacgacggcggtcaagacgaggaccgacggcggaaggatgaggaggaacgaaaggcacgactcgaagcggagaaagcgaagcgcgacgaggagaagcggaagcgccacctgatgatggccggcggatttggcggatttgtggcggcggacgcggaaggagcaggcaaaaactttgtagttcccgagaaaagcgagaagggcgcacagcagggaatgccgggacagacgagcaaaccgcgaggactgagcaaagagcagcaggaggaggccaaacgcaattacatgtccattgtgaaccgaccggtggacgtgtcgaacatgttgcccaatgacatcaaggcaaatatcaagcagttgcacgcgcgcattgtcaaattggagggtgaaaagtacgacttggagaagcgaaaagatcgccaggaatacgatctgaaagagctcagcgagcgtcagaagcagcacgcgcgcgccaaggccctggagacgggcgcggaccccaccgaagtggaatcgtccggcaatttcccgccaaaggtccgcgtggcttcaagattcgaccgtcagacggacctccgcggatatggtcagagacgcgacttgttcgaacacccggcagaaacaccggagccaaaaattgtgcacggcagcggacgaccgccaccggaatggggccgcaaagaatttgaggaattggagaacatccggaagaatttagaaccaccaaagtacgtgg

SEQ ID NO: 49961 - DNA, 511 bp, Heterodera glycines
cctcgtgccgaattcggcacgaggcaacatcattgcctccgttgctacttgagcgcctgaagaagcgtgggattgttgcgtcaaagaatgaggacgaggaagtttttgctgagagttatgatcaagatgacgattcgaaattggaaatttcccgtgagaaatatcgcggcggtgcccccggatgtcctaacaagcacaatccgttccacgtctgcacagacttttgctttgaccattggcaggagggctatccggagagtcgactatccgataaatacttggagcagcggaacaaaatgttgcggaattacccactgccgaaggattgggtcgaaatttacgacccagggatgcaccgccattactattggaaccaaatgaccgacgaagtcagttggctctccccaaaacacccaaaggccgtcatttcggaagcggcagcaaaatcggcaaaagaagcatggaacatgagcaaaatcgagcgcagtgaaggcgaaagaggcgggcgaag

SEQ ID NO: 49962 - DNA, 707 bp, Heterodera glycines
tgagtatcgaaatgaaaaggtctataatgcaaaaagattgtacttcaaaaggtgaaaatgtttctcaactcgataaaagcactagcaaaatggagggaagcaaacctctgcagattgaggaatatgataccagcgacgaagaggatttacgcaacacaattggcaatattccggttcaatggtacaacgactacgaccatgttggatacacattaagtggcgataaaatcaaaaaagatgccattaaaactgacgaaattgacgcgtttttacaaaaagaggaagactcggactattggcgtaaggttttcgaccgtcagtcgggtcagcaaatggcactcactgaccaacaggtggagaaactgaatgccattgcggacaaccggttcccggaaataggttacaatccctaccctcctttcttggacattttctcctccgttcgcgagattcacccaatttccaatcgaccccccgacaaacgctctttcgttccgagtgccgatgaacgtcgaattgtcggccgaatggtccacgccattaaaatgggatggctaaaaaggaaagagccccccaaaggctcagaagaagaggaggagccgaggctttacgacctttgggacgacgagggggacgagcagcggaagagcaaatcgcaaatggcacgcgtccgaatgcatttgccggcaccgaaggtgaaaccaccg

SEQ ID NO: 49963 - DNA, 594 bp, Heterodera glycines
aaaaaaatagaaaactaaaaattttcagtttttaacattttttcgtaagggaaacgatgcgcgggaaacgggggggggggggaagcagcagagaatctgtagctcatccatctcttctcatcttcatcctctacttttgtccttctccccatcgccatgtctgaagaggaatcgcaatattccgacgaagaggttgaggaggaaagcattgccgcggatgaagtgagcgtgcaggaaccggcaccgccctaagaagaggagccggcgccggaagccgaagcggaggcaccgccggcggaagaaaaggaagaggaggaggaagaagagccggggtcacccggaggggcaggcgatgcgccgaaagaagaatttcgtcgcaccagtgttacggagtccgtcgcgccgacggcgcaacttcgccgcgcgccgccccctcagccgaagccggcagaagaatcgatgacggaggcggaagcggcgatgctggcggtgaagaagcgccacgaggaggaggaagaagccaatatgcgcgacaatgacgagcgacgccgccaggaactcgctgcagttgaggacgaactgcgcgttttgaaa

SEQ ID NO: 49964 - DNA, 586 bp, Heterodera glycines
gtgcgacgaagaagttgctgctctcttggcggacaatggatcctgaatgtgcaatgccggtttcccggtcgatgacgcaccccgcgcggtgtttccgtccattgtgggccgcccccgtcatcagggcgtcatggtccgtatgggacataaggactcatacgtgggacacgaggcacaatccaaccgcggtattctgactctgaactacccgattgaccactgcatcctcacccactgggacgacatggagaatatctggcaccacaccttctaccacgagctgcgtgtccccccccaagaacaccccgtgcttctccccaaagccccccttaaccccaagggccaccgaaaaaagatgaccccaatcctgttccaaaacttccacacccccgccatttacctggccctcccagccctgctgtccctgtacgccttcgggccgaccaccggtctcctgttggacttccgcgatggtggtacccacaccgggcccctttaccaagggtacccccttgcccacgccctcctccggttggacttgggcggccctgacctcactgactaccctgagaaaatcccccctgag

SEQ ID NO: 49965 - DNA, 1375 bp, Heterodera glycines
gtcgacgacagcacacacagccgaaaagcgcttcttctcatcgccttcgccttcaaaacttagaagcaccaatcccaaccagaaaaaatgtgcgacgaagaagttgctgctctcgtggtggacaatgggtccggaatgtgcaaggccggtttcgcgggcgatgacgcgccccgcgcggtgtttccgtccattgtgggccgcccccgtcatcagggcgtcatggtcggcatgggacagaaggactcgtacgtgggagacgaggcgcagtccaagcgtggtattctgacgctgaagtacccgattgagcacggcatcgtcaccaactgggacgacatggagaagatctggcaccacaccttctacaacgagctgcgtgtcgccccccgaggagcacccggtgctgctcacagaggccccgctgaacccgaaggccaacagagaaaagatgacccaaatcatgttcgagacgttcaacacgccggccatgtacgtgggcccatccaggccgtgctgtcccctgtacgcctccggccgtaccaccggtctcgtgttggactccggcgatggtgtcacccacaccgtgcccatctacgagggttacggcccctgccccacggcccatccttccgtttggacttgggccgggcggtgacctcactgactacctgatgaagatcctcactgagcgtgggtactcctttcgtgaccacggccgagcgtgagatcgtccgtgacatcaaggagaagttgtgctacgtggcactcgacttcgagcaggaaatggccactgccgcctcctcctcctcgctggagaagagctacgaactgcccgacggccaagtgatcaccgtcggcaacgagcgcttccgttgcccagaggcgctgttccagccgtccttcatcggcatggagtcggccggcatccacgagtccacctacaactcgatcatgaagtgcgacatcgacatccgtaaggacctgtacgccaacaatgtgctgtccggcggcaccaccatgtacccgggcattgctgaccgcatgcagaaggagatgaccgcgctggcccccgtccaccatgaagatcaaaatcatcgctcccccggagcgcaagtactccgtctggatcggcggctccatcctcgcctccctgtccaccttccaacagatgtggatcagcaagcaggagtacgacgagtcgggcccgtccattgtccaccgcaagtgcttctgagcagcagctgcacgaccgcacggaggaggagagcagaaaatgcctttcatcaagagcatcggagtgcggggattggcacgaacaccaaaaagagcaatggcatccaatcacatttttttttgtttttatggcttttcttttcat

SEQ ID NO: 49966 - DNA, 480 bp, Heterodera glycines
tttgagtctaaattctgtttaatgtgtcaatgagcaacaacgacatcatttttggaaatgaggaaggcgttaattatttggcaccatggacatattcctgtctcatcaaaacttcgatagatcggttgaaaactgctttatctgagaatcgtgaagccatacatgctttaaatcatttacaagaagtctttcgtcaaattgaccgtgcttctccctcctttctttatgatttctcaaaacttttgctgatcgagtcgggcgttgcaggaactaatgtgcaggaatcgtaccttcgaatgcatgcaaacgcggccacagaagagctggaactgccacaatttgcacacattgcagaatttcaatatttgtcaatgagagctgtttcactgtgcaaggtgcttgccagaattccggacgaaatgactgatagaaggccatttctggagaccatcaaagagattgcttcgtccattaagcaat

SEQ ID NO: 49967 - DNA, 1887 bp, Heterodera glycines
gtttccttacctcattgacaatttttttcttcattttgagctgttttcatcatgagtgacgacaactgctgcggctctgttggtgcccgttctccgactggctccatctcatcaagcggttccgctgactataacgttgccctttcgccaacccaattgcttgcaatggcaatcaagaaacgtcgtcacttgctcgaggacaagcagcgcgactaccaacgggagctgctccactcgcacctcatccagaacttgtagcgatgccaattttggtggtgatggtggaggccggggcccacggtggctcaacaaacgctcttctcactctgacgacggtggacctccgatgaaacgaaaccgggcggactcttccgaggatgggctcacattcattgatctcttttataccttgtgaggttgggaagttcgatggagaatttgcagatggtggacggatattctgatcggaatggcatggtcgtcatgatatgattacagtttctttatttttttctacgtgtattttttttttaccgcagataaataatttatagatcacagcgagcaaaataatcactggaaggtcttttgtgtgtagagcatttatgcgttctttcatactggcaagttgaacgtataattcaaacgatcaatggtgatttgtcatttatccaacgttactttttctagttttaattgcagaaaatcgcaactttgcgcggagttttaaaaatgctcaaacattgcacccaaattcgttcatttgccacccaccaaagcattttctacgacgtggtcattgtcggtggtgggttggtcgggagtgcgatggcttgctccatcggcacaaattcggctttgggtccatccacgagggtgctcctgttggagagtggacgactgcacagcgtcaagcagtcaaaagaagccgaaaccaaacacacttataacaaccgcgtttccgcggtcagcccatcctccgttgaaatgttcataagtaatcctgagtctctcaaccaagtgctttatccgagaatatccaaattcttacctatgttgctgattctgccaatccaattccatcctcttcccttaaaattagccattccttttttattcacaattcggtgtttgggatgagatttgctcgaagcgagttcatccaatttctgcgctttacgttcgtattatttttctggttcaacccattaaaattagtgaagaaaagaaacgaaaaatcaggttgaggatggctgtgccaaatccaaaatccatttcaaacaattggataagcgttcaccgattgctcacatcgtccagaatgagctcatcgtcgccgcactgcagcaatgcattcgggaccgatgtgccaatgtggaagtgcgccaaggcgcggttgttgaccagaatttgagtgttcctgacaatctcggccaaaatgtcaccattcagttcgaagatggcacaattgaagcttcattgatgattgccgccgatgggtccaaaagtacggcacggaaaagggttttcattgattttgaagaaacggcctatgagcagcgtgccgttgtgggcacattggccctccagcacaattcggagtccgatgaatccttcgcttggcaacgctttgtgccgtcgggccccgtcgcgcttctgccgcttggccatgaactgtgctcgttggtttggaccgtgtcaactgccgacgcggcacggcttctccaactgtcgcccgaacactttgtggaagagctgaatgggacacttgtaagcagtgccttttatgggtctccaaataatgggcaatttgacaactcttcggctaattccctcgtcaacaattcgttggattgtcttggcaaggcactgaactttttgccgtcc

SEQ ID NO: 49968 - DNA, 1214 bp, Heterodera glycines
gggcgccgttatttcaacatacatcttttacgataattatttattttacttttagcttaaaaaacagacatcattcagtattatttataagaacaccaaaaatgcgtgaagtgatctctattcatgtgggacaagcgggcgtgcaaattggaaatgcttgttgggaattgtactgcttggaacatggcattcagcccgatggaaaaatgccatccgaccaaaacaaccaagacgattcgttcagcaccttcttctcggaaacaggcaatgggcgtcatgttccgcgtgcggttatggtcgacttggagccaacagtgatcgacgagatccgcactgggacttacaagcatctcttccaccctgaacagctcatcactggaaaagaagacgcggccaacaactacgctagaggacactacacagtcggcaaagaaatcatcgaccccgtcttggatcggattcgtcgcatcgcggataactgcaccggacttcaaggctttctcatcttccattcgttcggtggtggcactggctctgggttcacatcgctgcttatggaacgtctctctgttgactatgggaagaagtctaagctcgagttctccatctaccctgctcctcaagtgtccaccgctgtcgttgagccgtacaattcggtgcttactacgcacacgactctcgaacactctgactgtgcatttatggttgacaatgaggccatctacgatatttgtcgtcgaaatttggacgtggaacgaccttcttacaccaatttgaaccgtttgatttctcaagttgtctcttcgataaccgcttcacttcgatttgatggtgctttgaatgtcgatctcactgaattccagaccaatcttgttccttatcctcgaattcactttcctcttgcgacttattctccagttatctcagctgagaaggcctaccacgaatcattgtcggtttcccgaatcaccaacatgtgctttgagccgtccaaccaaatggtcaaatgcgatccacgtcacggcaaatacatggccgtgtgccttctctaccgaggtgacgtcgtcccgaaggatgtaaatgcggccattgcttcgatcaaaacgaaccgttcaattcaattcgtggactggtgcccgaccggcttcaaggttggtatcaattatcaacctccgactgttgttcccggcggtgacgttgccaaagtcccacgt

SEQ ID NO: 49969 - DNA, 1439 bp, Heterodera glycines
gcaacactgaaacttcaggattttcttcgacaaagacttttttccatcagtcaaccaaaagttgtcagtgtccaagctcgtcagtttccagttacaatttattttgaacgacgcactccaacaaattatttggaagcaacattcaaaaaagtgtgtaaaatccacgaggaataccctgcgggtggcatccttgcgttcgtcaccggtcaacgtgaagtcacacatttggtcaaattgctagaaaacaaatacacaaaaatatctgcatcaaaattactgagaaaagagaaaatgaaaaagtgtcggaaaaaagagacaaaagaggaggaggaagagggactactgcttgacaacgacgaattcggaacttcggatatggaccttgaagacgaggcgtggcaaaataccttttttgggtctgacgatgaatcacttaatgcttcgcaatcgttcaaaaagtaccctcctctgctggccatccctctctattctctcctaccagtgaatttgcagaagaaaattttcaacgaaccgccagatgacgggtctagggtgtgtgtagtttctacaaatgttgcagaaacttcgttgacgattccaaatgtccgttacgtcatcgattctgggcgggaaaagaagagggaatatgacccgattacgggagtttctcggtttgtggtcggatggtgttcaaaggcgtctgcagaccaaagatccggtcgtgccggacgagttcagtccggatacgcattcagattgtattcttcggctgtttacgaagatatgcgcgatcattctactcctgagatccttaataaaccgatcgaccaattgattcttatgttgaaagcaatgaatttcacgaaaatcgacaattttcctttcccgactcctccaagattggaccaaatcaaatcttctgagctgagactttctcacataggggcgcttagagttcaagaagggctttataccatcacacaacttggacaatcacttgcgcagctgcctctcactccttcttttgcgaaggtcgtcatcagttcaattcgtggcggacttcttccttttgccgtcactttgcacaaaagaggacggaacggaagagagacgaaaaagagtgtccgaagtgattaagcaaagatttctttggtgtgctgttggggaggctctactctttggtgatttgacagtaattctgaacactgttggtgctgctgactatgaggaagagaacgctcgcgcaatcgaagccctaggacttcgccctaaggccctaaagggaatcaacaaacagagacatcagctgacgcttcttctgaacaaatccgattctgtggagaagttgcccgagaagttcagaatggatgcaccctcccaagaacaactgaggagattaaggcatataatggtgaaatgccatccggataaattggcaa

SEQ ID NO: 49970 - DNA, 702 bp, Heterodera glycines
cttccttaataacttagagatcgcttgactattcgcaagaatgactaaagccgaacaagctgcggcaaaaaaaggagaagaagttgggaaaccccatgagagatttaaagattcaaaaactctgtctcaacatttgcgtcggtgagtctggtgaccgtctcactcgtgctgcaaaggtcttagaacaattgactggtcaaactccggttctttcaaaggctcgttacactgtgcgctcgtttggaattcgtcgtaatgaaaaaatcgctgtccattgcacagttcgtggaccaaaagctgaggaaatcattgatcgtgggctcaaagtcaaggaatatgagctttaccgcgagaatttttcggacactggcaattttgggttcggcattcaggagcacatcgatttgggcataaagtacgacccgtcgattggtatctacggaatggacttttatgtggtgctcggtcgtgctggtttgcgggtggcaaaacgtcgacgaatccaaggacgaattggcgcatcgcatcgtgtgcaaaaggaggaagcggtcaaatggttccaacaaaagtatgacggtgttattttgccacccaaaccgaaggaatcccgtaagggtggtcaccgcggacgtaagcgctaattttggatcgttttgttgaatgctattttcccttgttgataaattactatttgttgaaaaa

SEQ ID NO: 49971 - DNA, 558 bp, Heterodera glycines
ttgagaaattcagcagtccaaaaacaaatttcaccagcaatgatttaccaccgatttgttgagattggccgtgtcgtttacattgccaaggggaaggaccaaggcaaattggcagtcattgtgaatgtcatcgacggtaacaaggttttattggacggcccctcctcgggtgtgcctcgcggtgtttggaatttcaaagacttgcagttgacaaaattcaccctcccattgcgtatcggccaacgtacgaaaggagtgcgcgaggcttatgaaactgccaaaatcaacgagttatggcaaggcactgagtgggcaaagcgcattgatcggaaacagaagcgtgccgggctcaacgacttcgagcgcttcaaagtgttcaaagccaaacagcaccgaaaccgtttggtccgcgttgagatggctaaactgaaaaagatttcgaagccgacagcgaagtaaatgactgaatttggcctgatcatattttgaacacacaaatgccgtcttttttgttgatgaaattatttgttggagttaaattgttttttaattcaaaaa

SEQ ID NO: 49972 - DNA, 540 bp, Heterodera glycines
tggagctccccgcggtggcggccgccctccaactagtggatcccccgggctgcatgcctcaagacgagggtaaggtccacggccagcgcattgccctctctgacaacgctgttgttgagaagtcgctcggcaaggccggccttatctgcgtcgaggatttgattcacgagatctacactgtcggccccaacttcaagaaggccaacaacttcctctggcccttcaagctctcgtcgcccaacggtgccttcaacaagcgcaagttcaagcacttcattgagggtggtgactttggtaaccgcgaggagttcatcaacgagctcgtccgcaagatgaactaaggttcttgccctcgcttgctgttctccgcttgtcgagttgccccgttggtgtttgtcgtcgtttgtttgtttttgggcccgccgccacggctagctttggttgttccgagctgagcaaatgatgaatacatccccgtgcttctcctgaaaaaaaaaaaaaaaaaaaaaaaaaaaaaacctccagggggggcccggtacc

SEQ ID NO: 49973 - DNA, 546 bp, Heterodera glycines
ccaagtttgagcatttgtgttccgtttagcagaactatgatatttttgacttcgttttccaaacatccgttgtccgctgcctttcggttcttttcttctgttaacgaagtgaccctccaaacgcgtccctacaaactgttcaaactcgattcgggtccttcgacggaggtgcgactgacgcgggatgaggcgttggattattacagaaaaatgcaattggtccgacggatggagacatcggccttctttttgtacaaggaaaagcgtatccgtggcttctgtcacctttactccggacaagaggcatgtgccgttgggatggtggcagcgactgatcccaatgatgccgtgatcacggcttaccgatgtcacggatggacttatttgatgggggcgacggtccaggacattttgggcgaactgacaggacgcattgctgggaatgtttacggaaggaggggatgcatgggtagtggacccaaagaacctttttcggcgggggacgggaacccgctgggcgtacgaacggacagcatggggggggga

SEQ ID NO: 49974 - DNA, 597 bp, Heterodera glycines
caagtttgagctactctattcaaatcaaagtgtaaagcgtattcaaaatgcttatgccacaaggtgatcggaagaaaatttacgagcatttgtttgaggatggagtttgcatcgcgaagaaggactactgcttgaagtcgcatcccgaaattaagggagtgaagaacctttacgtcatcaaggcattgaagagtcttgcatctcgtggacttgtcaaggagcagtatgcctggcaccactattatttctaccttcaacccgaagggattgtccatttgcgtgcttatcttggacttcctgacgatgtgttgccgaacacgcacaagcaaaggaccgacgctattcaaaaggcttttgcagacaaaggaggccgaggtccgattcgcgccgacaccgatcgtgggggttatcgcgctgccgcagataaacaagcggaggctgggcctggtgctgctccgattagtcatcgtcagggcttcggacgtggaggaggtgcccctgctccccaataagaacttcgggaatgcttgatctttgatttctggagattttttttgttgattttttggttataaagtgttgatcagttgaaaaaaa

SEQ ID NO: 49975 - DNA, 401 bp, Heterodera glycines
caagtttgagctttttccaaattattttcattcaacaaaatgaaggaaggccaaaagccccgccagtcacgacacaagggacgactctcaaagaagacgcgcattgtgcgcgagcttgttcgcgaggttgttggtttcgcgccgtatgaacgccgtgtgcaagagttgctcaaaatcagcaaggacaaaaaggcgctgaagttcttgaagaagcgcatcggacagcacacgcgggccaagcgaaagcgtgacgaaatgcagcaagtgttggtggcccagcgcaaggcgcacaaatagacggagagaggagatagaggcgggaaaattttcatggatttccttgttttcctttgttgaaacttggatgatggatggataaattgtttgttgtttttaaagaa

SEQ ID NO: 49976 - DNA, 475 bp, Heterodera glycines
gtttgagtgactgcttggttctttattcaaatggggcgacacaaaaagactcagaaattccgcaataagcttcagaaactgatcaagccaaccgatgacagaataaaagatgaaatccgcgtgaaaaaacctcccaaagaagatgaaaatgcacttaaaatcaaggaagccccgaagatttcggcagcgatgtttctcaaatacaacacacaactcgggccccccttccacgtcattatcgacacaaattttgtcaatttttctataaaaaaccgaatcgacattatgacggggttcatggactgtctgtacgctaaagtggtgccgtatatttcggactgtgtgctgggcgaattggagaaaatgggacgacggttcaaacttgcgctaaaaatcataaaggacaaccgcttccagcgactccaatgcacccacaagggcatttatgccgacgattgcatcgttcaacgagtaa

SEQ ID NO: 49977 - DNA, 525 bp, Heterodera glycines
agtgcaatcaacaatgtcagcacccgctgcaaagttaccccgccctccagagcacatgctgcgttatatggctcacatccgggccaagtctcttgttttctgtgcgatgggggtcagtggtctcattggcctttccttttacttcttttacgtcgaagttcgtcgcaaggcatatatggaatttgggaaaaattacaacccataccagagaatgcgtgaaatttgcgagtatcccgtcaagtacatgcattcctgcccttctgagctagccaagcgcctcgaagagaagggagtgctcattggtgaccgcgactattccatcccattggacgacgttgtgcctgaaagccggaagaaggagttcatgatggcgaatgcgttcgaacgttttatgaaccgttaggcaattaagtcaggtgatcggactgttgacattaggatggatttagcacaattaaagatgctttctttcgagttgtaaatcattcgttcttttacacataaactgaaaatccctcaaaaaaa

SEQ ID NO: 49978 - DNA, 672 bp, Heterodera glycines
caagtttgagtgttcttttcacgtgaaatttgactaacaaattgactcttcgagtctcttcatttattcatcaacattcgcaattcgtttgtttcttcactaatgagtggtgaattgcggcttgattcgagtcttgatctgatgcggcgtttgccaccgcaaaactgtgagaagcatttgaccgatttggtcgctcttgcgcccgacctttgcgagtctttgcttactgccgttgaccaaccgcttaaagtggcgaaggacaaaacaacggggagggaatatttgctctgcgactacaacagagatggcgacagttacaggtcgccgtggaccaacgcttacgaccccccgcttgaggatggcgtgtctccttccgacaccattcgaaagttggaaattgaagtcaacgccgccttcgaggcctatcgcgacatgtatttcgaaggcggagtgtcgagcgtttacctgtgggacattgacaacggatttgcgggtgtcgtactgctcaaaaaggagacggacaattcgctgtcggggcgccagggcgtcaagggttgttgggactctatccacgtgctcgaagtcaatgagaagacgaaggcggcgaaattcgccaagtacaaattgaccagcacggtaatgctttggctgcagacccaaaacccgacaacc

SEQ ID NO: 49979 - DNA, 667 bp, Heterodera glycines
ctccttcgaacagtgtgttccgatgttgccagcaataaaacctgcaaattccgatgggattgttttagacgcgcttccatatattgacgatcaacaatataccgatgaacatcgtcaattggcactgcaactgattcaggccgaatgcaaaaagtttcctatgacaaagaattacctgagaaatctgcctgaacctgactatgataagtttacaaccccgagaataatggaacaccaagcgaagatggccaacaaacaagaaattgagaaaatcgatttgttgcgatacgaagtgccatccccagcaaatacgagtcgatcgggcaataagaaagcgtggcttggtgccatcgataattgcagggcccaactgtcaaatcaatcgttacgcaaaatgaacttggaacttttggacgaatttggcccggaggcgtttttacggtcgaatcagcacctaaaaaagcaagttgagaaagaggaagccgaattgtttaagcttcgctcccaactctatgaattgaatgctcgccgaaaaagatcgcaattggatgctggggaaaggctggctgcgttgggacaaacatgggttgaactagtgacgaagaatgccgcgatggttgtccgccatgacaaacttggaaaccgaattcgaacattggcgaaatta

SEQ ID NO: 49980 - DNA, 1383 bp, Heterodera glycines
aagaaatataatgactgccaaattatatggaaatcaagacaactttcgtgtgaaaaaagttctaattgcggccaaattgtccgggaaggatattaaggcgattcctcagcttcctccaacaaatctcttcccattgggacaagcacccgctttcgatgatggaaaagtgtgtcttttcggtgccgaggcaatttccaaatatcttttgggcactggttcaatttatttgccacagaacccggaattggaccaatggattggttggactgcttcttctttgcaaccaaatgtcctttcctatgttttgccttgcgtttccgctgccaaaattgaccaaaatgctttagagacggcaaagaatgaattgcttgcccaactttctctcttcgaccaaattctccttcccaaaacttttctcgttggcgagcgtttgtcccttgcggacatttccgttgcgattgatcttctgccggcttatcaatacgttttgggagaagaagctcgcaaaggccttgtgaatgttaaccgatggtttcaaacggtggtcagtcaaccaggaatcagagaagtgctcggggagttcagcttcatcaaggatcccttgaccttcgatgaaaaagagtacaacaaactcttgaatgctgctggtcaacctgcgaagaaggaacaaaagccggaaaagcagaaaggtgccaaagaggaaaagccaaaaagcgctaaagaggaaaagccgaagaaaaaagccaaggaagaagccgacgaggaaatggacgctgctgacgaggctattgccgctcagccaaaattcagcgacccattggctgcgttgcccccgggctcatttgtgatggacagcttcaagcgcgtttattcgaatgaagacaccgcaaccaaagcaattccttatttttgggaaaatttcgaccccacaaattacagcatttggttttctgaatacaaataccccgaggaacttaaattagtctacatgtcttgcaatttgattggcggaatgtttcaacgactcgagaaaatgaagaagcatgcgttcgcctctgtttgtttgttcggaactgacaacaactcgacaatctcgggaatttggatctggcgtggccagcagttggcgttcgagttgtgccaagattggcaagtcgactacgaaagctatgagtggaagaagctcgaaccggaaaacgaagctgacaagaagatggttaacgagtattttatgtgggagggtgactttggtggtaagaagttcaaccagggaaaaatcttcaagtgattctgatcagtaatcacagttttgttgcctacaactgttattttttgttgacgaatttttatactttattcaagtgattaaaggtgggtcctttc

SEQ ID NO: 49981 - DNA, 857 bp, Heterodera glycines
gaattcaagaaaaagatatcacaaattttctttatttgtacaaacatatgaataaattaatattttatacatttttgtattattaaatgtcatcacttatccgtggtgaaattcagcagtttgcatcttttgcaaatgttttccactggtttgatgagcttcatggatgcttccgacctcttcactcttttaaccaattgagaattccttggctctccgcccatttggccacttcttctttgaatgccgtccatcttccgttgtctggtaaacagattttagatgtcggatgtggtgcaggcattttatcgacttctctttgtcgacgaggcgctttagtcactggcttagatgcggataaatctgtgctagaaattgctaatggttataaggaaacaatggcgccgagtcttcgcaaaaaaatagaatttattcctggcacgattgagagacttgcgcaagaaaaggatcgaatcggaacattcgatgcggtcgtttcttcggaagtggttgagcacgtttccgacttgcccttgttcattcggagttgttgcaaattggctcgtccgaattctccaatttttttcacaacaatcaaccgtacaatttggagccaactcttggctaaaacaatagctgaggatttgctccggatactgcctcaagggttgcatcaattcgaacaatttgttgctccgcgcgacttgcgcaaattgctactggacgagcagtgcagcgttgggccggtgcttggaatggcctacaacccattttttaacatttggaattggactcggtttactggcgttaattacgcacttgttgctcacactaaaaattaacataatttattgtgc

SEQ ID NO: 49982 - DNA, 698 bp, Heterodera glycines
gtttgaggttttaaaatttttcgcagtcaattttccaacgtctcttctgtgaaaatgtcatctgacaagaacaaggaacgcactttcatcgccatcaaacccgacggtgtccagcgcggattggttgccaaaatcattaaacaattcgagcagcgtggttacaaattggttgccatgaaacttgccaaggcaactgtcccccatttggaggtccactaccaagacctcaaggacaaacctttctttgccgggctcgtcaaatacatggcatcaggcccgattgtcgctatggtttgggaaggtttggatgtggttaaacagggtcgcgttttgctcggcgctacgaatccgttggccagtgccccagggactattcgtggcaatttttgcattgagatgggacgtaacatttgccacggctccgattcggtgccttctgccgaccgtgaaattgcccattggttcaagccggaagaactcgtcgactgggaaagtgcgcagaatgcgtgggtttacgaatgatggaaagaggcaaatttgtgcagtgaaaggcctctgctttcgaatcgatgaccaatgacgaccatccaatttttgtttgacattcttccattctgttagttaggtttttcttttgttgttggctttgtttgtgttcttccttttcaattcgagcataaaattcctaatttttaaaa

SEQ ID NO: 49983 - DNA, 795 bp, Heterodera glycines
atcattactctaccacaatttgatctgcctgaatgtgtgtcgactctcaacggatggggtccggggtctgtaagtgacagtcaagtactctcagagtttgtgggccttccgtatcaacatttcaacaaatgcgatcggattgggcgtatcgtcgattggttgggcgtcgatcgctttttcaaaaaaggcgaaacgcgagatcggtacaatgagcgtgtgtatggctcctcagcgactgcgggcgttcaattcgattacatccacgacaacgaggaatcgaacttccaattggtcgactcgagtcgaccacaaaagccgcagaggcctttccgtcgtcaaattccatttcgtaaattggctcaacgtgagcaggaacgccgagaatatgagaagtacaatgtttcgacgaagatgaagcggagtatactcaaggagcaacaaaaagcgtacaaagtgtttttgcgtcggggcggtggaactcgcggcacagcgcagcgaccgaccgggcggcgcttcaatgaccgacaggcgggcaaagggcgacagccttcggttcaagttcgacccgattgggcggttctgaaggagttggactttgtccagctgaacaaactttacctgccaaacattgaacctggaaaggatatacccggcgaaacgtacggcacccttcacttttatgataaagcattaatggacaaactgagcgtcaaaaacccgctgcatttggagaaattccacgcgtctttttattcgctgaccaccactgaagacccggtgttcagaaagctgtcc

SEQ ID NO: 49984 - DNA, 634 bp, Heterodera glycines
ggccaattaagctcaattaatgctgaaaaataacttattaatccgtggcaaatccgtccttttctcgttgccgttgagggctttttccctgtccgctcagtgcgccaacggtgagcccattcgtcgcgtcgttctgatccccggcgatggcattgggcccgaaatttcttccgcggtgcaaaagattttcgaggcggccaaaaccccgattgactgggatcccgtcgatgtcacaccggtgcagggccgggacggcattttccgcattccgaacaaatgcattgagctgatgcacaagaacaaagtgggactgaaggggccgctggagacgccgattggaaaggggcaccgttcactgaatttggcggtccgaaaggagtttaatttgtacgccaatgttcggccgtgccgttcgttggagggccacaaaacgctgtacgacaatgtggacgtggtgaccattcgggagaataccgaaggcgaatattcaggcattgaacacgagattgtctctggtgttgtgcagagcatcaaactgatcactgaacaggcgtcccgacgcgtcgcccgttttgcgtttgaatacgcacgacaaaacggacgaaaagaggtcaccgctgtgcacaaagccaac

SEQ ID NO: 49985 - DNA, 699 bp, Heterodera glycines
gaggaagagaatgggcaacagttccacttcgcttatgctgcaggaagaggaagtcgttggaattgcgaaggaaacgggattttctcgaaatcaaattgtccgtctgtacagtcgcttcctttcgcttgatcgacagggacgtggatatttggaccgggatgattttcaacggatccctgagttggccataaatccgctcggtgatcgcattgtcgacgcttttttctccgaattcggagattccggtgccaaagttgaactcataaacttccgccaattcgtcaaagtccttgctcattttcgtcctctcagcaaatcgaagccgaacaccgtaaacagcagagaggaaaaattgaaattcgctttttccatgtacgacctgaacaagaatgggtacataacgcgagacgaattcaaaatcattttgaatatgatggtggggacgaacatcaccgccgaccaacttgacagcattgctgaccgcacgatcactgaagctgacgccgacaaagacgggaaaatttcgttcgaggaattttgcaaggcaatggagcgcactgatgttgaccagaaaatgtcgatccgatttctaaattgagttcaaaaatgcaaataatgcgagcacattgtgattttgtctagtgactaatttccccaattaagagtcggatttattgtagagtaaatttattgtaactt

SEQ ID NO: 49986 - DNA, 1132 bp, Heterodera glycines
gtccaattaagatatcctttctatttgacaaatgtcccgttttgtgtgtgctatttctggaaatgagcctgaggtggctgtggcatcgcccgtctccggagaagtctttgagaaacggctgctcatcaagtacattgaagagaacggcaccgatccgatcaccggccacaaacttgacacttccaacttggtcgagctgaagcaggacccgggcattcgttctatgcaaaagtcattggccaccgcctcgttgccttcgttgcttaagcaattgcaagacgaatgggacgccaccatgctgaacaacttcacgctcagacaggagttgaaggcagcccgcgaggagttgacccacgcgctttaccagaatgacgcggcatgccgtgtgatcaaccgtctgagcagtgagctgcagtccgcgcgtcaaatcatcgcgacactgccgcacggacgacgcgctgccgcggagagtgagacggaggcgaccgatgttgagatgcgtccggaggaagcggaggagggcgctggtgcggacggtctgccgggcatcagcgaagagttggtcaattttttcaccgacaaatgccaagacttttccaccgcgcgtaagcagcgtggccgaaatttgcccgaggggttggcatcagtggaacaaattcaaaagtatgaggaggttgcgtgccacgatgcgctgcacagtgccagcgtgcccggcatcaccgcgttggatttgcagaaaaatttcatcgcaaccggcggaatggacaagaccatcgtgctgttcgactcggagacggagaacatcaagaacacgttcaaggggcaccagaaacgcatcagtgccgtccgcctccatcccaaccttcaaacaattgtctcgggctcttttgactcacagatacgaatttggaacgcggatgatcaaagtgccagaaatgtgattggcatccacgaccgacttttttttgacgtgtctctgcacccaaccggcgattatgtgctctgttcctctgaggattcgcattggtcgctcatcgacctcaatgctggacgtccgttgataaaagtgaaatccgacgacgacgatgtgccgggaattcgctgtggccactttcaccccgaaggactcatc

SEQ ID NO: 49987 - DNA, 450 bp, Heterodera glycines
gtccaattaagttattttccgttaatttcttcattttcgttcgcttgcattttgttcttccgtaattatgggcgacagaaaggcggtgattaaaaacgcggatatgaccgaagagatgcagcaggaggccattgagtgcgctacgcaggctttggagaagtataacattgagaaggacatcgctgcgtacatcaaaaaggagtttgacaagaagttcaacccgacatggcattgcatcgtcggacggaacttcggctcttacgtcacacacgagaccaaacacttcatttacttctacttgggccaagtggccattcttttgtttaagagcggctgatccgactttttgagacgaacggaagccgacgatgcaaaaaacttattatggccgtgctgtaagacagttttgtcatttcatcaccaataaatacttttcaaatttgcaaaaaa

SEQ ID NO: 49988 - DNA, 635 bp, Heterodera glycines
gttttggcttctgtataaatgaatggaggtggcagcaacaacagttttctctgtgtaatttttgactgtaatgcgtacaattggggctgtgtggtcgctgaacgcggtgtgtctacgcttaacgaaactgtctccgcactaattgctctttgcaatgcgcataatttctcctcgctcggaaatcgtcttttgctactcgcaaaaggagccaaacaacaagaaaagaaattgttcaccaacgaacgaattactgcgaaagaattgacaaattttgggccggccattgaaggaattattcatcaaattttggctaagaatgtttctgctgaagaaagccctttcaatttgtccagtgcattgtctttgagtatttgcgcattccaaaggttcaagaagcaatttccctcttcatttgggcatgttgtcttcataaacctttcggaacaatttacttctgagcaaaatgccctgctgaatttgtttttcgcctctcgtcagtactctctgcactttcatgtggcctcttttcacaaaactgtgccaattctgcagcaggcttcggacattaccggtggttcctacatgtacattgacaacaccaagcttttggcccacaaactgctgtgtcactgcat

SEQ ID NO: 49989 - DNA, 763 bp, Heterodera glycines
tgaaagcgttgtggacatctgtgtttctaccctaatgtcgaagcttcgaaattacacagaggaccaattgcagaatttgttacaggatgagtcaagattgaatgcgatggtggatagtatgccgcaggtttcgtctcttcctaatgacaaagagatcaaattggcccacagcaaatccttggccgagtacaatctgtccattgagccacaactgaataaggctcttaatcatttgcgcgaaacgcatgccaatgccgtgagaaccaagggggaagtgaatgagatgaaggcgaaattggattcggttgctgaggcaagatctctggattccgtttgcgtttctctaaaaaatcttgcacaaaatgcggaagatgaaagcgagacagcggccgaacttttttacaaaggggctatggaaatagatgatttcataaagaaattcacggaaaaacgcgttattggccatacgagaaggctaaaggccgaaaagcttgccgaattgcttcgccaacaatgccaataccaaccgcagcacccgtctccttctgcacttggaatgaccactcaaactcagtattcgtctcaaggggtggcagcctcaatgtatcctgtccttggccaggcttatacgagcccagccaattttcggcattcttatatgagttaggagaacggttcaaccggagattacttggacacgcacttattattttctatcaattttttgccccgacaaataaacgttttataatgtccaaaaaaa

SEQ ID NO: 49990 - DNA, 1334 bp, Heterodera glycines
cgagcttatacacaccaatatttcaattctcccaattctataaagcaagcaaaatgcttcttcttttcttattatcaatgcttctacttcagacaaatggttggcgtgcccgcgagcgtgcaattgaattggccgactcggacgaatcgatcgaattgcagaacattggccaacggaaaacggacattcgaacaccgacagaacgaatgtctgctcttcgtcaaatgatcgaacgcggcttttccgattggaatgcttacaaacagaagcatgggaaagcatacgcggaccaagaagtggagaacgaacggatgctgacttatttgagcgccaaacagttcattgacaagcacaacgaggcgtacaaagagggcaaagtgtccttccgagtgggagagactcatattgccgacctgcccttttccgaataccaaaagctgaacggattccgtcgtttgatgggcgatagtttgcgccgcaatgcgtccacttttctggcgccaatgaatgtgggcgatttgccggaatcggtggactggcgggacaaaggatgggtgaccgaagtgaaaaaccagggaatgtgcggctcgtgctgggcattcagtgccaccggcgcattggagggacaacacgtgcgcgacaagggacatcttgtttcactgtcggaacaaaatctgatcgactgctcgaagaagtacggaaacatgggctgcaacggaggcatcatggacaacgccttccaatacattaaggacaacaaaggcatcgacaaagagacggcctacccctacaaggccaagaccggcaaaaagtgtttgttcaagcgcaacgacgtgggggcaaccgactcgggttataacgacatagccgaaggggacgaggaggacctgaagatggctgttgcaacgcaagggcccgtctcagttgccattgatgctggtcaccgttccttccaattgtacaccaacggcgtttactttgagaaggaatgcgacccggaaaatttggaccatggtgtgctcgtggtgggctacggcaccgacccaacccaaggcgactattggattgtgaagaacagctggggcacccgctgggggcgagcagggatacattcgcatggcacgcaatcgcaacaacaattgcggcatcgcttcccacgcctctttcccattggtctgatcggagtgaatttgttgcccttgcgctgattcagagacatttcatttgattaatcgtgcaaaatgataagataattgataatccatcagtcaatcggtcgatttccattttttatgttcgcaattttattcacatataaataaattactgatttt

SEQ ID NO: 49991 - DNA, 567 bp, Heterodera glycines
aaaagctggagctccccgcggtggcggccgctcttcaatagtggatcccccgggctgcaggatctcggcacgagggtttgagatcactcgatttctctgctttttgtccattagactttatttaattccttccattctaaacagcgaattgcttttacgccaccataaaatatgggtttggccatttccggtctgttcagtcgacttttcggcaaaaaggaagtgcgcattttgatggttgggctggacgcggcgggaaagaccaccattctgtacaagctgaagttgggcgaaattgtcaccaccattccaacaattggcttcaacgtggaaactgtcgaatacaaaaacatttcattcaccgtctgggacgttggtggacaagacaaaattcgaccgttatggcgatactatttccaaaatacgcaaggactgatttttgtcgtggacagcaacgaccgcgagcgtgtgggcgaggcgcgtgaggaactgatgcgaatgctggcggaagacgaactgcgcgacgcggtgctgttgatttttgcgaacaaacaggatttgccaaat

SEQ ID NO: 49992 - DNA, 694 bp, Heterodera glycines
gtgctttttaagaaatataatgccaattcaagagataaacaattaggtatttgctttgggaaattcacatatttgatttgttggttaccaatgactgctccttgcattgatgttggcaatcttttactcattgatgttgagacggacgccgaagatttggccagtagcaactcagaacggattaacgaacttacaagcaaaaatgcccagcttttgttcaatgaaatatggaaattacccagaaaaattgtgcaagatgcgacttgttctcagcttcccgaatacacttatggccttcctcgtgaaaaacccattccaaaaccgaaagaaccaacgaaatgggagaagttcgcgagggctaaagggataacaaagaagaaagacaggaaagtctgggacaaaacgactcaggaatggaagccgaaatacggatacagacgagccgagaaccaatcgaaggaatggctcattgaaattcccgaccaaaaagacccatacaaagattattttgctgagaagacggaggaaaagcgggaaaagaataacaagcaggagttgcaacggctgaagaacatttcccgcgcctctaacaaatacaaagttccaactgggaacagaaaggtgttcaaagattgatcaaatcaaatctgtcaattgttttatgtttttgttgttttcataaacaattttaatc

SEQ ID NO: 49993 - DNA, 380 bp, Heterodera glycines
ccaagtttgagctttacttacttctatcaaaatgcaaaacgacgcgggagatttcgttgatttatatgtcccgaggaaatgttcgtcgtcttctcgaatcatttcggctaaagaccacgcttctattcaattggaggttgtcgaggtggaccaggcgactgggcgaatgattaccggcaaaacgacgaagtacgccatttgtggaaagttgcgcttcatgggcgagtcggatgattgcattctgcgcttggctcagagggatggaataattccgcaaaatttgtgaacgttgattcttcacagggatgcggcgttcttttgttgattttgttgcctgcagaatgataaacactgttaaaaaacacaacaaaccaaccgca

SEQ ID NO: 49994 - DNA, 856 bp, Heterodera glycines
gttttaatatacaaagtaatgaaattgaatattgcttatcctgcgactggggcgcaaaaactcttcgagattgaagatgaaaagaaacttcgcattttcttcgacaagcgaatggcgcaggaagttgaagctgactcgttgggggatgaatggaagggctatgtgctccgaatttcgggtggtaacgacaagcaaggctttcctatgaagcagggagtgatcaccaactcgcgtgtgcgccttctcctctccaaaggccattcctgctatcgccaacgcaagaagggagagcgcaagcgaaagtcggttcgcggatgcattgtcgactcgaatatgtccgtgctggcattggtcgttgtgaagaaaggtgaacaggaaatcgaaggactgaccgacagagttgtgccccgtcgtcttggtccaaagcgtgccacaaagattcgccgtctgttcaacctgaacaaggaagacgacgtgcgaaagtacgtaatccgtcgcacactgccggctaaggaaggtaaaaagccgcgtacgaagacgccgaaaattcagcgtttggtcacgccggtgacgttgcaacggaagcgcaggcgcattgcgctgaaaaacaaacggcgtgttaagcgacgcgaggaagccgctctttaccaccaaacacttgctaaatacgcaaaggaaaagcaggcggaaaaggtcgctcgtcgccactcttccgcttcgcactctcaaggctgaggaggagaaagaaagtgcgaattgacttccgatatgcgctcttttcgtctatgtttggctgttattgttttgttgttttgcaatgataattctttgcgataaattggcgaattgtttaaaa

SEQ ID NO: 49995 - DNA, 665 bp, Heterodera glycines
gtccaattaagctcaattcgccaaaattctcaacttcaaccaacttcacaaacttcacaccgacatttctctcctgaacatgtccgagaaatttgtcggcaaatggaatttggagtcgtcggagaactttgacgacttcatgaaggaggtcggcgtcaactttctcacccgcaaggccgctggctgtgtcaaaccggtgctggaattcgaagtgtccaacgccggcgagcactggaagatgacgtccacgtcgacgttcaccacctggaactgcgagttcgacctgaacaaggagttcgaggtgaagacggccgatggacgcacggtgaagaccattttcgcctacgaaaacggcaagctgaccgagaagcagtccaagctcaaggacgacgagaaggacagctactacgagcgctacatcgatgaaagcggcaaactcgtcattacgatggaagccggctcggtgaaggccaagcgcgtgtacacgaaggcggcctgagaaccgaagaagatgacgccgatctccgaagacgacggacgcttctgacccgttttcgtcattcttgaggccttttgatccgcaattcttaatttccatcttctaatttatttaatgcgatcaataaaagggttctctctgttaaaaaaaaaaaaaaaaaaaaaaa

SEQ ID NO: 49996 - DNA, 476 bp, Heterodera glycines
cacaattaccgaaatatttacgtcgagtaatgaacaggcttagaagggatcaaaaagaaaaggttcaacagtttgtgtccttcacgcaggccaacgaacagacggcaattacatgcttgaccgcctccaactggaacttggagatggccggtgacatgttctatcaaaatccgtcttacaccaaccagcaagtgggaggcggcaccggtggtggcgcggacagtcgaaaaattgaccatttgttcaacaaatatgccagcgatgcaaaggacaaagcgcagaaaatcggacccgatcggatcggtcccaatggcatggtgcgtttcttgcgcgacttgaacatcgagccaacgagtcgggcagtgatggttttggcgtggaaaatgggtgctcaaaaacagtgcgaattcactgtacaggagttccgcgacggaatttccacactgattcccaccggcacggtcgacataaatggt

SEQ ID NO: 49997 - DNA, 487 bp, Heterodera glycines
cttcatcgagataattcaaaaattaatcgccaaagaaacacgagcaatgaacaggcttagaagggatcaaaaagaaaaggtccaacagtttgtgtccttaacgcaggcaaacgaacagacggcaattacatgtttgacggcctccaactgggacttggagatggcctgtgacatgttctaccaaaatccgtcatacaccaaccagcaagtgggcgccaccggtggggcggacagtcggaaaattgagcacttgttcaacaaatatgcttgcgatccaaaggacaaatctcagaaaattggacccgatcggatcggtcccaatgggatggttcgtttcttgcgcgacttgaacatcgagccaacgagtcgggcagttatggttttggcgtggaaaatgggtgctcagaaacagtgcgaattcacactgcaggagttccgcgacggaatttccacactgattcccaccggtacggtggaaataaatggt

SEQ ID NO: 49998 - DNA, 1414 bp, Heterodera glycines
cttttccatggacatcgaaactgatgcaaatgcagttacacttgccttttaacatttgttagcattcattctcattttgctgttgttcttttggatgtttccgtttcgcccaataagaaaagtcccgtggtaccggcgcaaagttcctgatcggataagcttagttgcagaagaaacaattagccctgccgatgagaaattggttgggtggcgtttacatgactattacgaaattcaagagctcgtgaatatattgccgacgataaaggaaaagatcgattttgtgaacccctacgagaggccgtggaaacagtcggagctacgttggcacagaccatggatggcacctttatctaagcctcgctcggcatgggtcgtcccaccaactccagcttattttgatgtgctcgacttttccaaatatatcaccaagacacggttggccaccgatgaggaagccgaatgggaatttgacgcatattacaaaggcataaatttgccaacagccaaatttgaggaacgtgttgccgaaagtctggcacttcatttggaaagagaagaaatgtctaaaagagagaatcaccccgaaaaggaaagggaagaaaaccgcgccaaatttctccgctcgctcatcgatgatgcccatttaattttggcacatggaaacccaaaaatcatcgaccatcgcatttcacattctgaccgttgcgagtccttttggataagggccggttttctccctctgtacgagagtttgcccgtttgggaaatggaaaaagtgccgtccattcgaaaagtgaagttcaccggcgatgacagacgccgtcttggcgaactttcctttacaatgcgcgacaaacatacgatgcaagtgcggacgaaaagcccaatgaaaaggctcttcgattgggatgaacctgacaaactcgaggcaccagtgtttccgccgtcttttgacgttgcggatgaattgataatgtcacccatggtttataatcttctcgccgacacagagccattgtggcaatgcccaggctacgaatatgactcgggtgaaacgcataagtacggtcggttggctatcaaggacattactccgctgatcactcgtctggacactcattggcgttgcgacacggaacatgagcgaaaggaagtgctcagagaatgtttggccgcaacggcggtcgtatctctcttcaattggttgaatggacaagcgcattgtcttggacacactcaatacacagaaattgtcgccccgttgagttcccaattgatactttctgacggcttgcaattgttttatttcgctctcggtcaactcaacactctcgcaattaacattgatgttgaaggcttcaataatcagcggtccaatttttgttgtgttaatggacccttcaaactgtac

SEQ ID NO: 49999 - DNA, 646 bp, Heterodera glycines
gtccatttaagatatactattagtgggtgtaatgcgtgttctgtcatttgctggattacaactcaaattggacacaatcggagatggtgagaagatagcggccaaaatccgcgagtgtgccggcttggaggtgttggaaatgcgcggcaatacgcttggtgtgggtgcgaccgctccgatcgccgaagcattggagtgccagagcaacttgaagagagccctttggagtgacatgttcaccgggcgactcaaagaagagattcccaggacattgaaaactttgtgcgacgcaatgattctgagtggagcgaggctgaccgagcttgacctgagtgacaatgccattggtcctatggctgtgccggggataaaagaatttcttgctggcgaggcggcctttgccttaaagacgctgaagcttaacaactgcggccttggaattgcgggaaagacaattgctcactgtttgatagaatgccatcggcgatcagttagccatggcactccgctttgtctgaaaatctttgtcgcccgaaggaatcgcttggagtacacgtgaacagctgcgctagctgaagcatttcagataattggcacgcttgaggaaatctccatgccacaaaacgggattagcgctgaagggata

SEQ ID NO: 50000 - DNA, 481 bp, Heterodera glycines
cactgtttgagttggattctgtccatttcgctgtgtcttcctcagaaattttgttgcatttgtgcaagacggaaatttgcaagtcggccaatgtggagaatgaggaccgaatgcgccgcctcatttcgcatttgttccgtgctcgctccctttacccgctgtgcccgtgtgaccaaaatttgccatttgcgccctctgcgagtgccaatgccaaactgcgcctgcccaggaagccacacgtgatggttctgccttcgctgcttcagccagtcacaaaggtggtggatgactgcgtggtgctcaatccgggccgcttcgacagagggaagggcaccggcacattttccgttctcgacttggacctttcgagtgccattggcgccacttcggtctcaccgttttgcgaagtctcactcttttcaacccaacaacaacaatgacaaaaatcacatttttgagtgtcgcaattgcccattttaac

SEQ ID NO: 50001 - DNA, 651 bp, Heterodera glycines
tgctcatttgtcagcccatcccaaaaactgataaaaaaaaatggcgttcctctcccgtctctccatccttccaaattcgccaatttcgctgcttgcagtttctttggccgttttggctttcgtcgctttggcatcggccaatccgccgacggcacgcgaaacggcgccaaatgcacagcaaaacaatgccaattcagtggcaactggggaaattgcgaaaaatattgcggaaaagatggagcggatgaatgagttcattaattattttagggcgaagaagttcatcgatgcacataatttggcatttgagaagggcgaagtgtcgttcaaagttgcgccaaaccatctgatgcattttacacctgcccaatataatcgaattcgcggcttgcaaatgcgcagcaaccgacaacggcacaacatggcaactctggcgggaaacagcagtactttgccggaaaagttggactggcgcgagaaaggggcggtgaccgaggtcaaagatcagggggactgcggctcgtgttgggcattcagtgccaccggtgccattgagggagcattggcacagaaaaaagcgtcgaaaattatttcattgtccgaacaaaaccttgtcgactgttcgtccaagtacggtaacgagggctgtga

SEQ ID NO: 50002 - DNA, 1350 bp, Heterodera glycines
gtcagttggaggacgaggtgctgctgcgcactgagctggagaatcgtctgcacaccgccaaagacgacttggattttgcgcgtcgcagtcacagcaaccaaattgaggagatacggcgcaagcgccaagtggaaatgacatcgttcagcgacgaagtggagcaccgttaccaggccaagctgcaggaacagctgcaggccatgcggttattactttgacaatcgcattgcgcagaaccgtgccgaggtcgatgaactgtaccgcaacaagctgggcgaggcggctgaaaacgcgaacagaaaccgtgacttggcggccaaggcgcgcgaggaagcggcaatgtggcgcgtccgtgttcaggacttggagaactccagcaaagaccatcagggcatcgtcgagtcgctgaaccgtcgtgttaaggacttggaggcggcgttgcgccgcgcgcacgaggacgccgacattcgcattcaacagcgcgacgaacagattgagcaactgcagaaggaaattgcgttgatgatcagtgactaccaggacttgttggatgtcaaagtgcagttggacaccgaattgcaggcgtaccagaagatgttggagcaggaggagaccagattgcacattacgccgtcgaccagtccgaacacgtcggttgtcgggcagaacatcagcacgcctaacatggtcatttccacgccacgtccggtcagcccgcgtttggcgacgccggttactcagagcgaaagtctgaccaccgtccgccgtggggtgaagcgccgccgtctcaaccaggatgacattgtctccttcgacaaaacgtccagctcgtggaagagcaatggccattccaacggcaatttggtgatcggcgaggtggacaaggagggacagtacgtgagcgtgatcaacaagggcaaggaggacgtggcggtgggcaattggactctgaagtcgagtgccggcggcagggaggtgcagtacaaattccactcacgacagacggtgaaggcgggcaaaacgctgatggtttggtccaccaactcgggccaggagcatcagccgcccaacaatttggtgttcaagaaccagcaatggccacacgacgacgccatccgcacggagctgttgaacgcggaccgtgaggtggaggcgtggaacgaggcgtttctgcagcacagcttcagcagccgcgtggaggagggcaccgacattgataagaattgtcgcattatgtagatgagtgacaaagtgatggaaggatgatgattggagtaattgagttcgttaaatcaattgtttttttgttctgtttgcttttgaacgataaagtccatccctcgtaaaaaa

SEQ ID NO: 50003 - DNA, 2094 bp, Heterodera glycines
gtccaattaagtattgtcaaattgctttttcaaaaatgccagctaaagctaatgcaattggtattgacctcggcacgacgtattcgtgtgttggagtcttccagcacggaaaggtggagatcatcgcgaacgaccaaggcaaccgcaccacgccgtcctatgtcgcgttcaccgcacaccgaacgtttgatcggcgatgcggccaagaaccaggtggcgatgaacccatccaacaccgtgttcgacgccaaacgtctcatcggacgcaagttcgacgacccggcggtgcagtcggacatgaagcactggccgttcaaagtggtgcagggagagggtgctcgtccgaaagtgatggtggaagtcaaaggcgaggacaaagcgttcttccctgaggaggtttcgtccatggtgcttatcaagatgaaggagacggccgaggccttccttggccagactgtcacggatgcggtggtcacagtgcccgcttacttcaacgactcgcagcgtcaggccaccaaggacgcggggaccatcgccgggctgaacgtgttgcgcatcatcaacgagccgacagccgccgcgattgcctacggcttggacaagaaggggcagggtgagcgccatgtgctcattttcgacttgggcggtggcactttcgacgtgtccatccttaccatcgaggacggcatcttcgaggtgaaatcgaccgccggtgacactcatctcggtggcgaggacttcgacaatcgaatggtcaaccactttgtcgcggagttcaagcgcaagcacaagaaggacctcagttcgaaccctcgtgcgttgcgtcgtttgcgtacggcctgcgagcgcgccaagcgcactctgtccggttccacccaggccagcatcgaaattgactctctcttcgacggcatcgacttctacaccaacatcacgcgcgcccgcttcgaggagctttgcgccgaccttttccgcaacaccatggaccctgtggagaaggctttgcgcgacgcgaagatggacaagtcccagatccacgacattgtgttggtcggcggctcgactcgaattccgaaggtgcagaagcttctctccgactttttctccggcaaggagctgaacaaaagcatcaacccggacgaggcagtggcctacggagcggctgtccaggcggccattctttccggcgacaaatcggaaactgttcaggacttgctgctgcttgacgttgcccctctctccctgggcattgaaacggccggcggcgtgatgacttcactcatcaagcgcaacacgaccattcccgacaaagacgtcgcagacattcaccacctattcggacaatcagcctggtgtgctgattcaggtctacgaaggcgagcgcgcgatgaccaaggacaacaacctgctgggcaagttcgagctcagcggcattccgccggcgccacgaggagtgcctcaaatcgaagtcactttcgacatcgacgccaacggcattctgaacgtgtcggcccaggacaagtctaccgggaagcagaacaagatcaccatcaccaacgacaaaggccgcctttccaaggaggaaattgagcgcatggtgcaggaggcggagaagttttccaaggaggacgaggtgcagcgtgaccgtgtgtctgccaagaacgccttggagtcctactgcttcaacatcaagcagacaatggaggactcaaatctgaaggacaagatcagcgaggacgacaagaagaaggtgctggagaagtgcggtgaggtgctggcatggctcgacgccaaccaggcggcagagaaggaggaatttgagcaccagcagaaggaactcgaagggatctgtaatcccatcatcaccaagctctaccaagccggcggcgcaatgcccggcggtccaatgcctggcggagggatgcccggaggtggcggcgctgctggtgcgggaggagccggtggaccgaccatcgaggaagtggactaagcgagtcgatctcttcgcgatcattttttgtttgatcgattatttaattttatttttttctcgcgtaaattgtttgacatataaattcattggttgcttaaaaa

SEQ ID NO: 50004 - DNA, 1140 bp, Heterodera glycines
aattgtgccaaaatgcgctgctcccactcccttccgctgttcctatgttttgtgctcttcgctgggttggcatcgctaatttcggcccgacttgcgcacgaatcgttcgccaaacaccgccaccactcgcgcggcggtgccgccgctcggccagaagcagcagcaggcgatcaaccgcagaagcgcaaaagcatttacaactcgaacaaatgctaccggcaaccgtcggacgcggaacgcgtccaaaaacgaacttcgatgcgtctttatgagttcgacgactatttgtttgacgagttgccagagacttgggattggcgcaatgtcaacggagtcaactacgcgtccactgatcgcaaccagcacatcccacaatattgtggctcatgctgggcaatgggtgccacttcttcgctggctgatcggatcaacatcaagcgcaaaaacgcgtggcctcccgcctatttgtcggtgcaggaagtgatcgactgcagcgaggccggctcatgcgaaggcggcacgccggacaaagtgttcgagtacgcgcacaaaaatggcattccgcacgaaacgtgcaacaattaccaggcgcgagacggaaaatgtgacccgtacaaccgttgtggttcgtgttggcccgacaaatgtttcaccgtccaaaattacactttgtacaaagtcggcgacttcggctcggccaatggaatccaaaagatgaaggccgaaatttaccaccacgggcccatcgcttgtggggtggcggcaacgccgcggtttgacaattattcgggcggaatttacaaagagcgaacgaatgaggatattaaccacgtcatcagtgttgtcggatggggcaaagatgcggcttcgggtgtgccgtactggatcggccgcaacagttggggcaccgcgtggggagaacaggggtggtttcgtgtcgtgacgtcggagtaccgcgacgcgggaaacaaatacaatctgaaaattgaggaggattgcacctggggcgagccaattatcatctgaatgaggagcgaacaatccgagcactgttcaagccgatgccaaaattttttccatttttgtccaagcatttttaagccaaaataattacggaatttgacaaattaggcaaatatc

SEQ ID NO: 50005 - DNA, 615 bp, Heterodera glycines
gtccaattaagatttattgtaattttgtcacgcatttaaggtaggctgaaccaccgaatcatcccatccctcctaaaaaaatttggacgcaaaatttttaaatggccgaatccggtgaacatgaccatgactttacatctggcgagtcgggtgcagctgccacttacccaaagcaatgctctgccttgcgcaagaatgagttcgtcatgatcaaaggccgtccttgcaaagttgtcgagatgagcacctcgaagaccgggaagcacggccatgccaaggtgcacctggttgcgttggacattttcaccaacaaaaagttggaagacatttgcccgtccacccacaacatggaagtgccagtggtcaagcgcaaggagtaccagctgctctcaaccaacgaggacgggttcatttcgctgatggatttggagacttgcgacaccaaggacgacctgcgtctgccggaaggcgaaattggtgaccaaatcaaacaggcctacgaaaaggacgataacggcattcttgtgtcggtggtgactgcgtgcggtgaggaggccatcctcggctggaagttcatgccaaacaaatagttggaggacgacgacggcgatgacg

SEQ ID NO: 50006 - DNA, 1071 bp, Heterodera glycines
atttattttagttttccaaaataatttaaattttctttattttaataaaataacaactaaaatatggataaaaatataggaaataaaaacaacaatgaatttttattgcttggaatgggaaatccattgttggacctgcaggtcgcaactttggacacacaaattcatgcaaagtatggacttgcagaggacggcgcggacctaatcaatagtgaaaatagtgcctcacttttgccaatttttgacgatatttccactcttggcaataagattgaatttgtacccggtggttcagcacaaaacacggtccgagtttgtcaatggatggtcaaagcattcggcgtaaacctcaagtcctgctacttttttggtgccgttggcaaggacaaatatggtcaaattttgcacgagaaggcccaggctgcaaacatcgaagtgcgttaccaggaagtgccaaccgaaaagacgggtacctgcgcggttttggtgttcggcaataagaggtctttggttgctcatcttggcgccgctgaacatttcacccctgtccatcttaacattgaggccaaccaatcactgattgaaaagattagcaatttttacgtcgagggatactttctaaccgtctctttggaatcgattctttttctggcaacgcatgtcatctcttccactcggcccaaacatttcgctctcaatttgagtgccgaatacatttgtcagttttttttccgaccgacttgaaaaagtgctcccctatgttgacattttgtttggcaataaacaagaagcattggcttacgcaaaaactcgagaaatcggaaaaacggacgttggggacatcgcattgtatttgagtgaaaaggagaaagtgaacggtgagaagaaaacggatagtcgtgataacacagggccctttgccggttttggtggcccatgactgcgaactcactcagtttccagtggagccaatttcggaggacaaaattgtggacaccaatggggcgggcgatgcattttgtggaggctttttggctgcattttccaccggccgctctttggatctttgcg

SEQ ID NO: 50007 - DNA, 555 bp, Heterodera glycines
gagctccccgcggtggcggccgccctacaatagtggatcccccgggctgcaggtatcagagcacgagggtccaattaagtcggcagaaaaaaaagacatttttctgctttcggcccaaatacgaataatgagtgtcggtttgtcctcaattgtcgatgattctcaccagcgacaaagtcacttttgggctgagattctcccgcccggcgttggtcacaccaacgacatttcgggagatgccatttggacactttcgagctgtaaggagggccttggggtgcatcagttgttgaacgaccgcgaagacacttattggcaaagtgatggtcttcagccgcactcaatcaccatagaattccaacggaaaacggaagttgactttctgctgatgtttttggactacaaactcgacgagtcgtacactccctccaaaattcaagttcagaccggcgcttcggtgttggatttggacgagcccaagtccctttccttcacagagccttcggggtggcaaatgatcgaccttcgccatgccgggacgaagcgaccggcgaa

SEQ ID NO: 50008 - DNA, 773 bp, Heterodera glycines
attgctcacacccagatgaaactgatgaagcaccgcaacaagaaggcacacataatggagatccaaatcaatgggggtaccgttgccgaaaaagtggactgggctcgtgagcactttgagaagcaggttcccgtggagcaagtgtttgagcaggacgagatgatcgactgcatcggtgtcaccagaggaaagggtttcaagggagtgaccagccgatggcactgtaagaagttgccgcgcaagactcacaagggtctccgcaaggtggcttgtatcggtgcatggcatccgtcgcgtgtctcattcacagttgcgcgtgccggtcagaagggctaccaccatcggacggagatcaacaagaagatctaccgcattggcaagtcgtgtttgacggccgacggcaagaaaaacggaatgaccgacttcgacatcacttgagaagaacattaacccgatgggcgggttcccccactatggtctggtcaatcaggactttctgatgatccgtggctgttgcattggttgcaagaagcgtccgatcacattgcgcaagactttgatcaagcagaccaaacgttttgctttcgagaagataaacctgaagttcatcgacaccagctccaagtttggccatggacgcttccagacgagtgcggagaagaaaacattcatgggcaaattgaagaaagactttctggcggaatcggcgtaaaattggccaatttcattgtttattattttgttgaaagtataaagaattgttgtgttaaaaa

SEQ ID NO: 50009 - DNA, 512 bp, Heterodera glycines
gctctcttccgtcttcctcttccgttatcttccaacaattcacgatcgatcagcgacactttgtggacgaggattacttcagtctcgagagtattttcgccaccaatacgaatatttgctgcactttcgagtctaaaacgccccccgcgctttttcctctgctcggccggaaagtttttgaggtcatttctgagaagggataccgtgccaatgttcccgcttggctcgtccccgccgtcgaccacatttgctcgtttgccgtgcccaccgtttacaattccgtcaatcgcgacgtaatccacgcgggtgcccaatcggtcaacttggaacagttgcaacgccactactacacattgggcacgttcatttgcagattggtccccggcgaacaggcgcaacacatcgccttggcattgctttccgcgttcacccaacgcatcggtcgaattgtgcgcgactgcaccaacacgggggcaaagccgacgcggctggacgagacggagaagcggatt

SEQ ID NO: 50010 - DNA, 472 bp, Heterodera glycines
gccatcgtcgccattctttcgtatggtggctataaccaggaggactccgtgattatgaatcaggctgggattgatcgtggtctgttccgttcggtgttttaccggtcatatcgtgattcggaacaagagattgacaatgtgaacgagcaactgattgagaagccgacgcgcgacaaatgcaaagggatgcgaaacgccatttatgagaaattggacgatgacggcatcacttcgccaggcactcgagtgtcaggtgacgatgtgatcattggaaaaacaattgctttaccagaggtggaggacgagttggaagccagcacagcgcgctattctaagaaggatgcgtcgacaacacttcgaagcagtgagacaggcattgttgaccaggtgatggtcagtgtcaacgcggagggcaacaaattcgtcaaaattcgcgtccgttcaattcgaacacctcaaatcggggacaaat

SEQ ID NO: 50011 - DNA, 670 bp, Heterodera glycines
gtaaaggaagcgatacccacccaaaatggaaatgtcgacttcatttcttgactctttgcctggattttctgttgtagattttaatggaagtcatgagaaaagaacttgtgctcctggtgaacaattattttcagtctcaagtggatatcatgcgggaaatggctgttatgaatttcatggttcaatatgtgcttctcttgcaggatttttgcacgtttattcacttagagattcgcaaaacaccgagacaaacattgtcgaagtgagacgcaacattgacgagagaagcaatgtgctgccgtcacagggaaagatagtcactgcaagggttgagcgtattacgacaacatttgcaaaatgtgcaattatctgtgtagaagacacacccctcgccaacgaatttaactcgactttgcgcaaggaggacatacgtgataaagagcgcgataaggtggaactgcacaaatttgttcaacctggtgacatcattttggctcgtgttttgggctatggcgaggcgcacacttcttatttgctcacaatcgctgaagctgaattgggagtagtgattggccggagccaaaacggcgaacggctgttaccggagaattccgaaataatgaaagtgccgggaagcgaataccgagaaacaagaaaagttgcacagctt

SEQ ID NO: 50012 - DNA, 467 bp, Heterodera glycines
gttggattaaatcgaaaagattcaagcgaaagtcaggagcccggtcttcatcctttccagtatgtccaggccggtttctttacgggtgtcgccacaagggcgattatacaaccattcgatgtgctcaaaatccgactacagcttcaagaagaacctttacgtgggaaaagtcgtggaaaatacagtggaatttttcaatctgccaaattgatttaccacgaagagggaatcgcagcattttggcgtggtcatatcccagcgcaaggcctctcaattgtctatggtctggtacagttttgcactttcgagctgctcaccaaacaggccggcgacttcggctttcacaatttctcaaaatcagtcgattttgtctgcggtgcctctgccggctgtttggccaccacttgtgcaatgccttttgatgtcgttagaacgcgaatggtggcacaaggcgcccatcggaccta

SEQ ID NO: 50013 - DNA, 635 bp, Heterodera glycines
gtccaattaagagattaatatataaaatggccgtggtaagccgaatgtggtatattggaaaggagacttgcaaattcttccacggtgctgtgaaagtcttttttgacccaaattggcaaatcccaaagaccaagcttgatccaagaatgcccgcctatccaacccaacttcatgaatggcttcgcatgttcccctggcgtcattactgggcttactacccaattctgcgcaatttttgctacgtcttcgcctcagcttttgtcgttacgagcattactcaaccgacaagcgttaaaatcaccaaagaacacgtgatcaaccacgaattgcatcacatcgaagcgaaaatgctccacgcgtacacccaacggaaggaggacctgaagtacttcaaggagaacgacgtcatggccaaactgcgcccgaaaaactttgccagggatttgtcaatgggcgacttcaattacttcccctgggggtattccttcggagcgcactgatttctgcggagtacagaaaacgaaggtggacaacgcatttgcgatgccaagcacagattaggacaatgtttgttgaaaatgtaccattgctattatattttgtgggaagtaagagaaataaaaggctagccttaa

SEQ ID NO: 50014 - DNA, 446 bp, Heterodera glycines
aaataaatgcgatgcttttccgctattttcccctgctaaacgaatatagcgcccataagcttttcctcactcttttcccctccaccggcagcgaaatggtgcgtggaaatccgcacttgccaataatcgtcgggaaagagcattgctccaacggaaccaaatggattctcaatgtgttcggcgattgtgtcgacactccgatgaaaatgtgcggcttttgggtcggattgatgtccttgttcttgtggctgatccctctgtttcctcaactgtacgaaaactttcggaacaaacgctgtgaaggcctttccatcttctttctgatgttttggtttatcggtgacagttgcaacatgatcggtgctgttctcacccatcaacagcctctgcaacagatcatcggcgtgtattacattttgcaagacttggctttgcttggtcagttc

SEQ ID NO: 50015 - DNA, 3306 bp, Heterodera glycines
ctgaacatggccattttgcagaatctgaacgaaaaggaggccaaaatcccaacttcggtcggtgtgcagttgcgcattctcaactcaatgccgattttggccaacatcgaaggccaaatgaagatcaaagcggagtcggcaagtcttatgtctccactcggcatccaattcgacgtcaacacattggcatccgcccgcctttcgcaaatccagaaaatggaactatggactccgttcgcgtccagtgtgtgtggaaagtgtgcgctcggcccaagtcaatctgccgcttcaggccgaactgaacgccaactcggaccagggcatcagcctaaaggcgaacctgcccaagcagaagacgcagttggccagtgtccattccctacccatcaccttcactgcaaaagtggaccaaaacaccaaattggtcgcgcgagccgcgccaaatcgtcaccatccacgaccctaagctggagagacagcagtacgagctgaactcggtccagggacagaagaacttggccatgccattacacttccgcggacattaccattggccagccgagccgaccagctaccagcagttcgcgcagctccttttggccactgaaaacgcggtgaacattcactaccagccgagccgggaaagtccacgcgaggccatcttccgcgtcaccggccaacacttcgaacagttggcacagagtgaacagccggacgcacagctgcgcaacttcttctccgagaaattcgccaatgcgtacagctgcgacgacgagcagtgccaacagaggggcgattgcgaacaatgcgagcaaatcgagcagcaacaacgagaggacgcgcaggagttggaggaccaacagatgcgacagcagtcgctgcacagcttcatcagtgcgtacaagccgcgccagcaatacaaacactcgctgaaaatggtcgcgcagacgaacggcggggcgaaagacgcgaaagcccagggcgacatccaagccatatgcgacgagcagaccgcgtactgcaaagtgctggtgaaggtggagcgaccaccaatcggcaatgagaaccaaaaatggatgctgaacgcacaagcgcacgttttgatgccggagaccgccgcatcagtggagcagctgcagacacagcccaagcagttgaagcagttcatcgcccaggcgaaagcccagtggggacagcagggacagcagacgcagcaggtaaacatccgcgtgcacggcgcccaggcgcacacgcagcaggtgcgggcggtgctacagcaacaacagggcagccaactgatcagcgcgcagcatttgcgcaacatgcaacgccgcagcgccttcctgaacaaattccaaatcgaggcaatttactcgctgaaagccaacgcccaaaatgcgatcaaccgcgtgttggagctgttcaaatcggcctacttctggaacaccaaatcccaactgatgagcggacagagtgcacagaaagacggaaagatcgccgccacaattctaatcgacccggtgactcagaagagtgccaacattaccatccgaacgccggcgcaacagttgcgcatggagcagatcgaagtgccgtacaaagtgcgccctttcgctttgattcgccagcggagtgcgcaacagacgcattcgctggctcagctgttccaccaattcagcatcaaataccgcccccaatgcaccgttgacgggcgcaaagtgaacactttcgacgaattgatctacacggcccccctctcctccaattgttactccgtcgtggccaaagactgcggctcagaccaaccccaatttgtggtgctgatgaagaaggtcgcgcagcagcagcagcagcagcagacgaacaaaagggcccaaaacgcggctaaggtgctgaaagtgatcacaccagagcagcaaatcgaatgccatccgaagacaaacgccgctggcattccaacgcaattgatttgcaaagtgaacggacaacaggtcaccggagatgagcagtgccaggacagttcttcatgtgtgcagttcaacaacaaacaacaggatgacgtgaccattcagacggaggcaatcgcagtgcgtttcaacggacgcaaggcgtggctgaaggtgtcccaggcatacaaaaacacccaatgcggactttgcggacactacgacgactcggacgaccagggggaggagctgcgcatggccaacggccagagagcttccgacttggccgagttccaccgctcctacgctttggaagacgcggaagaatgcccacaacaggtgatgaacaacttctacagcgaacagcagcagcagaacagcgagcaggacacattctacgggcagttcaaccaatttgaggacgaagacgaagcggacgatgagcagcaacaacagtctgaaaaggacgaatggcagaatgagcaattcaatggccaattcgaggagcaaaacgatggccaagtcactgacggaggcaatccgttcgaaggaattttcaacgaccaacaacagcagcagaagtgttgctgctgctgtgacgacgacgaggacgaagagggcaccaacgaacagagccaatgccgacaaaactgccaaaacggcggggaatgcccagagaagtgcaacaaaaacgaccaaaagcaatgccgaaagtcatcgccaccacagccgcaacaacaacaaaattgcaaaggcagcgacgacgagcagtgcaaagggatttgcaacgacggagacgaagcatgtgccgagcagcagcagcagtggaaagcagtttggccgattttgagaaccaaaacccacgagcagaaccacgcggtgtgcttttccactcgcccggtcaaacactgcccgccggatgcctacccgtacaatccgatgaacggttatgagcagcagcagcagccgaagaccaagaaggtcagcttcgtgtgcatggagcgggcggagccggagacgcgtcggctgttgcgctcgttgcgacgcggacagcgcgtggtggacgtaaacgcacgcggcgcctccttcacggagaatgtgagcgagccgcatcagtgctggcgcagacgctactgatggatgaacggacgatttggtggatgacagaggagtgaccccccaacggagtagaaaagcacaaagcgtagaccaacccaaaaacaaaacaataatcaccctctgctgatcaatgccattactcaaatgatcagcaccacaactccgccatttcctataacaaattgtatttttgtgatagtttagaataaaaaatttattaataaaagaaaaaacaaaagaa

SEQ ID NO: 50016 - DNA, 906 bp, Heterodera glycines
gaatggcttcatttttacgcagtcggctgcgctgaaaacaaaaaaaaattataaggcaaagaggcggtggatcaccccatttctcaccaccaatcagtccaacgttccatcattaacaaagcagcgttcctaattttgccaatttctaagggtctttttcaagtcgaggatgtcttcgcctccttcctcagtccttccccaggatgttttcattctgtccgctgtgcgcactccgatcgcttcttttcgctcatcctttgccagccttaatgccgttgatttgggcactttcgttgctaccgaagcgatccaaagggccggcttaaggcctgaccaagtggaagagacggtgactggctgtgtgctcagcgctgggtcgggccaaaatgtgtcacgccaaatcgcgattaaatccggtatccccgaggcgaggcaggcgtacactgtgaacaaagtgtgctcttccagtcttaaggcattgattttgggtacccaatctgtgcagttgggacaacgttccatggttttggtggttggcgttgaaagtatgagtcaggcaccattttacttggcgcgtggtgacaacaattacggggatatcaaacttttggattccatccaacgcgatggcatttcggacgcaatgctcggccaaccgatgggtgtttgtgctgagaaaacggttgctgaatttggcttcacgcgtgagcagcaggacgcgtatgcactcgcctcctatgctcgtgcgactcgcgcgtgggcgggcggcgcatttggtgcggaaattgtgccggtgaaagtcaaacagcggaagggcaccgagttattggtggcagaggacgaagagtatcggcgactaatgcccgacaaagtgccttcgctgcagccggcgtttgtcaaggacgg

SEQ ID NO: 50017 - DNA, 885 bp, Heterodera glycines
cacattctcttctcgccaaagccttctccgcatttgttaagccgccgttctcctcaacaaataacacacaaccatcatgtcggaaaagaaggtcaaaaaggtgaagaagaagtccaggaccggctccgaggcgagctccttcgaccagaagaccatccaggagttcaaagaagcatttggcattatggaccaggacaaagacggagtgatcagcaagcaggacctgaaggacttgtacgccacactcggagttgtggcgagcgactcgcagatggacaacatgctcaaggaggcaccggggccaatcaatttcaccgttttcctgacactgttcggagaacgactgactggcactgaccccgaggcgacaattatcggcgcctttcaaatgttcgacaaaactgactgtggcgaaatcacagaagagacattgatgaaaattctgaagaacaaacggggggagccattgacggaggacgaagtgcaagggatgtacaaagggaaccctccaattagtggaggcaaagtggactacaaggcattcgcgcatttgatcacgacaggcgcagcggaggagttggccaaagtgggctaagcggggccatggacggacgggggaggaaggagtggcggggccgaggccaacgagtgacctgccgattcgggggaaaaccgatcatccatcccgtcgttctttccatccttacgatcgatcacccttttccccctcgcccattgtatctccttttgttctctttctaatcgctccctctccaaaatgtgtgtcccggctggcgagaatggcagcaccttctaattctataaaatgcatcgtttgttttcgcttcactcagtgcacttccaaataaaatcgaatggatgggt

SEQ ID NO: 50018 - DNA, 868 bp, Heterodera glycines
acgaagcaacaaaatatggccatttttgttacgaggacgacaaagaggaagacgaagacccgttcagtttcggcaaaatgatttcggcacaaaagaagggcagcgaggacgacagtgattgacggttgaatatttttgctattgtgctaaaatccatttttgtcagtgcttttacatggtttggtgtttgtttaattaatgcaaatttaaattcgaggcaaaatttcataaatcacattttaattgtttcactgtcttgtccaaaaatttttttgttttgtcttttctgaaaaacaatcacttactctccgccatttcattttcgcaaaacgaacgaataaatcacacatttaacaaaacttgctcattattttgtttgtaacaatttgtattttcatttgctgattattcaataaaattccatttcattttttcggccttcttgaatatgaatactcctgctgcctatgagccgtttctgttggctgatggagagaaaaaggtggtcattgagaaggacacaaaagtgccgaatgcggcggtgtttacttttaacaaggaggaccacaccctcggaaacctcctcaaacatcagctcctcaaagatccgaaagtgctttttgccggctaccgaaacccccaccccttggaacacaaaattttgctccgtgtccaaacaaatcccgaaacaacgccaatggaagcattgaacaatgccattgaggatttggtggcggagttttcattattggaagagcgatttcgagacgcgataagggaaaaacgagaagaatgagaaattgttcttgtttacggaactgattattttatttcatttttcaataaataaataaaagtagcaccgaaa

SEQ ID NO: 50019 - DNA, 430 bp, Heterodera glycines
ctgcgcaagaagcaacatttgctggtgcaggcgcgggagaattggacagcgaaagatctgaaaagagtggtggagggcattctgaaggtgccacccgagaaacagtctctgtacaagccgaccaatgagcagcggacggaatgggaggcaatggacgagaagcaaacgttgcacgaattgggattcacaatgaaaaatgcgcgagcggatggcccggctgtgttggcgttggttttgccagaggatggcaaaagtcccgacatagtgccgatgacagtcgcaccgccggtgcccgaagcaatggcacagaacaaacagtccgaagttgaaatggtcgaggagtgacgacaccacaacattttagagggcagtgattttctcagttgacttcgccaaattttattggaaaataaataataccgaaagcatt

SEQ ID NO: 50020 - DNA, 500 bp, Heterodera glycines
gtacccggcacgaggtaaggatacaagtattaaaataatatgccgccaaaagcctcgaagaaaactgacccaaaagggggaaaagcggcaccagcgaagaagaaagagggcggaggaggagggaaggccaagaagaagaagtggtcgaagggaaaggtgcgcgacaaactcgccaacatggtcttatttgaccaagccacctatgacaaattgtacaaggaaatcatctccgtcaaactgatcactcccagcgttgtctccgaacggctcaaagtgcgcgcttcgctggccaaggcgggcctggaagagttgcaccagaaggggctgatcaaatgcgtggtgaagcacggttcccaattggtgtacacacgggccaccaaagcggaggaagcctaagaaaagggggaaacggggcgatttggtttttcctttttttttagattgttgatttgttgaatgaatatgtttttttaatttttaaaatcatttgttaatctgtc

SEQ ID NO: 50021 - DNA, 666 bp, Heterodera glycines
gagctctataacacatatatttcataaacattcatcattgaaaatgggcgagaaatttgttggcaaatggaatttggagtcgtccgaaaactttgacgacttccttaaagagattggtgtcagttatttgacgcgaaaggctggcgcatgcatcaagccggtgctcgagtttgaagtgaacgggaacaagtggaagatgacgtccacttccacattcatcaccatctcatgggagttcgagttgggccaggagaaggaggtgaagacggccgacggacgcattgtaaagacaaccttcacctttgtggacggcaaactcattgagaaccagaagaagaccaaggcggaggaaaaggacagttactatgagcgttatgtggacgcggatggaaagctcatgatcaccatggactgcgacggagtgaaggccaaacgagtgtacatcaaggcatgattaaaaactaattgatgaggaggaagaatggacgaaaacggagggactgagagggacacaatgccaaacaaattgcgccaaaaataaatttaaaaaataattgttgtttgtttttgagaccaaatttgatagaccaaagaatgcctagatacaagttggatgattttgaattgttgtagttttttggagtgaaaaataaaacaatttaaaat

SEQ ID NO: 50022 - DNA, 1086 bp, Heterodera glycines
cctcgtgccgaattcggcacgaggtaaaatcactgtttgactcgcattttaattcgctgccaaatagcaaattcaagtgcatgatttcaagaatggcctcctcttcgtgttcctcgccgtcttcctcctccaaatttggaccacaaatgaaatgttcaacgccaaaacccgtgccaatggatgatgacggcacggaggagggcgaccacggcgaacagttgctgttggaccggcacgagttgcgcattctgtgcgacgagcatttgcagagcggtgactgtcagacggccgcattttgggccgaaaaattgttggcattgagcatcgggaggacactgaacgaacggttgccggacattgcgcattatttgtcggtgcttacggcggcccaattttggcagacaatcatcacattaattgaacggcatgacctgttccccaagcatttggtgttcgcctttttccacatcaatgcgctgttccatcgcgagttgtactcggaaatcattgcactgcccgtcggctatttgtgccattgggacgacgtgccgttcattcagccggacagtgccacgtacatttgtgccgaaaatgacgcggtccgtgagcccggcattcgccaacagttggacacattgttacgtgaaaagaaatacgaaagtcgaatgctgttgctgctggccaaaacgtatttgatggtgcagaacaggccggccgccgccggctgtttaaagcctcccgaattctcgaaggccacttcgagccgttgttgtacattgcggtggagtactgttttgccaacaatttcaagctggccgccgactttctgacagacgcggcccaattgctatggatgcccttcgtctgctcgtcggtgccaacaatacttcaaatttgagtgccgttgttgacgaacaacaaaatgccatcgacgattattcggacggtcagcaacaaccgccgcaacaacagcatcaaacggttgaacaactgatggcccccggtcatcgacttcgggagccgttgttttgatcaattttcatgatttttgttttttttcattttgtctttcctcacctttgtttt

SEQ ID NO: 50023 - DNA, 1080 bp, Heterodera glycines
gtccatttaagcgaaaaatgcacttgggagaataaacaaggagagaaacaggcggagacgcgggcgcaactcaaagacgacgcctttctcagggaaattcactcgcggctgaaacccggcattgaaaattcggagcgtcgtttcgatgtgcacaaattcacttgcgccgctttggaattgcccgacttttcggacttcgcccgactccgtccgttaattgacgcactcattgctgaattggatctcaacgatttcctcggctgcaccgcggcgctcgaaatgctggcggagacggccgccacggcgccaaagtgtgtgcccttttttggccaaattggcctcctggacaaagtgtacgcgctgttcatccgaaccaaggaggagccggacatgggcatcattcacattgcgtgcattcgcttcttcgcctatctgtgcaccaccgatgacaacgcattgaccaaatttcccaaattcacggccgatgttttcgacgcggtgttcagatttgatgcattcgacgtcacgcgtcgtcagttggccttcgaaacgttggcagtgatcagttcgaccagcggggccaagcagatattctcgcagaacgaaactctctacaacatgcaacgggcgatgagcaatttggctgtggcggtggcaacggccgccgagccgtcgctgaaggcgcgtcatttggaagcagttcggatgttttttgatcggattgccgacgaaagcggttgccaacccgaacagaaatgcaccaccgcgtccgctgaggctgaagagcagctgctccaccggtggttccgctggttgggcgaaccgttcccccggctgttgctccaatgtgtcagggatcccatctccgaagttcagttggccgctctccgcgtgctgatggcactgacgcgccaccaatgggcgtatgcccatttttgtgccataactgatttcgtcaatttgctggtcgaccgttccgtcaatttcgacgccgacgcgatgcagctcaaatacgcgctcatttgtcgcttggttgaggccgcgccgtccgcgctgaacgacggacagatggaaatgctg

SEQ ID NO: 50024 - DNA, 640 bp, Heterodera glycines
aaatatggttttggacccgaaatcgaaagacaaggcgcgggaacttggttcctaccgcgatatgcggttcgaggggtcgttgcccgaacaagaacgtcggcttgcacagtccaccactctctacattggtaatttgtcttactttacttctgaagaacaggtatgggagctgttccgccgcgctggagacgttcgtcgggtgattatgggcctggaccgttttaacaaaacgccatgcggtttctgttttgtcgagtattatacacgtgaagatgcagaaaatgcactgagatacataagcgggactcgccttgacgacagagttgtcagatgcgattgggacgcgggttttaaggaaggtcgccagttcggtcgtggtaaacatggcggacaagtcagggacgagtatcggcagaattttgattcgggaagaggcggatggaacaaaacaattcaaaaacgaaatgaccaattcacccagcgaaatatcaaagcctgacattcgacttcgttggacaaaattcaatttaaaatctcattgcttattattattgaccgttgttttgttatccatttaaaatttgctcttatactttcatttcattacatttttggtgtatcagtgaacgcattcattcat

SEQ ID NO: 50025 - DNA, 1144 bp, Heterodera glycines
agattttcaaaatacaatttttatgtgtaataattttcaacgcattggcttttcgattcgcggttaaatgaatcgcgaagaaacgaataaacacccattgattgtcacttacgccggccgtcactatgacatctccggctttgtcagccggacatccaggtggtgagcgggtgcttcggatggttgcgggtgctaacgtggacagttttatcgacggcacttcggagttgttgggccctaaggcacgaacattccgccgccgcttatggaattttggcccgttattctttggaccaggagtttaagagagaccctttggtcgatagcaaagcgccgatgctttggagggtgggcgaattgagggaacgctattggacatggattcaccacccttacgacggagtgcttcggcttttcgagtccgaccttttggagcaattgactcggactaaatggtggcttattcccctcatttggcttccaatcgtttcgtattttttcttcaccggcctttcccttctgcgggaggacttcggcttttccggtggtcctttgctggccttcggtctgttcgccttcggctgtttggcgtggactcttctcgaatattcgcttcaccgtggccttttccattggcacccaaatgcccattcctaccgccaaatcactctccattttctactgcacggtctccaccacaaaactccgatggattccgaccgtctcgtctttccgcccgccgccgctgtgcttatcgtcggctttttctacaccatttaccggtccctcctcccttttcccattttttgttgcttcgcgagtggaaaactcttcggttacattgtgtacgacatcacccattattatttgcatcacggaaggcccgagacgaacagcggatggcactaccgaaaaatttaccaccacaaccaccacttcaaagactccgattcctcctttggcatttccaccactttttgggactacgttttcggcactgtgggcactttcaactgaatccgtgagaatgcgatgtccatgtgaaatgtcaaattgagcaattctcatcagtcatttatcccggcgcttctaattgtaaaaaagctcccatatttttgaaaacatttgcaaatttttacttgac

SEQ ID NO: 50026 - DNA, 1010 bp, Heterodera glycines
acgaggcaagtttgagctttgatcccgtattttcctctcttttcccatgccaatgttggcccatttcggctctttccaaggccaagatgttttcgagtgccaactccgctcagaaagcggagtggtcgtcaaagtgatcagcttcggtgcaattatccgcgattggctggtgccaacgcctcaggatcagctgcggtcggtggtcctcggatttgacagtttcgagaattacgtcgagcacagccctttcttcggtgccattgtgggaagagtggcgaatcgaatcggaagagcgagattcacggttgatggaaaggaatttttgctggcaccgaacgaagggaaaaaccaattgcacggggggacagagacatttgggagaaaagtgtggaagatggaaccgttgtgtgacaatgccgcggccaaatggccctcgggcgtccgtctctctttggaaagtgccgacggagagggcaccttccccggaaatttgcgagtgtccgtcacttatcggctgaccacaaataaattacgaatggacattgaggccacttcggatttgccctgtcctgtgaatatcgtccagcacaattatttcaatttgtctggccacggggacatccgcgaacattcgctgaaattggccgccgattggttcacgccgacttcttctgatcagattccaaccggagaaatactcaccgtttcaggcacagaattggactttcgggaagagaaaaaactccaaacgaaagacggaaaaccgattgaattggatcataattttgtacttaccaagggaaaaggaacggacgcacaaattgcagcagttttgagagctccggacaattcattggcacttactctgcgctccaatcagcccggtctccaagtgtacacgtccaagtcgctgtccgtgcccgtgcccggcctttacggccaacgctatgccaaatttggcggaatttgcctggaggatcagaactttccggacgcagtgaaccacgaaa

SEQ ID NO: 50027 - DNA, 853 bp, Heterodera glycines
gggtttaattgtgtgattggtttaagtaaatttctcctcgtccgtcatgttttatcacgacttgcacgacaacgaaaatagtcatgataaagagttaaaacagttggtacaaatggacgaccttgcaattcccaaatttgtaatgcctccgctcggcattaagccaaaaaaatttgtgcgcaaacattttgggccgaacagtcggcttccaatggcacagtttctgaagggcactaccacactgtcctttgtgtacaagccgaagacaccgcaagacaaaggcggcgttattgtggcggtcgattcgcgtgcaacgggcggaacttacatcagctccaaaacggtagagaaaatcattccgatcaacgaccaattggtcgcgactatggcaggcggtgcagcggactgtcagtattggacgcgggtggtgagcaaatattgcaatcttttcgaacttcgcgagggtacgcaaatttcggtggctgcggccagtaaatattttgccaatgttatgtacgactatcgtggccaagagctgggcgttcactcgatggtttgcggggttgacaagttcggcccttccatttacatggtcgaagctgaagggactcgcgtgaagattgacaccatttgttcactcgggtcgggcatgttacacgccatgtccattttggacaccaaatacaaggaggcgatgactgacgcggaagcgttggagttgggcagagaagccattgtgtacgcgacattccgcgacgcggcttccggtggccattgcaatttgtgtcatatcacttccgaaggaaagaccatatacccgccattcgatgtcaatgataagtattatgaattc

SEQ ID NO: 50028 - DNA, 482 bp, Heterodera glycines
gaccaggacagtctttttttctgtcataaaattggtgagcaaatcatctgtgcatgatgcagaccatcaaatgcgttgtggtgggcgacggcgcggtgggaaagacttgtctgctcatttcctacacaaccaacaaatttcccaacgaatatgtgccgacagtgttcgacaattatgcggtgactgtgatgatcggtggtgagccttacactttgggactgttcgacacggcgggacaggaggactatgacagactgagaccgctctcctacccacagacggatgtgttcctcgtttgtttttcagttgtcacgccggcatcatttgagaacataaaagaaaagtgggtacccgaaataacgcaccattgttcgaagacaccgtttcttttggttgggacacaagtggacttgcgcgaagacgccggcacctgcgagaagctggcgaagaacaaaatgaggccaatttcggcggagacaggc

SEQ ID NO: 50029 - DNA, 878 bp, Heterodera glycines
attaagataactgtgggcactaaagttttcatttttactgctattcactcaaaatgactcaaaatgggatgacaacagccagcaatgagttcaacgagctcaatgatttcctgtcaacgcgtgcttatcttcacggttttctgccgtcccaagaagaccaatatgtgttcaaatgcattgcggctgctccctccgccagcgaatatccgcacattgcgcgttggtacaagcacatcaaaagctacgaggatgctgaacgtgccacttggccaaagaaggctggacagccgccgcagaaagtcgtttcgaaagacagtgcaccaccggcaaagaaagccgacgccgaggaggacttcgacctgttcggcgacgaggacagcgatgatgaggagaagaagcgcatcaccgaggagcgcctgaaagcgtacgcggagaaaaaggcgaagaagccgggcccggtggccaagtcgaacgtcatctatgacgtgaagccgtgggacgacaccattgacatcaaggacattgaggccaatgtgcgctccatcgaatgtgacgggctcgtgtggggcacgtcccgaattttgccggtcgcattcggcgtgcagaagttgcagattggatgctgtgtcgtggacgagaaggtgtcgacggattggctcgaggaacaaatcacaggcttcgaagacctggtccagtcggttgacgtggtcgcctttaacaaagtttgaatgatgacagacgaatatattgacaatgactatttcacacacacacaaatattattattatgatgatgatgcccattgttattttgttggtggtggctgttttgtccattgttgttgatgttgtatagtaagtaaaaatggttgacactc

SEQ ID NO: 50030 - DNA, 1282 bp, Heterodera glycines
gtccaattaagattattttctcaacaaacttccgcttaatcttcagaccttcactattttcttgtttaaaaaagttgcaacgatggtgaaaccaaaggttggcatcaacggttttggacgtattggacgcttggcattgcgtgcagcgattgaaaaggacactgtccaagtggtggcggtcaacgacccgttcatcgaactcgactacatggtgtacatgttcaactacgactccacccatggccgtttcaagggcaaaatttccacaaacgccggcaatttggtggtggagaaggaggggaagagcgcgcacaccatcaaagtgttcaacctcaaagacccggccgaaatcaaatggggcgaagcgggcgcggaatatgtgatcgaatccaccggagtgtttaccaccattgagaaggcctctgctcatcttaaaggcggtgccaagaaggtggtcatctccgctccgtctgcggatgcgccgatgtacgtgatgggcgtcaacgaggacaagtacgacccggctaagggacgacgtgatcagcaatgcgtcgtgcaccaccaactgcttagctccgttggccaaagtgatcaacgacgagtttggcatcatcgaaggactgatgaccactgtgcatgcggtgaccgccactcagaagacggtggacgggcccagcggcaaacagtggcgagacggacgtggtgcggcgcagaacatcattccggccagcaccggggccgccaaggcggtgggcaaagtcatcccggagttgaacggcaaactgaccggcatggcgttccgtgtgcccactccgaacgtgtccgtcgtcgacctgaccgcccgtctggagaagccggccccgttggacgccatcaaagaggcggtgaagaaggcggccaatgggaagctgaagggcattttggcgtacacggaggaccaagtggtgtccacggactttcttggagactcgcactcgtccattttcgacgctggcgcttgcatttcgttgaacccgcactttgtcaagctggtcagttggtacgacaacgagttcggctactcctgccgtctggtcgatctgatcactcactgtgcttccaaggcatagaaagacgacgcgcaaaagagggaggaggaaaagagaaatatgctaattttgactctgcgtttattccatttctcttttttgatgccgtccaatgacttgtttctcctgaatttttttaggaattagagcgcacttttaatcacgttatacgtaaataaagttttgtttggcta

SEQ ID NO: 50031 - DNA, 790 bp, Heterodera glycines
gtttgagtttccgccttaatttgcccttgataatttgttatttctctctgctgaccaaaaacaataatggtgggcatcacagagctggctgaagcgaccaaaaaggcgtttggcgccgggccactgatcgctgcgaactgtgcgacagcagagaatgctaagagcggcaatgaagtggagtttggctcgatgaagttctacgggttgtgcggcattggcggaattctctcttgcggtatcactcacaccgccattgtcccgttggatttggtcaaatgtcggattcaggtcgaccctgccaaatacaaagggatcatcggcggcttcaaagtcactctccaagaggagggcgtccgcggcttggccaaaggctgggcacccaccgccattggctattcaatgcagggccttggcaaattcggactgtacgaaatgttcaagaatgtgtacgccgggatgatcggcgaggaattggcttacagctgccgtacctatttgtacttggccgcctcggccagcgcggagttcttcgccgacatgatgctgggcgccgatggaggccaccaaagtgcgcatccaaacatcggccggagcgccgccaacgctgcgcggctgtgcgccgttcatttaccggaccgagggactgatgggcttctacaagggactgccgccgttgtggatgcgccaaatcccgtacacaatgatgaaatttgcctgcttcgagcgcaccgttgaactgctctacaaacatgtggtgcccaagccagagccgaatgcacccaagcctgac

SEQ ID NO: 50032 - DNA, 508 bp, Heterodera glycines
ctccatggaaattgattcgcacccatccgcagcagttcagcccgaaccggcaccaattgagcaccaacagcaaaataacacgagaattttgccaaaatcgaaaaaatggtggaaaaaagcactgaacattaggccgatggccaacagcagcacaaagcccaggtcaagttgggagcgcaaaatgcagaagaagggcgagcgcgagcagtgccgtgcggtggaggccgaaatccggcaacggttggcagacgaacggaacgcgcgggcacaggcgttgaaggagcgcgagcagcgccgaaaaagcaatgagcggaaggcggaagttgtgcaagtgatccgaaacagtgcaaagctgaaacggatgaaacgcaagcagttgcggacgactgtgcagatgagagacaccaccgcgacaacttccgatggaaaacagaaataattggaggaaatcaaattttatttttttaattttgttgctgtttgatgaagaaataaaaaatttgtttcc

SEQ ID NO: 50033 - DNA, 1299 bp, Heterodera glycines
gtccgttcgatgccccctctctctccgcctcagctttttttccccgcttttctgctccttggccattttttgccgccgtttgcccatggccaattgccctcggcgatgcttcccgccccctccacgtcccaactccaagtcaaaatctcgaatctgcccgtccatgtggccactgcgcagcacttgccccaattggtgtggagggtcgtcggcagacaggcgacagaacgcgttttttgtgtcagcgaagcgccggtcagccaactgcgctttgtctgcgtggattgtgtgcagaagaacatcacggatttggtcgactatctgaacacggcgcaggactccaccagaattgccacatcgcccgccgtcgaattgcctccggtcgatgccaatccctcgtggaccggtgccacgatcatttgccaagccgcggtcaatggggggacaaaagactctccgccgtcggttgtcgacgtgcaatatttgaggggagtgcacgtggtcgactccaacgggcagggccccgtccacattcccaaccagggcttccgattttatgtggaatgcgtgcgcgggacggacggacagtgtcagcaaagtgcggcccgacggaagacgctccactgcgcggtgcaggcgaaccccgcggcgaactctttccgctggctgaagaacggcggaccgatcagcggcggaaatgggcccgagtttatgatcggcacggacatgatcggacactcgctgcagtgtgccgccaataatggcctttacggtgaagagctccaatcgcccgccgtttacatcgattcgtacaccgccgcccggctaattcaggacaattttcagcaagtgcagagcagcgcgcccttccaacagggaaaccgcgtcgaaatgggccagcgagttcagatgagttgcgtcgtcgaaggcaatcctcgtccggcggtgttttggaagttgcgaaggagcaatggccaagtggtcgacgcgccttgtccccagggtctgaacggtcagtaccgggaagtgcctccgacccaattgccgacgggcgcagccgccgtcgcaaattcattggcggcacaacagtctaattcgttgatccgtctgcaagccatttgcgacctgcaagtggccaactattccttctccggacagtattggtgttctgcctgttcctacgtgtcccagggactgcccgagtgttctccgggacaagacgcgccgggagatcgccttctgaatatccaagtgcagggaccgccgcaacagtccgagacggaaccaagcgtggagcag

SEQ ID NO: 50034 - DNA, 992 bp, Heterodera glycines
ttctgaatctataagtactacttccctattttaaaataataattattaagtgaattttcgacttacctataaatgtttctgacccgcagcgaatacgacaggggagtgaacactttttccccggagggccgtctgttccaagtggaatatgccatcgaaactgtcaagcttggttccacaagcatcggaattcacaccaaagaaggcgttcttttggctgcggaaaggcgttcaatgagcaaattggtggtggacgactcaatgagcaaaatttcggaagttgagaagcacattgccgtcgcctcggccggtctcatcgcagattcacgcacttgggtcgaacacgcgcgggtggaggctcaacacttttggtttacttacggtggcaaaattcgggtggaagacattactcaaaaggtctcaagattggcactgcattttggagacgacgactcaactatcagtctcggccgtccgtttggagtttctatgctttttgccggcattgatcacacgggtgcgcatctcttccatttggacccgtccgggacgtacattaaatgtttggccaaggccatcggtgccggctccgatgcagcggaacaaacgctgcaagagcactgtaaaaactgcgacaaaaaaatggaaatggccgaggcaaaacaagtcgcactgaacacactcaaacagctgatggaagagaaaatcaattccaaaaatgtggaaattgttatgattaagccgcagacggacaaggaaggcaaaacgttgggcaaaattgtgtggttagaggaatcggagttgcaagaaatcatttcgcgattgtagtcgaaggggacggattagagaaggaaaatgggctttgcactgccccttttatgattggatgaccttttgttattctctgcctttttgtgacttttcagtgtataaggcaaatgaaagcaattaattgagaaattggctaatatccaataaatgtttcaattctc

SEQ ID NO: 50035 - DNA, 1128 bp, Heterodera glycines
caagtttgagcgcaaattgtctggaaatagccaattagccatttaataattgaaggatgggcgaacaaatgaaattggagggttcactccgtggccacaacggatgggtcacgcaaattgccaccaacccattgtataagaatatgttggtgtcggcctcaagagacaaaaccatcatcgtttggatgcttgatgagagtgggtcggtgctaaacggcaaaccgatcaaatcattgcacggacatggacactttgtttccgatgttgtcatgtcctcggatggacagtacgcactgtccggctcctgggacaaaacattacgactgtgggacttgaacacaggacaaacgactcgtcagttcgtctcccacacccaggatgtgctgtccgttgctttctccgccgacaaccgtcagattgtgtctggctcgcgcgacaagaagatcaaactgtggaatacacttgcccagtgcaaacacaccatcgtagaggagtgccattccgattgggtgtccaccgtgcgcttttcgccttctcatgcgaacccagtgattgtgtccgccggctgggacaaaattgtcaaggtgtggaacttggccacttgccgactgaagaccaaccacttcggacacaccggctacatcaactcggtcaccgtatcacccgacggctcactttgcgcttccggaggaaaggacggctcggcaatgttgtgggacttaaacgacggcaaacacttgtacacattgggcggcaatgacgtgatcaacgctttggcgttttcgcctaatcgctattggctgtgcgccgcggttggcccggtggtgaaaatttgggacttggagaacaagacggtggtggacgagctgaagttggacattgccagcaccagcgccgcaaatccgatgcgtgtatccaaaaaatcgtgtccccaatgcatttcattggcatggtccacggacggacagacgctgtttgccggttacaccgacaacatcatccgagtgtggcgcatagcttaagcgaaatgttatggacagagaaatcggcactgatcgtccttttgatcagtttttgttgttgttgttgtacttcttttctgccgatttataaaagtttggttttaaa

SEQ ID NO: 50036 - DNA, 629 bp, Heterodera glycines
tcaaaacgtacgggccaaggcccgagtcgttcacgcttgacgacggtgaacgttattatgtcggtgcggacgtgggccagtacttgaaataccatcgcggcacgctgtacaaacgctacccccaactgtggaagcgaatggcatcggtggaggagaagaagaagatccaggagttgggctgtgccacctcctacatcaactcgaacattatgctggtcaaagcgaacgaggttgaagacatttttgacggacaagaggagaaatatcgcgcgtcggtcagcggcggcagtgcgtacggacgcgcggagggtgcgcaaacgctgcgaagtcggggcagtgctccgtggctgaaccagcaggtgaccagcggttcccaccacctcgagtccgtgccctgctccaccccttcggcgcacgggcgaggccatttcaaaaatcgcgactacgcttacgtggcggatgacctcgagtcgtatcgccgggtgatggaaaatgcgcaggccggcgaatgtttggtgcccattcggctggacatggaattggacaatattaaactgcgggactgcttttgctacaacaaaaatgacaaactgatcacacccgaaatggttgcagaagtgttgtgtgaa

SEQ ID NO: 50037 - DNA, 652 bp, Heterodera glycines
cttggtttttagcccgagaatgttcaaaacgtacgggccaaggcccgagtcgttcacgcttgacgacggtgaacgttattatgtcggtgcggacgtgggccagtacttgaaataccatcgcggcacgctgtacaaacgctacccccaactgtggaagcgaatggcatcggtggaggagaagaagaagatccaggagttgggctgtgccacctcctacatcaactcgaacattatgctggtcaaagcgaacgaggttgaagacatttttgacggacaagaggagaaatatcgcgcgtcggtcagcggcggcagtgcgtacggacgcgcggagggtgcgcaaacgctgcgaagtcggggcagtgctccgtggctgaaccagcaggtggcccaaaaaacaaatgtgaccagcggttcccaccacctcgagtccgtgccctgctccaccccttcggcgcacgggcgaggccatttcaaaaatcgcgactacgcttacgtggcggatgacctcgagtcgtatcgccgggtgatggaaaatgcgcaggccggcgaatgtttggtgcccattcggctggacatggaattggacaatatttaactgcgggactgcttttgctacaacaaaaatgacaaactgatcacacctgaaatggtt

SEQ ID NO: 50038 - DNA, 1179 bp, Heterodera glycines
gtccaataaagatttaacaaataaatgtccccttctctttccgtcgccaactcaaatgtttctcgacagcttggccaaccaaaagtagcgggcttcaaagataaggataagccggaaagtgttcgtaccagcaacatcgtggcagcaaaggctgttgcggatgcgttggtcgagctgtccaaagcgcaggacattgaggcgggcgatgggaccacaactgttgtagtgttggccgggtccttgttggacgctgcagaaaaacttcttgccaaaggaattcatccgaccaccatttccgactcattccaacgggcggccacattttctgaaaaagttctcgaggaaatggccacacccattgacattaacgatgacgacgagttggtaaagctcgccatgacgagtttgaactcgaaggtcgtttcgcaacattcccatcttttggccccaatggcggtgcaggcagtgaagaaactgatgagttcaccggaggactcaagtgtcaatctgaagctgatcaaagtcgtgaaaaagttgggcgaaacggtggaggagtcgcagctcattgagggagcgctgatcgatcagaaatcgatgggccacggaggccccgcgcgggtggagaaggcgaagattggcctcatccaattccaaatctcaccaccaaagcccaacatggaaaatcaagtggtcatctctgactatgctcaaatggaccgtgcgctgaaggaagaacgaaattacattttggaactgtgcaagcaaatcaaaaaggccgggtgcaatgtgctgctaatccaaaagtccattttacgcgatgccatcaacgaaatggcgctgcattttttcgcaaaaatgaaaattatggtgatcaaagacatcgagcgggatgacatcgaattctatgccaaaatcctcgggtgtcgcccggtggcatccgttgaccattttgtcccggaatcgctcggaacggccgatttggtggaggaaattgagacggctgatgggaaagtcctcaaagtgaccggccttaaacagagtgggtgcgctgtgtccattttggttcgcggctccagcaaattggtgttggacgaagccgagcgctctctgcacgacgcattgtgcgttattcgctgtttggtgaaaaacacgcccttctgaccgggagaggtgcccccg

SEQ ID NO: 50039 - DNA, 637 bp, Heterodera glycines
gtttgagatagcactttttgattaccatcgctgtacgcaatgaagacagagacgtgcgtttattccggctacaaaatccacccgggccatggcaagcgagtggtgcgcgctgacggaaagatccaaatctacctgagcaagaaggcacagcgtggtgcagcactgaagcgcaacccgcgtgacgtgccgtggaccgtgctgtaccgacgaaagcacaagaagggagtacacgccgaggagggcacgcagcgaaagcgcgtgaagcgcaccgtccaaattgcttctcgacccatcgccgacctcaccgtggaggcactgttggcccagcgcaatcagaagcctgaattccgtaaacagcaacgcgatgcggccatcaaggctgccaaggagtccgcccgagtcaaaaaggacgagaccaagaagaagcagcagaagattgacaaaaaggcagcgccaacgaagacgaaggcggccaagcaggtgaaagcgccgaaacaattcgtgggcggaaagcgctgattttgtgacgaaaagatgggatgtgcttgtgtgaattcggggcgggaattttgtttttgttcgagttctttgtcctcctcatttttgttgttgaaaattaaaaaacaaacaaattctt

SEQ ID NO: 50040 - DNA, 638 bp, Heterodera glycines
caagtttgagatagcactttttgattaccatcgctgtacgcaatgaagacagagacgtgcgtttattccggctacaaaatccacccgggccatggcaagcgagtggtgcgcgctgacggaaagatccaaatctacctgagcaagaaggcacagcgtggtgcagcactgaagcgcaacccgcgtgacgtgccgtggaccgtgctgtaccgacgaaagcacaagaagggagtacacgccgaggagggcacgcagcgaaagcgcgtgaagcgcaccgtccaaattgcttctcgacccatcgccgacctcaccgtggaggcactgtttggcccagcgcaatcagaagcctgaattccgtaaacagcaacgcgatgccggcccatcaaggctgccaaggagtccgcccgagtcaaaaaggacgagaccaagaagaagcagcagaagattgacaaaaaggcagcgccaacgaagacgaaggcggccaagcaggtgaaagcgccgaaacaatttgtgggcggaaagcgctgattttgtgatggttgacgaaaagatgggatgtgcttgtgtgaattcggggcgggaattttgttcgagttctttgtcctcctcatttttgttgttgaaaaattaaaaaacaaacc

SEQ ID NO: 50041 - DNA, 763 bp, Heterodera glycines
cctacttctgatcaatcccgttatcctctcccaattttgtctgcaaaatgtcggacgactatcgcagttcgattggcccacggcctgcgttcaaccgcaactcaacagcctattcaagtacgggcggacctgtctcgggcggcaaccgcgtgctgaaaattgtcacggagacaatgtcatcgagcaccagcggcggcggcggtggcatgtcaccgtttggcgccaacgcggctcaaatccgtgactcccgtgatcgcgagaagaaggagctgagtgatttgaacgatcgattagccaattacattgaaaaggtccgcttcctcgaggcccagaaccgcaagttgaaggcggacctggacatgctgcaaggacgccgcggcaaggacaccatcaccatcaagacgatgtacgagagcgagattcagacggccaaaaagctgatcgaagacacgggccgatcaaagcacgagttggagcaggacgtggccaaactgcaacgtgacttgtttttagcagcgccgcaaatacgaggaagctgttcgctcacgggccggtgaccgtgaaaagttggacgatttgctggtccaattgagcaatttggaggccgaaatcagcctgttgaagcgtcgcattgccctgctggaggaggagctgagcaaactgcgcaaggagaactcacgactgcaggccgacctgcagcgcgtgcgtgccgagttggatcaggagacgctgaaccgcattgactaccaaaaccaagtgcaga

SEQ ID NO: 50042 - DNA, 669 bp, Heterodera glycines
gtccaataaagatttgtttttctgtttaatttctcgaaatgcatgcaattcgcacaatttcccgcacattttccaggtcgaccaccgcgccagtgggcattccattcgtggtggacaatgacgggaaaacagaacgcgtctacgacatttattcgcggctgctcaaagatcgcatcgtttgcgtcatgcaacccgattgatgacttttttgctgcctctgtgatcgctcagctgctttttctgcaaagcgaaagtggcaaaacggcgattaacatgtacatcaactgtccaggtggcagtgtgacggctggcctcggcatttacgacacaatgcagcacatttcggcccctgtcgccacttggtgcattggccaggcgagttcaatgggcagtcttttgttgacggccggtgccaagggaatgcgcacttcgctgcccaatgctcgcattatggtccatcagccgagcggtggcgcttacggcacggcggcggacattgtgatcagagcggaggagatcaaccgaatgcgaaaacggctcaacgaaatctatgccatgcacacgggccaaacggtggaaactattgaccaggcattggacagggatcgtttcatgagcgcactgcaagcccaacaagttcggttgttcgaccggtacgggacgcgttcg

SEQ ID NO: 50043 - DNA, 301 bp, Heterodera glycines
caagtttgagtgaatagctttgctttatctaattttgcgtaaagatggacaagccaatcaaactcgcgaaagtcacgcgtatccttggacgtactggtagccaaggccagtgcacgcaagttcgtgttgagtttttggatgacacaaatcgttcgatcattagaaatgtgaagggccctgttcgggagggcgacattcttaccttgcttgaagctgagcgtgaagcacgtcgcctccgataaatcaacactaccattttgttgcgtatttctgaattgttgataaagaatgttgttaaaaa

SEQ ID NO: 50044 - DNA, 1122 bp, Heterodera glycines
gaagaataagacttataattgctattattcaaaggatgtcggattcaatcaaacgtatttttgcacgttatatttatgactctcgtggaaacccaacggttgaggttgatttggaaacggaaaaaggtcttttccaagctgctgtgcccagtggtgcatcgactggagtctacgaggccttggaattgcgtgataatgacaaaactgttcatcatggaaagggcgttttgaaggcggtcgataacatcaattcaaaaattggtcctgctttagtcggacaaaactttgccgtaatgcagcaaaaccaaattgacaaatttctcatcgacttggatggcactgacaacaaagggaaacttggtgcaaatgccattttgggagtctctttggcggtgtgcaaagctggcgctgtgcacaaaggccttcccttatacaaacacatcgctgagttggctggaacgcggaaggtgattttgcctgtgccggctttcaacatgattaacggtggatcgcatgctggcaacaaattggccatgcaggagtttatggtgctgcccactggagcgaaaacattcaaagaggccatgcaaattgggtccgaaatttaccaccatttgaagaaggtcatcaaagaacgctatggattggatgcaacttcagtcggagatgagggaggatttgcgccgaacatccaaaacaacagagagggattggatctgctcaaagaagcgttcgccgcatctggacaccaggacaaggtcattattggtatggatgttgcggcaagcgaattctataaagagggaaaatatgacttggacttcaaaaatccaaacaccgataaagcgcagtggttgaccggagaacagctcgccgatatgtacaagtccttcatcaacgactatcccgttgtgtccattgaagatgccttcgaccaagacgactgggaaaattggagcaagttgcaggctgccatagacattcaacttgtcgtcgacgatttgacagtcaccaacccgaaacggattcagaaggcggtgcagaaaaaggcatgcaactgcttgttgcttaaggtcaaccaaattggcacggtcactgagtcaatcgaagcttcaaaactgg

SEQ ID NO: 50045 - DNA, 652 bp, Heterodera glycines
ccaagtttgagcaggcaaaatggcctccaaatttgtattcagtcttcgcttttcctacccgaggcttttaaccagcagtgccctcaacaacaaaaaatcgggcccaaatttccttcagtctcgatcaattgtaaccaaatttgacctggaattgcctgacgattacccggagccttggccctacaaacaatggggcttcaaccaatttatgcaacattttgacaaaacgctgaagcgctggcacatcaactcgaaactgatcgttttcgaaagcaacattggcgtgggccggtcgtcgatcgcaaaggaattggccgatgcgttgggcttttattatatgccggcctttaaaatggacgacattttggttgaccgttacaacaatgacatgcgcgactattatcatttgtttccgaaacgctttcggttcccggacatcaacatgttctacaaggacccggccgacgaccaaacggctgtcatgcaagatctgatgtacgactgccgttgggagcagtacctgaacgcacaggcacaccttttcaacacgggccaaggcgtcgttttggagcggtgcgtccacgcggactttgttttcgcaaatgcaatgcgtgccaaggattggatcagcagagaatacctcaatttttac

SEQ ID NO: 50046 - DNA, 669 bp, Heterodera glycines
gtccaattaagcaggtaaaatggcctccaaatttgtattcagtcttcgcttttcctacccaaggctcttaaccagcagtgccctcaacaacaaaaaattggtgccaaatctcattcagtctcggtcaattgtgaccaaatttgacctggaattgcctgacgattacccggagccttggccctaaaacaatggggcttcaaccaattcatgcaacatcttgacaaaacgctgaagcgttggcacatcaactcgaaactgatcgttttcgaaagcaacattggcgtgggccggtcgtcgatcgcaaaggaattggccgatgcgttgggcttttattatatgccggcctttaaaatggacgacattttggttgaccgttacaacaatgacatgcgcgactattatcatttgtttccgaaacgctttcggttcccggacatcaacatgttctacaaggacccggccgacgaccaaacggccgtcatgcaagatctgatgtacgactgccgttgggagcagtacctaaacgcacaggcgcaccttttcaacacgggccaaggcgtcgttttggagcgggggcgccacgccggactttgttttcgcaaatgcaatgcgtgccaaggattggatcagcagagaatacttcaatttttacatgtacaagcgcaagca

SEQ ID NO: 50047 - DNA, 705 bp, Heterodera glycines
agacgtcttctgattggcaaattcagacatcctataaaattgttcttcaacttccgtcattggtggagcaacaactggaggacgccaagttttaaacaatgccaatcaaagcatccggagaaactttaagaaagtacatcgttgttggacgtaaactcccaactgcaaatgacccaaatccgacactgcatgaaatggttatttttgccagcaaccacgtcgttgctaagtctcgcttctggtacttcactagcatgttgcgtcgtgttaaaaaaacacacggagaaattatttcatgtcaagaggtcttcgagaaaaagcctggctccgtgaagaactttggcatttggctccgctacgattctcgtactgggcaccacaacatgtaccgcgagtatcgcgatgtttgtgaagcgggtgctgttacgcagtgctatcgcgacatgggcgctcgtcaccgcgctcaagcggatcgcattcagatcatcaaagtgcaaaccatcagtgtggccggactgcaagcgagccggggtgaagcaatttcagaactccaagatcaaatttccgcttcctcaccgtgtgaattccaagcgacgcaatatgactcctttcacgacacagcgtccgagaactcattttgtgtagagaaagaaatgagacgacttgtatttccgatttgttgattaaagttgttgtgttaaaaaa

SEQ ID NO: 50048 - DNA, 818 bp, Heterodera glycines
gtttgagtttggttttcaacattaaatttttacaatttaaatttacggatggacgcggaaacaaaaaattataaactcacttatttttcgtcgagaggaattgcggaacccatccgtcttatcctccattacaaaggcattccgtttgaagacgtcactttcagctcaactcttgccgatgagtcatcgcgagaaaaatggctgaagcagaaacaaaactatctttacggccaattgcccaacctcgaatgggacgagggaactgagcacaaagttttggcccagtctcaaacaatttgtcgttatttgggcaataaatatggtttggccggaagcgacttttgggaagcggcaaaaactgatgaaattgcggaatggttcaaagacatttgggccgcgtttctgccctttttgaaagtggcggtgggagccgaggcgggcgataaggaagccatgaaaaaggaaattttcgtgccgctgatttatgaccgtttggtgacgacgctggtggaaatgctgaacaaatctggctccggctttttgcttccgtccggcctcacttggactgactttgtctttgccaatgccttaaccacttttaacaacatggacaaaggccttctgttcgaaagtcacaaagtgttggccgactacgaaaagcgcgtttattcggccaacgaatcgataaaaaaatatgtggaggggcgcgaggccaaagaattttgacggctcgcaattcgatgatgatttgttgatgacaattaatgctttttttaatgtttttgactttaaggacaagtaaaaattttctaagcttt

SEQ ID NO: 50049 - DNA, 659 bp, Heterodera glycines
gtttgaggtagtgtaataaattcttattgtagtaaaaatgttcgaaaataagtccgaaggtggcgctgaaaagaagaagagcggtggattcaacacgaagaagtttttgttggacctcgcatccggcggaactgctgctgcagtctcaaaaaccgctgttgcacccatcgagcgtgtcaagctgttgttgcaggtgcaagatgcttccattcacatcaccgcggacaagcgctacaaaggcatcatcgatgtcctcgtccgtgttcccaaggagcagggctttctgtcgttgtggcgtggtaacctggccaacgtcatccgttactttccgactcaggcgctgaacttcgccttcaaggacacttataagcgagtcttcacgcaaggagtggacaaggagaagcagttcttgaagttcttcgccatgaatttggcttcgggcggtgccgctggcgccacttcgctgtgttttgtgtaccctttggactttgcgcgaacgcgtttggcagcggatgttggaaaggccgatgcccgtgcaattcaaaggtttggcggactgcatcctgaaaaatcctcagtccggacggtccccatccgccctcccacccgggttcattcctcctcatcaagggcattcatcattttaccgcggccccttt

SEQ ID NO: 50050 - DNA, 675 bp, Heterodera glycines
gtttgagataattattttttgctttttttgaaacttcgattgcattgattgtgaaccgtgtcccttaaattcctttcttcctcgacgtgtctcgcgcgagttcggctaaaaataccgaaaaagctgaatatcaaagagcaattcaaaacagtggcaaagacctttctgcacatcaattcgagtgaacgtttcttccatccgttcgtccgttttcaatgaatttccgtccctttgcctttctctccctccgcttttcctcctcctcttccgcctcttcttcgtcccttcttccctcttaccggaaggcaattgtccatccaattgttcgtgtcgaccacgcgggcgaattggcggctgacagaatttatgccggtcaactcgccgttcttccgaaaacccatcgtctcgttccgataattgaacaaatgcgacgcgaagaaagacatcatttggacgagatggagcgattgatagtcaaatacggagtgaggtcgactgcgttggctccgatttgttcggtggccggttttatgttgggtgttggcaccgctttgcttggcgaaaaggcagcgatggcatgcacaattgccgtgggaggaagtcattggcccacattacgatgaccagatcaaagaattgatggcggatgatgccaatgccaaccgcgaattaatg

SEQ ID NO: 50051 - DNA, 1129 bp, Heterodera glycines
catttgttcactttaatattttgccatgtcttttcttgtcacattagccggctatttgacaattgccatttttctccagaaactctttcgctctctgtacaatgtggttttcccctatttgttcgctgttcctcagaatatcaaggtgctcgcgggtgccgagtgggcagtggtcaccggcagcactgacggcattggcaaggcgtacgcgctcgagttggccaagaaaaacttcaacgtggtgctcatctcacgctccatggacaaactgaacgcagtggcggaggaaatcaaacagaaatatcccaatgtggaagtgaagtgcatctcatttgacttcaccaacgcaaatctgaaggactacgagcagacaattttctcccaactttccaccatcgaagttggaatgctcgtgaacaatgtcgggatgagctacgagtaccccgagcgattggaccgtattgagggcggactgcaacgcgtctccgacattaccgtgatcaacaccctgccgactacggtactctccgcttttgtgctcaaacagatgagggaacggggacgcggcgtcgtcgtcaatttggcctcctcggcagcgtatttcaattggttttacctggccgcttattccgcgtcgaagaaatacgtgtgttggttgtcctccattctgcgcatggaatacgccgacaccgacattgtcatccaaacggtgtgcccgatgatggtggccaccaaaatggccaagattcgcaaggcttccttcttcacgcccagccccgaggaatttgccgcccaagcgctccgcagcattggcttggtcgacgagaccaccggctgtttgtcccaccaaattcaggcggagctgatgttcggctacgtccccgccccgttgctgaacaaattcgtgcgcgacaactcactgcagacgcgcaagcgcgccctgaagaagaaggaagcgacggtggcgaagagtgaatgatgagaaaaaagaaagaaaagtgatgtgaaatattgacattcattgaaacaaccaaagtaaattaaagttatttaataaccaattctaatgccatttttgttattttatattcgtataggatgggaacacacagataaaattctaaagtgc

SEQ ID NO: 50052 - DNA, 541 bp, Heterodera glycines
aggattattcgcctgattctttataatgggaaagccgaagggaattagaaccgcaagaaaactgaaaaaacatcgtcaggagcagcgctggaatgacaagcgttacaaaaaaaccaatcttggaactcgttggaaagccgatcctttcggcggagcctgtatggccaaaggaattgttctcgagaaaattggcgtcgaagcgaaacagccaaattctgcgattcgaaaatgtgtccgtgtgcaacttatcaaaaatagcaaaaagatcactgcttttgttccaaacgacggttgcttgaattttatcgaggaaaacgacgaagtgcttgtgtctgggttcggacgaagtggacatgccgttggagacattcctggagttcgtttcaaagtagtcaaagttgccaacacgtcattgctcgcacttttccgtggaaagaaagagagacctcgttcatagaaactgacttcgcatgataaaggattttttcctttcattgtttttgttgattgcgattccgaaataaattgttgttgaagctaa

SEQ ID NO: 50053 - DNA, 328 bp, Heterodera glycines
agacgcttcaattgccgattccgtttgaaaatggttcacgaaaacatccactggtcccggccgcgcaaatttgggcgccggctcgcgttcgtgtcgcgtctggcttcaaccaccatggactgattcgtaaatattcactgaacgtttgtcgtcgctgcttccgtgaatatgcctccgacattggattcaaaaaactcgactgaatggcgaagaggaatttatgagcagtcattggagggttgttttttgtttgttctgttcgttattttatgttgataaaaaattgcgttaagaaaaagaatgaaaaaactcgagactagttctctct

SEQ ID NO: 50054 - DNA, 672 bp, Heterodera glycines
caagtttgagatcaattttctgtttaaacataacgaaaaatgaagctgattgaatccagcgacatcgtcaaattcccagacaatgtcactttcgcgctcaacaaccgtgttgtgactgtgaagggaccgcgcggtacgctcaagcgcgactttcgccacttaaacattgaaattatgcgagaaaacccgaagctgctccgtgtgcggaaatggtttggcatccgcaaagagttggcagccattcgcacagtgtgctcacacattgaaaacatgatcaaaggtgtgactgttggatttcggtacaaaatgcgctcagtctacgcgcattttccgattaacatcacgcttcaggagaacaacaccgtcgtcgagattcgaaacttcttgggcgagaaatttgtgcgccgtgtcggactaccgcaaggcgttagcgctgtaatgtcgaccaaacagaaggacgagttgatcattgacggtaccgacatccaaaaagtgtcccaggccgctgctcgcatccaacagtcgacgaccgtcaaaaacaaggacattcggaaattcctggacggcatttatgtgtcggagaaggtggccattgccgatgaatgagcacacaaagataaaaacccattgttaccccttttttgttggtcaaatggataaagaaatgttgtt

SEQ ID NO: 50055 - DNA, 825 bp, Heterodera glycines
gtttgagataaaatttgaagcaattaaaaaatggctgatcgtgcggggttccaaagtggatttggtggtgctgctccaccgtcggcgcgtgggcgtggtgggcctcgcggtcgtggccgtggcgctgccagagggcgaggacgtggaaaggacgccgagaaggaatgggtcccggttactaagcttggccgtcttgtcaaggatcgcaaagtccttacgattgaggagatttatctccactcgcttccgattaaggagtttgaaattatcgaccttttgctttctggactgaaggacgaggtgctgaaaattatgccagtgcaaaaacagacgcgagcaggacagcgaactcgcttcaaggcttttgttgcaattggtgaccacaacggccacgtcggactcggagttaaatgctcaaaggaagttgccactgcaattcgcggagcgattatcgccgctaaattagccatcattccagtgcgtcgtggctactggggcaacaaaatcggaaaaccgcatacggttccatgcaaggtcactggcaaatgtgcatctgttctcgttcgactcattcccgctcctcgtggtaccggcattgttggtgcgcctgtgcccaaaaaattgctccaaatggctggcattgacgattgctacacttccgccgttggccagacggcaactctgggcaactttgccaaggcgacttactacgccatccaacggacatattcctacttgacgcccgatctttggaaagagaacgaattgccgagaaatcctctggatcacattgggcggtggcggggcgcaataagcgcagcgagg

SEQ ID NO: 50056 - DNA, 501 bp, Heterodera glycines
caagtttgagctcataaattgtcttgcagaagtatttaattaaaatgattgaaacactcgagacgagcgaagtgttgaagcgggtccttaagtctgcgctgattgtcgacggagtggcacggggtttaaacgaagcggcacagactttggacaagcgtgaagcgcacttttgtgtgctggccaaaagctgtgacgaggcgtcctttgagaaattggtgcgctcattgtgcaaagagcacatcattccgattttggaggtggaggacaaagccgaactcggtcaaatggttggccagtgcaaatacgacaaagacggaaaagcgcgcaaaatcgtcggctgttcggtggcggtggtcaaagactacggacgggacgaagaggcgaagaatgacttgcaggaagtgctgaagaaaatcagcgactgatgaggttcctatgtcatcatattgttgtttttgtttggttgttaccgcggctataaaagactcttctgtttaaaaa

SEQ ID NO: 50057 - DNA, 671 bp, Heterodera glycines
  unsure (1)..(671): unsure at all n locations
ctccgtgaagaattcggcacgagggtttttgatttgctttcaaaatgaagctgaaccctttcgtctcctcctcagcgcgcaaatcgcgcaaacgccatttcaacgcgccctcgcacatccgtcgtcgcattatgtccgcgccgctgtcgaaggatttgcgcaataaacacggagtgcgttctacgcccattcgcattgatgacgaggtgactgtcacccgaggccactacaaaggcaatgccggccgtataatgcgtgtgtatcggaagaaatatgtagtgcacgttgacaaaatcactcgggagaaggccaacggaacaactgtccacgttggaattcatccttcaaatgtgcagatcacaaagttgaagatggacaaggaccgacgttcattgctcgaaaggaaagcggccggcagagcgcgagtgacgggcattttgaagggaaagcacacggaagagaccattgaagagtgagagagcggcagggggaggagagggacagagaaaacgaattgttacgccgaaattggacatcatttgttgttatttgttgtttgcaaatacaaaaagcaggcagttaaaaaacaaaagagcaggaggngnggagcccccctccgggggggggccccgtgcccaagttcccccagaaatggggccgtttacacaacc

SEQ ID NO: 50058 - DNA, 786 bp, Heterodera glycines
gagttcgtgatgatggttaaatcggcactttctaattcattgagtattctcaatggtttcactagtcgcgctttcaccacctccaacattaggagtttgagattccgttcgcaaaggcctcaaaatgagctgaggacagttggaaaaatggtcgcccaatcggacagtccgtacgaaaagggacaatgttttgttcacagattgtttgcttacaggggagttattatccgatcgaaaaattgctcagtctttacgaaacgaatcagcgacacgcaaactgtgcaacaggaagtcctccccttttaccaagtgctcatagacaaagatgattggtcggaaatgaattttgagacggacatgaccacctttttgaaatccaccgggaatcgtgaagaaaccgccatcagcggaatggacatcgtttcccacgacgaaattctgccctttgagccatccgtcagtgaattgaagtcgctaagtgatgggagcggcgaagcagctcccataaaacattatctttacgaccaactgttcaagaagaaaacaggcgaagagacgaaaagggacgcgggcgtcaatcggcaaaggcctgaagaggaaatgtgctggatatttccaattgctgtgacgaaacagactacggattgttttgaagtgcaagtcagcactttcaacttgggttcaaataatttgaacagaagtcatagccctcacaattggcgcattgttttgcgggttgagaattcacagaacaacaccatgtatttgagaaataccgtactgaaa

SEQ ID NO: 50059 - DNA, 396 bp, Heterodera glycines
cctcgtgccgaattcggcacgaggatttttctcatacaaacgaaatgcctttggctgaagatttgttgtatcctgatccgcaaaaggaacgtcaaaagcacaagctcaaaagactcgtgcaacatccaaattctttctttatggacgtcaaatgccctggctgctataagattactacagtgttcagccatgctcaaactgttgtggtctgtgttggttgcagtacagttttgtgtcagccgaccggcgggaaggcgcgacttgtcgaagggtgttcgttccgaaagaaaggacactaagacaatgagacaattataacggaaggcgatgctatcatttatttgttctgatttacaatatttgttgttgttggaattgaagaaccatcaatttgct

SEQ ID NO: 50060 - DNA, 772 bp, Heterodera glycines
gaagtctcaactctcagacgagcctgtcccgcacactttgccttccgcccttcaccatgcaaatcttcgtcaagaccctcacgggcaagaccatcacccttgaggtcgagtcctcggacacgatcgatgccgtcaaggccaagatccaagacaaggagggcatcccccccgatcagcagcgcctcatcttcgcgggcaagcagctcgaggacggccgcacccttgccgactacaacatccaaaaggagtcgaccttgcacttggtgctccgtctccgtggtggtggcaagaagaagaagaagaagacctacaccacccccaagaagatcaagcacgtccacaagaaggtcaagcttgccatcctcaagttctacaaggtcgacgacaacggcaagattacccgtctgcgtcgtgagtgccccgccaagacctgcggcgccggtgtcttcatggcctggcacgtcgaccgccagtactgtggcaagtgcggcttgacctacaagctcgaccccgccaccatcaagaagaacatggccgctgccgccaaggcctccaagcccgccgctgctgccaagcccgctgccgaggctgccgctgccgctggcaagggcaagggcaagaagaagtaaacctttgcttcccactcccttggttctctctggtgtgtgcccttggcacctccacgattgttgctcggttgggtcggtgttgtttcttggatgtcaactttgtgtgttcaaggaatgtatatatcgcccatcttggtttcttg

SEQ ID NO: 50061 - DNA, 535 bp, Heterodera glycines
gtttgagattaaaagaattgatttgtgaaaaatgacccgcgtgaagacccatgaacttcgggccaagaagaaggaggagttgatgaaaatgttggaagaacagaaaacggagctggccagtctgcaggtgtccaaggtgacgaacggggcggtgtccaaactgtccaacatccacgtggtgcgcaagaacattgcccgcattctcaccgtgatcaaccaggcgcagaagatgaacttgctcaagttctacaagggcaagaagtatcgtccgattgaccttcgcttcaagaaaacgcgtgccatgcgcagagagttgaccaagcatgagctttcattgaagacacacaaacagaaggtcaaagaacgccgttgtccaacgcgtatttatgcgcttaaggcgtgaagcggccacagcctcggcgatgtgtttcgacagagagggaaatgtgacgaggattttgatggatcaaattttttgttgttgttgaccaacttttaaatgatttaaaaaaacaaaaaagttgtgttaaaaaaa

SEQ ID NO: 50062 - DNA, 481 bp, Heterodera glycines
gctttatttacatttcacttttgtcaattcgtccgtttattcaatggccaagcatcatcccgacctcatcttttgtcgcaaacagcccggcgttgcgatcggacgcctctgtgacaaatgcgacgggcggtgcgtcgtctgcgattcgtacgtgcgcccgtgcactctcgtccgcatttgcgacgagtgcaactacggaagctatcagggtcgctgcgtaatttgcggtgggccaggcacaagcgacgcgtactattgcaaagagtgcaccattatggagaaggacagggacgggtgtccgaagattgtgaacctgggcagtgcgaagacggaccttttctacgaacggaagaaatacgcgttcaaaaagacgtgatcatagccgggggttggactgtcagggtttttgtctgttttttccgaccgttcgacctccgtttaatttaccatcgtttctttttataaaataaaaccgcgttct

SEQ ID NO: 50063 - DNA, 652 bp, Heterodera glycines
ccgcccctccgtccgtccgtccatccgtcccccgttttaaccccttcctcccccctttctcgcccatcttttcatccaattctccgtcttccgcctgcccattcttctccagcaaattatccattttgacgctcaatgggtggggaagggagcggcagaagcggtggtgtatccccggaatgcctttacgctgtgctgggagtgcagaaaggcgcggacgaagcggagatcaaaaaggcgtatcgaaggttggcattaaaatggcacccggacaaaaacccggaacggaaggagaaggcggagaaaatgttcaagcgggttgcacaagcgtacgaagtgttatcagatgagaaacgtcgaacggactacaaccggcacggaatgtgccggccagcagaggcggcgttcgcctcggcacaccgacggcggacagcgccggccgattcccactacgcccaccaccagtcccaccctttccatgctcatttccgttcccctttcgatattttccgtgaatttttcggcgaccctttgtcatcgtccgactttcatcgttcgccgtttttcgcttttcccgccaacggcggaatgaaacagaggagacggcatacgacaaatctattcggagacggggcatttggagcgcattttg

SEQ ID NO: 50064 - DNA, 482 bp, Heterodera glycines
aattaatccgcgcattgccattaaacaattttctcttttggattaaaataccgcaaattatgcgtttgttttgaatgaaaagtgcgtaaagaacatgcaatcacagcggggaagcagcagccggtcgaagacgacgacgacactatggaataatttatatttgaagcttaaaacactgcctaatcacataacataaaatgtgtaattaaggctaatggccgctcaattagcctcggctctatcctcgcccgactattacaattgccaaatgcagccgggattgacacggcgccaacgcgacatttgcgtccgacatccgtccgccatgcgatcaattagcgatggcctacgagcggcgattgacgaatgccacgcccaatttgaaagggaacgatggaattgctccgccacttttaacgtcggagtcccctcggaagaagattctacgcctgaaacagcttatgttttcgccatttcttcgg

SEQ ID NO: 50065 - DNA, 559 bp, Heterodera glycines
  unsure (1)..(559): unsure at all n locations
gttctacatgataattaattaattatgagcagcagcgatttgttggcccacaacagcagcaccagtggctccagcagtggcgcaaccgacaaattggcggtgttcggcggctgcgagggccccgacgcgtgctatgtgatgctggtgagcagtgacggacatgaatttgtcatccgcaaagagcatgccctgatttcgaagaccatccgagcaatgctttccggccccggccaatacgcggagagcgaaaccaacgaagtgcatttccgcgaaattccctcccacgtgctgcagaaggtgtgccattactttgcgtacaaggcgcgctacacgaacagcgcgacggaaatccccgaatttttcgtggcacccgaagtggcgctggaactgctgatggcggccaacttcctcgactgttgaccaaacaaacaaacaaaatttaatgcaaaaatggtagcaacaacagacagacaaaccgatggccagacaaaacgctgactgattgtgattggcaccgatttggaatttttgtgccaaagataaagccaattattantta

SEQ ID NO: 50066 - DNA, 777 bp, Heterodera glycines
gtccagttaagttccttcgccttgtgaatttttgctttgacttttttatggagagattgttcaataccccgatttcctccctttctacgaacacatcaaattgcacacgaaacaccatttgtcttggctttttggatgggtccatccaatgtttttcctttgacacacagcgagggatcactccatcgatggaaagttcggtaaaactcggtggaatgtggcgcaaacggatgaaacggtccgtcagggcaatgcaaatttctgaggatggcacttcgctttatgcgaccagttcgaacagggccgtctgtttgtatgacgttgagacggggaagagagtgcgctgtattcgcgaagggcacaaaagtcgggcccagtgcgatggcactgctgccgggcgaaagacggcattttgcaacgggtgccgaaaacggcgaaataaaagcatgggactttggacagcccaagccgaacgtgcacacatttggcgagcaggcggacataatcaatgcgttgcacatttggcgcaataatttgctggccgcgagtggcgacggcactttggccgtttacgacacgcacaaaggcaaagtgcgaattcagtcggagacaatgcacagcgaattgctcagtttggcggtgactgaaagattcacttacgtcggagcggccgatggacacattgaagtgttcaggcatggccaatttgggaacatccgcgaacgtatggaaaccccctttctgatgggcgtcgagcaaatggtcgtcttgcgcaac

SEQ ID NO: 50067 - DNA, 849 bp, Heterodera glycines
gagaacttaatttgaggattacattgaaaataaattaattagacttcaaaatgggcatttccccaagacagatggcacaagcggcgaaagactggggggaagcgaaaccccattcacaaaaaacgaaagttcgaaatgggacggccggcagcaaatactaagattggtcctaaacgaattcatttggtgcgttgtcgtggcgggaacattaaacatcgcggacttcgtcttgataccggaaactttgcttgggcttctgaagggtgcactcgcaaaacgcgtatcatcgacactatgtacaacgcttccaacaacgaattggtgcgcaccaaaacattggtcaagggaatgatcgtctcaatcgatgccattccgttccgccaatggtatgaagcgcattacgcactgccattggcgcgcaaaaagggacaaaagttgaccgaagatgaggaggcgcggattggaggagcacaaaaacgctcaaagtcgactctgaagaaatacacggaacgccaaaaaaccgccggggtggagccgcatcttctggaacagttccaggccggacgacttctcgcttgcataagctcacgaccaggccaaagcggacgctgcgatgggtacattttggagggcaaagaactcgagttctacaacaagaaactgaaggctaaaaaggcgaagtgatgccgcaccgaagcttggaattgcgtttccaattttgttgtccgttccttttgagtgaatgataaattttgttgttttaaaaaaaaaaaaaaaaaaaaaaaaaaaaaaaaaaaaaaaaaaaaaaaaaaaaaaaaaaaaaaaaaaaaagaaaaaaaaaaaaaaaaa

SEQ ID NO: 50068 - DNA, 434 bp, Heterodera glycines
ttaatccatttattcaaccaagcgtgcaaataaataatggcttcttcaattcgactcgctggcggtgctttgcgagaactccgaattcatctttgccagacaaccgcagcaagcaatggagttcgggaattcatccagaaagattatgtggacctgaagcagaacaatcgggatttccccattcttgtaagagaatgctccggaattacgccacgaatttgggcaagatatgagcatggagttgagacaagcgtttcggttgagaatcagccgcgtcagaagataatggaagtgatcaaagaaatggcaacgaaaaagatggaaacgaaaaaaattgattgatttgaatttgtttttggctgccgtttgtaaattctttgataggataaataattgtctcccattttatttatttaattaaaaatgtttccgta

SEQ ID NO: 50069 - DNA, 703 bp, Heterodera glycines
gttgtctttctattgtaaaaatgccgaacattatgggattgcatggtggctccatgattgccatgagaagcaaagatagtgtggtgattgcatgtgatctgcgcttgggagagcaagccatgaaaaacattgctactaatgcgacgaagatccatcccatttctgacaacgtttttatcggattgaccgggtttaacgcggacgccaccactgtgcttaacaagttgcgcacacatcaggccatttatgagatgcgcgagcagcgtccaatgtctcccaaggcgttgacttcctatctcgcttggatgctctataagcgcaggttcggcccgttcctgatcgaacccatcattgtggggctgaatcaacaaaatgagccgttcatttcccacatggacgtggtcggtagcgtaagtgagcccgaagactacacggtcggtggcactggtggcgacttggcgatgtctctgtgtgaagctctctggcgacccgatatgacctccgaagaaatgacggtggcggtcggtcaggcgatgcttgcggtggtcgaacgcgacgcatccactggatgggggcgttgtcatccacacgatcactgcggaaggagtgaccacaaaaatgattaaatcgcgcatggattgatttgatcagctcctgtcgcttttgttgtattcgaaataagcgataaattcatatgcaaaac

SEQ ID NO: 50070 - DNA, 548 bp, Heterodera glycines
aaaagttaaaagccgaccaacaaaagaatgccgtgaaggaaatgcgccgtattttcggcgttctcaaaaggtccgtgtaattatgcttgcgcgtcgtccgcttctgtgctgtgcattcatccgcccttttttcccctccgccatttgcttcttcctcaatgtcgtcccaccatttgtccggaagttcccttttgttaatgcgtgccgcatttcgcaaaatttggtcagcttcgacgtaacgcttttgagagacgagccaacggggactttcaggcacaacccttaaaagaaaaggaagatttggggaataaacaatgcttaatagagatggattaaaagacgcaccaccaataaaagaggaaaatggtggcaaaagcagcaattgaagcatgaaggtattgataattccgaataaaaaaagccaaaaggccgagtaaaacttggccaacagcaaagaaaacgccggtgaacagcgaagcgattttccttttgcttgggccaaccaattccattcctttgataaccgtaaattggggttaaaagaaacg

SEQ ID NO: 50071 - DNA, 735 bp, Heterodera glycines
tgtttttattccatttgttgatctgtgtttattcattggtttcctatttatttcgcctttgattacggaatgcctgagaaaaaaccgacgaaatgcctttcaaagggcaaagaattgccttgcggacgtgagattattcaggattttgtaatgatgatgcccggctccatggacaaataccatcagttatgttccattctcagctcattcgaattgtggagtgaggaatcgcgcacttccttccttagccaatttttggattcctacgatattttggacgtgaattgttcagacttggtgcttaaattatgcaaaattcgttggcataccgttcctccccaaatgctttcgcaatttgctgactttttatgcgctttggccatcaaccatgtccaccatatcaattcagtgttcaattgcttcgtcgaccatttcttgccaattggcaatgcgaaagatccttcaaattttgaggcgcatcgtccgccagcggtggtggacgaccatttccaagagtcgctgtacgccttggccaacctttccatccaaaacgttgtttcctgcaaccctttgacgacgcctcttctgctcgaatgttttgtgaaacgctttccgcacatcaaacagccgtctccgaaactgctcgcctttatgcgaaatgtgctccgttttgccgattggattagggacgaggaaatctctgccgaaatttggtcgcttatcgtcgagaaactc

SEQ ID NO: 50072 - DNA, 529 bp, Heterodera glycines
aaagattctaaaaataaatattaaatcgccatgacgaaaaagagacgcaacaacggacgcaacaaaaagggacgcggccacgtgcagcccatccgttgcaccaactgcggccgctcatgtccaaaggacaaagccatcaaaaagtttgtcgtccgcaatattgtcgaggcggcagccgtccgcgacatcactgacgcgtcggtttacgatcaatacgcactgccgaaactctatcacaaattgcactattgtgtctcgtgtgccattcacagcaaagtcgtgcgcaatcgttcgcgtgaagcgcgtaaggaccgaaacccaccgccacgttttggccaacggtctgccgtcgatcgtccgcaacgtccggggggagcggcccctggaggccccggaggcgttgggatgatgcaagcgattcgaacttaaagtgggcgaccgaagatgcatccttcgctgttttgttgttaccgttttttgtctttgtcaaaggataaaagttgttgaaacaaaataaatttaccaaaaa

SEQ ID NO: 50073 - DNA, 721 bp, Heterodera glycines
gaaatgctttacaacttccgcaatttgaattctttgtcttcgcggcacttttcgctcgcttcggccttacttcagcagcaaaaagtcactgctggaacatcaatggccaataaacgtgtgctcatcgatgctgtgcgatgcaagtcgactggctcctcccagcagtacattctcgctgcgcatgggccaggacagccacgggtatggacatcgcgcattttcgacttcaggtgctgcacaagaactgagcagcgcgttggacgaggagatcaatgcggagaaggaactcgttcaggacaaattgggtggcacttccgcgccttcagtgcccggcttcaaaatcaccacgaaaggggccgaagtgcgactgagcaaaacgcacggaaacgaaaagattgaagtcattctgaacgtgaatcattcggtcgacatcgaagaggacgaggagtacgaagacgagccacaagcagaaatggagccagagtctgtgcccgtctcgttgccacacttcaccattagcatcacaaagaacaaccagagtatgttcttcgctcttgaaatggtgaagacggacgacggcggatttgacttcaccgtcgaagagtttttcatcgcaccgtcggtgaatggcgaacccgtgaacgaagttggcgacgacgtgtacagctcgtccggcaaatacattgacccgaaattgcacgatttgctgttcgtcagatat

SEQ ID NO: 50074 - DNA, 1043 bp, Heterodera glycines
ccaagtttgagggtatacacgcttcatcaatctttcgaaggtcaaatatgccagaggcaattccggaaggcgattacgagagaggaaagaagattttcaagcaacggtgcttgcaatgccatgtgattgattcgactgctacgaagactgggccaactctcaacggcctttggaataggaagagtggctctgtaccaactttcgattattctgctgcgaacaaaagcaagggcgtcatttggaacaaggaaacgctgttcgaatacttgctcaaccccaagaaatatattccggggaccaagatggtctttgctggactgaaaaaggctgaggagcgcgccgatttgatcaaattcatcgaagtggagagtcagaagccgccttcgtaaagtgattgaatcgaacctccgattattagggcaatggttgtttgacggtctataataatagagtctgttattgtcgtaacatttctgtccggttagtctcaaataaaatgttggatgtctaattctgttttttggttaattatcaaaaacataataatcaacttaagcttcagtctcatttcttttttgccatcttacttatgtttgaatgttttatatactcgagcaattattagctctaaaattatttcttatttgatatgagtgcctaagcagtttgttctttccatttttggccctcttgttaacacatgagatttgactgccttagtgccgtgtaatactgcggggaggggtgaatacggcacacaaagcaaacacttgatgaaagagggagaagcggggggggcatcgcccgaaggattgcttatgccgtgcccagcccaatgcccccggcaattcccgtcgcttaattgcatttccattcccttctcatgtctctctctctctctctgtccttttcctccgtcaattcaatggcaaattctgatcaaacacaaataaactttccttaattgggcgtgtcttttcattgccttgtccttttgcaatttcggtctctcattaattaattccattgatttgcctttccct

SEQ ID NO: 50075 - DNA, 640 bp, Heterodera glycines
gtttgagccaaatgttcgacttccatcaattcatgggtttgggcggtggtgctgtcgccacttattcagtgcaattgcgtgccttttctgcgccatttttccagcgacacgatgaacgaagaatcaacgaactcaattacggcggaaagattctgttgccaaattcgtgtctcgacaatttgatgcgtcgcaacattcagtacccgatgctcttcaaattgactaatgtcggcccggcccttcagaggggcacccatgccggtgtgctggagtttctggcggaagaaggccgctgctatttaccttcctggatgatggcccaactcgctctgagggagggcgacctcatcaccgtggagtacaaagcgctcccgaatgccacttacgccaagttcaagccgatgtccaccgacttttacaacatttcaaatccccgtgccatgctcgaggtcgaactgcgcaagttttcctgtctgaccaaaggcgatgtcatcgcagtgcagtacaacgaacaagtgtacgaattccaagtgaaggcactgaagccggaaaatgcggtgaccatcgtcgagtgtgacataaacattgaatttgacgctgcggaaggctacgtggagccgaacagaacgcatcaacaacg

SEQ ID NO: 50076 - DNA, 414 bp, Heterodera glycines
gaacattgcttgcggtcttgtcggaggaccgggccttgtctctggaatgaatattggagaagaatatgccgtgtttgaaacaggcacacgaaacacgggaacctcattggctggcaaagacattgccaacccaactgccttcatcagagcttccatcgacatgctgcgttaccttgagctccacgattatgctgacaaactttctgatgccctttacaaagcattgacggagcagagaacgcatactcccgacattggaggcacgaatcatagtacagaagttgttcaagcagtcattaacaactacagcgagacaatcagtaacgcttgaaggaaacttctgatagtacgatatcaatcgagttttagtcttgtaaatgtttcattaaactgtcaaataaagagcaaaagtag

SEQ ID NO: 50077 - DNA, 621 bp, Heterodera glycines
atggcttctccgttgcaacgtttgatcacgtgtaattccccccaaattggctttgttgcgggtcgaattcgttttgtgccacattttgaaaaattagcggtgagttggtcagcgaattcgccaaaaagtgagggcgcggaacgttttgtgaaggaattctggccgattatcagagagaacaacccgaacatcgaatacctactcacccgttcgcacaccgaatgcgaccctttcgtcgtgggcacattccgttgggatcgtactcgaaaacagagactttgttggaaacacccgcaccaaattttggcaataattgaacaatggtccatcggtggcgattatcggcccggacgaaagcgcaaagtggcgacgataatcccacggggaatgcaaatcatagacaacgaaacgaagggacacgaagtgttcaaagtgttcagtcggtggaagggcgaacccacggggaacgccatggacccgaagaaacacccgaattacttgtaccatctgattaacgaagctcggaaatgaggaaaaaagtagagcaacatcatttgtttattcgaatttcaaatggattttggaattttaaaatttttcgatgaaataaatataaaaaat

SEQ ID NO: 50078 - DNA, 641 bp, Heterodera glycines
gccaattgattgacggcggtcattgaattcctgttatttgtgttgtttctatcgtttttttgtgacaaatgaaatacgcccagctagttgtcggccccgccggcagtgggaagtccacttattgtgcagctgtgcaactccattgcaaaacggtcggacggacggcgtttgtggtcaatttggacccggcggcggagcaattcaattacgattgtgccgtggatatgcgagaattaataagtgtggaggatgtgctagaagatgaggacatggccatgggaccgaatggggcattggtctattgcatggaatatttggccgacaatttggactggctccactcgcacctcaacgagggcgaagacgactactttctgttcgattgtccgggtcaaattgagctgtacagccatctgccggtgatgtgtcaaattgtgcaggcgctgcgcgagtggaacttcaacgtgtgcagcacctttgtcatggacaccaccttctgcttggactcgaccaaattcatgtcagccactctcaccgcactgtcaacgaccgtttcgctgcaaacgccggcagtgaacgtgctcagcaaaatggacttactgaggccggaggaccgacggacagtcgaagaaattgtggac

SEQ ID NO: 50079 - DNA, 1116 bp, Heterodera glycines
acttgttggcaccttattcaaaaggaggaaaaattggtctcttcggtggcgctggcgtgggaaagaccgtacttattatggaactgattaacaacgtggcgaaagctcacggcggtttttcggtatttgccggagttggagagcgaacacgcgagggaaacgacctttatcacgaaatgattgagggaggtgttatcgatctcaaagggaagaactcaaaggtgtcgcttgtgtacggacagatgaatgagccaccaggtgctcgtgctcgagtctgtctcactggtttgtccgtcgccgaatacttccgtgacaaggaaggacaggatgtgctgctctttatcgacaacattttccgtttcacccaggccgggtctgaggtgtctgccttgcttggtcgtattccatccgctgtcggctaccagcccaccttggcaacggacatgggcagcatgcaggagcgtatcactaccaccaaaaagggttccatcacttctgtgcaagctatttacgtgcccgccgatgacttgaccgatcctgctcccgcaacaacattcgctcatttggacgccaccactgtgctttctcgaggcattgctgagcttggcatttaccctgctgtcgaccctcttgactcaacttctcgtattatggacccgaacatcgttggaaaccgtcactatgatattgcgcgtggtgtgcaaaaaattctgcaggactacaaatcactgcaggacatcattgcaattcttggaatggacgagttatctgaagacgacaaactgacagtctctcgcgctcgtaaaatccagcgttatctctcgcagccgttccaagtcgctgaggttttcaccggacacaaaggaaaatttgtgactctcgagcagaccattgacggatttgaatccattcttaaaggtgagatggaccacatccccgaagtggcgttttacatgcagggagcgatcgacgatgtgcacaagaaagcggacgagttggccaaacagagttaaatagagaaataataatcggcacatagacctgattgtttaaatttcgttataggctgtttttttgtttaaatgcgtgtctttttggtaaattgttttcaaatgt

SEQ ID NO: 50080 - DNA, 1176 bp, Heterodera glycines
ggtggcgatgtccatggcttcttgcaaaagaacaaacttcgcgtgctttcccgacccactgaactcgtaagtttggggcgctgatttttggcagacaatacattcaacggtgacccgaacggcgtgatgccgaaacaccttgtgtggctcgactttgttcgtttggtgtgccaaaatagatgcgtttgtgcatatgtaatttgtcgacaaatcgctgcacatcgacgcattgtaccactgggataacgaagccgtatccggattgctgctgtcagaggaagtagaacgagaacgggccatttatcgaataatgaccacgggctcggaccgaacacaactccaactgcaattacattttaacgcaaataattcttccgaggcatcccaatcacaaaattcctccgaacaaatgcaaaattgttcaaccaatgaaagagtctctggagaagattcggtgccattcatcgacagagagacttttggagacgcggagagtgacagaggaaggggaccgccgcccgatcggtttcgactggtctatctgatcgtgcttctacatggaatgggcatgttgctgccgtggaacactttcattacgatcgcaggggattattatttgcaattcaaattcgcaaatgtgagcaatgaagacaattacaaagtgtactttttcaattatctgacggtttgtgcccaaattcccaatttgcttctaagttttctgaatttatttgtcgtcataagaggcggcttttaccgtcgcatttacttcactttggccgtcatttttggcatatgtctcgtcacaattgcgatggtttacgttccaaccgataactggactttcggctttttcctcttcacaatgctatccgttgtgcttctgaatagcgccagtggtgtttatcaaaacagtatttggggattggtcgctgattttcccggggaattcgccggtgccattattcttggcaacaatttatgcgggattctgatggcagtgctagacatcctcatcattgtgttaggtttgcgattcgtccacttcgcttttgttcggttcgcttttagtcggtgccaatgccgcactcgccgcaacagtttacttcggtctcgctctgtttaccgtcgtcctttgcattttttctttccattttcttcaaaaattggttctat

SEQ ID NO: 50081 - DNA, 383 bp, Heterodera glycines
gtttgagaaaatttcacatttaacagaatacaaacaaaatgtccaccggcgttatccaaccattaaatcctaagccgtttttgaacaatttgactggaaagccaatcatttgcaagctcaaatggggaatggagtaccgtggcattttgatgtccattgatggttatatgaatttgcacttggccaacacggaggagtacattgacggaacaaacactggcgcattgggcgaagttcttatcagatgcaacaacgttttgtggatctctgctgctgaagagggtgaacagtgaacacaccaagcacaaatggttgaacatttttgttgatttcacttttaatcgatctgtttttcctatttttcaaaaaatccatcaaccatg

SEQ ID NO: 50082 - DNA, 569 bp, Heterodera glycines
gtttgagaaaaaatgttcgtaaaaacattttcgaataaaaccgttgttttcaatgtggacccgactgaactgtccgtcgagcaactgaaggcactgatcgctgaggaggaggaaattgctgtgccggaccaaagacttgtctttgctggttgccagcttgtggatggaactctgctcaggacttatggagttgatgctgattcaaccatccaccttgacctcagattgcttggtggtgggaagaagcgtaagaagaagcaatacactggcccgaagaagcagaagcatgttcgcaagaaggtcaaactcgccgtgttgaaactttacaagattgatgacaatggaaagattcatcgacagcgtttggaatgcaattcggccagctgtggagccggaattttcatggcgaagcacaaagatgggcgtttctactgcggcaaatgtcatcaaacattgaaggaaaagaaatgagtgcttgttgagaattattgaatggatagccgttgatgctattttggtttttcgttcggttgttgttatcttgttgcttaaaaatatttttgaaaaaa

SEQ ID NO: 50083 - DNA, 551 bp, Heterodera glycines
ataagattttgtagttcttgttgtttattttcttggtaatatggctgttggaaagcagaaaaaatccgcggagaatatcaatgccaggttgggcatggtaaccaagtcgggcaaatactgcctgggctacaaacaatcgctgaaaacgcttcgttcgggcaaggcaaagttggtgatcatctccagcaacacgccatctctcagacgcagtgaaattgagtactacgcgatgttgtcaaagacgggcgtgcacgagtaccatggcaacaacatcgagctgggcaccgcgtgtggcaaactgttccgcgtttccatgctgtccatcactgacccgggcgactcggacatcattcgcagtatgccgacggaggcatgagcaatcaaatgaaatgaacggatggacgtgatcagtgatcattcattcattgatcggatcatttgtcatcctttttttcaaatattttgttgttgtttcacccggaagtgtttcatgttttcggtgaaacgaaagacattctcgttgttaagaggcggttggtttttcaaaaaaa

SEQ ID NO: 50084 - DNA, 486 bp, Heterodera glycines
attaagaaaattttctctttgcttctctctcctctgtttttcatttccttaaaagcggcaatgaccagtcgaattttgagctgcaatttgcgaaggtacttctccaagatgaaccaacacatcgagttcggcacaacgaagagcgcttcgtccgacaaacaatcgccgccttcccctacaaacaatcaaacgcaacacgagggaatgagtcaggaatgtcgggagcaaatcgagcagatggaaaagctgaagagcgacaacgaaatgctgaccgacaaatacaaaagaacacttgcggacatggaaaacttgcggaagagaacgcagcggcaaattgaggaggcaaaactttttgcaattcagccattttgcaaggatttgctggaggtggctgatgtgcttgacttggcgttgaattcgttggaaaaaatgaaaacggaggacggtgccgcctccttggacagtggagtgaacaaagggatcaaa

SEQ ID NO: 50085 - DNA, 832 bp, Heterodera glycines
gtccttaagagcaataaatgcttcgcaatttgtccaaatttggcaccattttgaacggtgttgccgacccgttgtccgccctcgtggtgccttccgccgccgcgggtgacgcatcctccctgctgttgccgtgcagtgccggcgctgtgcagcggcagagtcggcgttggggtttcccccgtgggcacaaacatccgccacgtctgttcttcgactttgcacatctcaagcagatcactggcggcgaatacaccaccaaaccgttacaaatcaatcggttgggcggacggtgtccaattacgaggaaaaagctgtgcatacacatcggtggcggtgtaaagtttgactatttcatgctcaatttgcacccgcgcggtccaaccgttgcggacgaaacgtacgacgagcgcgtgatcgaagtgcgccgtgaccccaaccgaacgccgtacattgcgctagttgcgggtgtcaagggaaagcgttggatatacgccacgcagaacatgcaggccggccaaatcatacaaacgacgtgtcacattccggaacggccggtcattggctgtgagggcaactcatacccattgggcgctttggtcgaagggacaatggtgaattcgattgagcttcatcggaacaaccctaactcgcacgtggtcatcaccgaagcaggcggttgtgccgaaattattcgacacatggacgaattcactgttgtccggatgccgaacaaatatgaatacgcggtgcgcaaggaatgcatggcggttgttggaaaactgtcacacgtggactgggataaaaagcattggggctctgcccaaatgcatcg

SEQ ID NO: 50086 - DNA, 448 bp, Heterodera glycines
cggacagtttgcgccggttggccttcttcggcgtggcactgtccaccgtcagtacgctgatctgcgttctctccgtgccgatggtgtatagttacgtgcagcacatcaactcacaaatgatggccgaagttgacttctgcaaaatgcgttccggcaatatttggcgcgaagtgacgcgcactcagggaatgcatgctgctgactcgccaccgcgtggcgcgtaatgctgacgcgtgctgcggctgtggcgaatccccgcgtggtccgcccggccctcccggcccagatggaaatcccggcggcgacggacagcccggcggacctggacagcctggcgcaccggcacaggctccgccgcgtccgaaaccgagcggcacaggatgtcaaacatgtgctccggccgagaacggacatcccggcccccagggcccacccggccaacctggcg

SEQ ID NO: 50087 - DNA, 1157 bp, Heterodera glycines
aagagacacaaattgttgtgggagtggcctccgtgtgctcccttttggccattgtggccacgttggtcgttgtgccgtcattgtactcgcagatcaacgaaatcagtctgaaggtgcacgacggagtgcaggcattccgcgtgaacaccgactcggcatggaacgaactgatggaagtacaaattacggtcactcctccggcaaaaccccgcgagaatcctttcgtctccatcttccgctccaagcggcagctgcctggacattgtcaatgtgctggcgtccaacagccccaatgtccgcctggcccaccgggacccgcgggggcacccggacagcccggataccctggacaagccggagagccaggacagccgggagtgcctggacagcccggagcgccatgcccggatgttcctcacgtctgccagcattgcccagctgggccgcctggaaagcccggagatcaaggacctgccggccaagccggtcaacctggcaggccaggccagcctggacagagcggaggagtgggcccacccggacctcctggcccgcaaggacaagccggaagcccaggacgacctgggggatcgggacaaccaggacaacccggacaaaatggagttgtgtataagaccgttcctggaccgaagggacaacccggccaacctggagcaccgggacagcctggcgcacctggacgacctgggaagcctggagaccaaggacaacccggagccccggggcacccaggacagccaggccaacccggagcaccgggacagcctggtcatcctggcgctgctggagcacccggcaaagatgcctcgtactgcgcctgcccgccccggtcgggcggcggttatggcgtttccgggggaggcggaggcggtgccaaagtcgaacacgcgcccttgcccgctgaacaggcacctgtgccggaacaaccggcagaaagcgtcggcgtagcgcctgcaccggccgaagtggcgtcaaacgccgccggtggccaaggcgaagcagaagcggcgaaaggatacaggaagaaaatgtgaaagatcggataattattaatgcagaataaagtgattgttgatgagaggaagggacaaaccaaaattcattgaaattaaataattaataacattttaataaac

SEQ ID NO: 50088 - DNA, 420 bp, Heterodera glycines
gcgaagtgcttaaacaattgacagaagagaaattcatagtcaaagcgaccaatgggccacgatatgtggtcggatgtcgtcggaccattgacaaggagaaactgaagcagggcacacgtgtggctttggacatgaccacgctgaccataatgcgccaacttccgcgcgaggtggacccgttggtgtacaaaatgagccacgaagaccctggcaatgtgagctatgccgaaattggaggtctctccgatttatcagagaactgagagaggttgttgaactgccgctgatcaatccggagttgttcaaacgcgtcggcataacaccgcccaagggctgtcttttgtacggaccgcccggacctcctggcgcgcccggtcagcccggccagcctggaaactctggccagcctggacagcccgg

SEQ ID NO: 50089 - DNA, 537 bp, Heterodera glycines
gtccaattaagttgtcagttttaatgtctaacataacacctggaaacacaacacagactcagagaggagagggaggaggtgacctcagcgcagataaacttagggaaatcaactctctgattgcggcatttccgagttccattggacaaacgccgcctgattccgcgcttggcacagcactgaacaatatgatggtgcaatggaactcactgctctcgcaggtggtcacagaggttgaccacccacagccaatcctggagcacatcaaagaaacggcggaattctccgtcaaacagtttcgtgacgcatgcttgggtatgatcagcgaattgacacgcacttcggtcgattggcaactgaacttcccaaacgaaatggcagaacaggaaatttccgaatatgagaactcaatccgaagacaagaacaattgttgggtaaaatcagacagaaattggacgacgaaattttgtcgggagaaaattcgaattttgtaccttaatgtttggattatcacttggatgaatcgcttatcatta

SEQ ID NO: 50090 - DNA, 650 bp, Heterodera glycines
gtgcatattcgatattcagttattgcaaattgttactcaaaatggcctcttttctccgttttttggcctgccgtcacttttctatgtcgtccgttttgcgcaaagaggcggaacaacttaccaatgaacacatcgacaaaattcggcagaggacccgtttcagtgagacgagcgcttttcacgggcgcggcagcggcggacggacgaacggcgaaagtggcgaggacgcatttaccaacccattttacattgccagttactacgacagtaaacgattcgaagcaatccgaggcgtttcaatcttcgcaagcatttcgcttctgttgatttatgtcgcatggttcagggagccaaacgaagtggacgaactttgggattacgacatgcgtttggtgtactttgtggccaaaaaacgtgtgctaaaggaccaaattgaacaggcgaaaaagggcggccacggaacagttgatttggaaaccgatctcatcaacattgaggtgcaagagcaaaaaattcgcgaagaagaagagaagaaggcaaagaaagtggcggcaaagaaaaaagcggaacagaagaggacgacagcttaaaaagcattaggaaaatttccatttttttaaattttctgtttttataaattgttttccgtt

SEQ ID NO: 50091 - DNA, 790 bp, Heterodera glycines
gtccaattaagattatacgacttattttctgcctccaacatgtcaagcacgccttgacgtcttcaaactgacggacgatgacgcaatgaaatttttggtgtgcgaatcgcacatcggcaccaaaaagatggactaccaaatggagcattatgtgtggaagcgtcgatcagacggcattcacatcatcaacattcgcaaaacgtgggagaaactgttgttcgccgcccgtgccatcgcggccattgaatatttcgtccgatgttgtggttgtctctgctcagccgtacgcccaacgcgctgtgctcaagttcgccgctcacatcggtgccactccaatcgttggccgttttacgcccggctctttgaccaaccaaattcaaaagaatttcaaggaaccgcgtctgctcgtggtgtccgacccgcagttggaccaccaggcggtccgtgaggcgtcctacgtgaacacgccggtgattgcggtggccaacacggactcgccgctgaaatttgtggacattgccatcccggcaaacaacaagcaaaagcactccgtcggactgatttggtggctgttggcccgtgaagttttgctgttgcgcggcaaaatcagtcgccagacgggctttatggtggacgacaagctgatcatgcccgacctgtacttcttccgtgacccgcaagagcaggagaaggagggcaccgagggtgaggccgaggcggacatcaccgtcaaggagggcggctggggtgccaccggaggcatggacactatgggcggcgacttccccgg

SEQ ID NO: 50092 - DNA, 895 bp, Heterodera glycines
ggtttttcgagaaatgacaaatgagcgtgatttttctcacgatgaccacattaacaacgctgttgggaccaatggcgacagtaaagacgcagccaaaagaaaggacatctgccgtgattttctgaataatatttgcagcagggggaatcgatgcaaattttatcatccggaagacagtgtcgaaaagaatcaaaactcggcggatgagccttatcagttctgcattgattttcagaaccagggctgttaccgcgaaaattgtcgttatgttcacgcgtttcgcgaggatgtcgatcgttacaagcgcagcggcgacgtgacgcttgggttggcgcgagctttggcagcgctgttgaaaggcgatacgataaatggaattccgctttgcaaagagttccaaaatggacactgcgcgcgcggcccgcaatgtcgctattggcatatcaatcgcgacgaagagcgacgcaaacgctttggcggcggcaggaactgcggcggttcgccttcgtcgcttgcgttcggcgcttacccggcggtgcctccggcaggagcgcaactcagcagacgaagaggtgacgagttcgtcagtgaagattttgcaccgccctccaaacgatcttttgctcacaatcagccgtttgcaacgattcccggacagatggctccaacgtcagcaccaaccgcaccgtctcacccgtcacctcaattagtaattgagttggaacgtcgaaacgcggaattaaccactgaagtggaaagtctgaagagggagcttaaccgggaaaaggagcgttacgatgaccttatgtcgctttttcgagccgcccaaggccaaccgacggttcaacgttcggtgatttcgactccgtctttggtacccgccaatttgcagcca

SEQ ID NO: 50093 - DNA, 597 bp, Heterodera glycines
gtccaattaagctgacaaatgttttcaattgttggaaaaaaggtcttcaacactacctcgtgcaattttctttcgaaggcattttacgctcatatgagcaaagatgaaataatgtggcattggcctgcgcagaaatttgaccaacatttcatcgattacttgaacaagccggacattgacgggtgggaaatccgaaaagctctcactgaactcgggaactttgacgtggtgccagaccccaaagttgttgaagcagcgctcagagctattcgccgtgtcaatgactttgcgcttgccatccgttttctggagcagattaaatacaaatgtggtggacccaaaagccgatccattgtgtatccgtatatcattcaagaggtcaaaccggtgatggatgagttgggcattccgacgcttgaggaacttggctacgacgagcccgaattcttcactcccgaccccgagtggtactgggagaagtcctggtacaagctttacgggttcgacaaactgcctggatacaaacacttggcctgaactgtttggccggagatggcgtgtgcatagaataggaaagaaattgttggacggctcttt

SEQ ID NO: 50094 - DNA, 606 bp, Heterodera glycines
gttaagccttcactttcagtaattcttattgttaacataatgacgcaatttctccccgacaatttgttggctctgtttgcgcctcgtccgccgattcaattcaaaccgccgccagatgatctattcatccaccgaaaacacatgcaaatggggggcatggccgagtgtgtccatggttttgaggatccgaaggacactcctccaaaacccaaaattgagacccgagaggagaagagagcgcgaaaacgcaaggaaaaggaggagctaatggcctacaaaattgagcaaggcattgccacttggacacctgcggacaatccgaaggcgaccgttgacccgtacaaaacactttttattggccgaattaattatgaaacttcggagtccaaactacgccgtgaatttgagaagtacggcaaaataacgaagattattatggtgcacgacaaaaacagcaaaccgcgcggttacgcctttatcgaatatgcccataagtcggagatgtcagcttccgcggggctcaggcaaatatgtgcatgcattggcacacattttttgctgtgctcacctaaaaattactcaaaaagtccttagccgcttacaaga

SEQ ID NO: 50095 - DNA, 659 bp, Heterodera glycines
tgagaatgcggccaccggttgacgaggattatcgcccgatccgcgtacttggccaaggcgcgtacggcgaagtttggttggtgaccagcaaagaaaatgagagagagcagttcgccatgaaaaaaattcccgttaaagcgacggaggagggaattccgcagagtgtcgtcagagaggtcgcttctctcgtcgcactcaaacagatgaaacacccaaatattctcaggctccacgacgcattcattcgccgaaagggcggcaccatcagtttgaacatcgtctgcgaaaagtgcgactgggacttgtgcgactttttgcgaaaaattccgaaaaatatgtgcgacgcgcagtgcaaatattttgcacgtcaaataatgacgggcattgatttccttcatgccaacagtattattcaccgtgaccttaagcctcaaaacattttggtgaacaaagaccacactttgcggatcgccgatttcggactgtctcggaactacggtctgcatgccaccttcaccaccgaggtggtcaccctgtggtaccgtagccctgagctgctgctccagtgcaagtacggtactgcggtcgatctttggtccgccggttgcattttggcggagctgtacacgcgcgacgcgctcttcagaggggatacggag

SEQ ID NO: 50096 - DNA, 731 bp, Heterodera glycines
ggagctccccgcggtggcggccgctcttcactagtggatcccccgggctgcaggaattcggcacgaggccaaagtggaggaaatccgacgcactgtttatgtgggcaatttgccaaagggatgcgacggcgaggaggtgctcaacttctttaacgcgtgcattggcgaggtgatgtatttgcgaatggcggccggcaacgactatttgccctgtgactacgcttacgtcgagttcagtcagcagtcgtcggtgccattggcactgcaaaacagcgactcattggagtttcagggacgtccattaagaatccaacattccaaagttgcgatcataaaaccgcaacgcaaaacggctgaccaggcacttgaggaggtggaggaagcgatcaaaagcggcagcgacggacgcacaacgacggacactggccgtggctattcgccgttccgtcccggggtcagcgccccgcgcgttgtgccgacctcaccgcgtccatccgtcaaacgctccacccgctcacgttcaacgtcctccagtcacagtcgtcgttcccgctctcgttctcgccgacgtcgttcccgttctcgctccacccggtcgccgtcccgttcgcgtcgccgccgttcgcggtcacgcgatcgcaaacgctcgcggtcgcgtcgccgttctcgctcgcgcgataaagaccgcaaaaaggccagcaaacgctctcgttcacgcgaccgttccacca

SEQ ID NO: 50097 - DNA, 673 bp, Heterodera glycines
caagtttgagcattgttttgaatttcgaaaaaatgggcaaaattcactactgcaagcgtccggacaacagcacaaagtcgtgcaaagctcgtggttcagatcttcgtgtccatttcaagaacacacatgagacggcgcgtgccatcaaacatatgccgttgaagcgtgccatccgctttctggagaatgtacgggagaagaaggagattgtgccgttccgccacttcaacggcggcgtgggacgcaaagcgcaggcgcaagcgtggggcacaacacagggacgttggccgaaaaagtccgccgagttccttctccaacttctcagaaatgcggagagtaatgccgaggtgaagggcctggacgtcgaccatttggtcattgaccacatcgtcgtgcaagcggccgccaaaatgcgtcggcgcacttaccgcgcgcacgggcgcatcaatccgtacatgagttcgccgtgtcacatcgaagtgattctgaccgagaaaaaggacgtcgttgcgaagccagccggcgcattggtcaaagtgaagaaagagtcgaagaaaaagcagcgacggcaattggcacgtggcgaattctgagtgacccgaggacatccccgaaccacactctctttgtgcggcttgttttgttatttggtggcgataaaatttgttgaacc

SEQ ID NO: 50098 - DNA, 414 bp, Heterodera glycines
gccgctctagaactagtggatcccccgggctgcaggaattttgcacgagggtttgagcaatcgctatgttttcatcctccaaaagtgccgcagttttgcgaatgcgcggcgccaccggcgcaatggcacggcggtggaagggcggtgacgagcagaaaaatgtgccggtgccgagccccaaagaaatggcccagcggccggcggagtttgacgagctgacgcacacgggacaggcctgggacattgccgattggcgccgttctcgtttcgagtacatgccgaagcaagtgaacccgagcattgcggcccatttgatcgccgagctggcgcccgtgcccagcgaggagcgcgtggtgcgctgcgacgggggccaccgcgagttggggcacccgcgcgtttacatcaacttggaca

SEQ ID NO: 50099 - DNA, 466 bp, Heterodera glycines
tcacattgttctctggattgcctcggtgtgctctctggtgaatatcatcgccacagtcggcactctgccatctctgtactcagagatgaggcaaatgaacaacaaagtgcgcgacggagttgaggccttccgcgtcaacaccgactcgaggctggactgacttgatggacgtgcaagtggtcgtgacgccgccgtcgaagccccgtgataaccccttcaactccatcttccgtagcccacgtcatactgcgcggactctgccattgcgctggcctccaacagccaagctgtccccctggttcgaccacgaccgaccggaccgcctggacagaccggacaccctgcaggtgctagacaccccggacaggctggactgcctggccaacccactcctgattgttctgcggaaatgctccactgtccgcgattgcctgttagcccggcctgacgacacgaggggacaggg

SEQ ID NO: 50100 - DNA, 1001 bp, Heterodera glycines
caagaaactcacattgtcctcggcattgcctcgctgtgctctctgctggcaattatcgccaccgtagtcactttgccatcgctgtactcggagatgagccaactgaacaacaaagtgcgcgacggcgttcaagccttccgtgtcaacaccgactcggcctggactgacctgatggatgtgcaagtcgtcgtggcaccgccgtcaaaggcccgtgacaaccccttcagctccatcttccgtgccaagcgtcaattgcctggccactgcaattgcggtcccccacaacggccaaactgccctcctggcccacctggtccggccggaccgcctggccaacccggacagccgggaggcgcaggactgcaaggacagccgggagcacctggccaacctgctcctccgtgcccgccccagaacatcccttgtccacgctgcccggctggcccacccggcagccccggagggcagggaccgcccggacagcaaggagcccccggccagcctggtgcgcccgctccgggcggaggacagggaccgcctggcccatccggaccccaaggacagcctggacagcccggacgcagcggaacacccggccaacccggacagcctggaaataatgctgttattttcaacaccattcctggcccgaggggagctccgggagcgcctggccaacccggaagccctggcagccaaggccaacccggacagcccggaggccaaggaccgcctgggccctctggtgcgcctgggctgcccggcctgtctggcaacagcggtcagcctggacagcccggggcacccggccaacccggcaaagacagcggctactgtccatgcccgccccgctcttccgcgatggcactcaaaaagaaaatggcggcggtcaaaatttttttagcgaaaagagcagcttcaaactgtgatgctaaagataatcccattattggatgttggcgaaattaaattcaccttcttcgtaaataaattgcattttt

SEQ ID NO: 50101 - DNA, 575 bp, Heterodera glycines
gtttgagcattccttgatggttcgtcatgtgactgcctcctgctttcgtgcgccatggcgcttttgaaaaaaagggctcaactggatggcggaagaatgggccggttgttattgaatcgcacaaatggcccggtcaacaaaaggaattccccgagctctcgccaaaatttctaggagcaaactttaaacagctatggagatacaccggagtggcgcccacaggatttaatgaccccaaaactgacgattttgttcatgttcccgaaatggtgcccgaattggtcgtgccggacctagccaatttcgagctgaagccatacgtctcttacaaaacagatgcaaaaattgaagaaaggctacgcaattttgacaaaaaattgacaaaattcggtgggaatgagaaagcagcgattgccaattccaaagagacggaactatggccccctccgccaatcgacgcgaaaattctcttcgactttttctacgctgagaaaattcgtcaggcatttgaaaaagggaagaagtaaaaaaagattagcagacgatggaccaaagcagacgattgacgccttatt

SEQ ID NO: 50102 - DNA, 801 bp, Heterodera glycines
ggccatggaaattaaggaaaaatcaaagaatacttccacaagtgcggtgcttccattaacggcggaagaacggatgaaacgtcgacaaattatgaggacggaagtgttggaaaatgtggaaccttttctcaaaatgaagaaaaaaagtttggaagatgcgcaggaggacgagcgcgagaatttccgccgttttaaaatgtttgagacgagcgcacttcagcaaaaggcaaagattgaggaaaatattcgagactaccgcaagagtttgaccgctctcgaaatgctctcaggacaaaattgaaaaaggcgttgactcggtcgagatcacttacaaattggacgagaacctttactcgagggcattggtcgaagagatggacaaagtttgtattcggctcggtgccaatgttatggtcgaatacgaattggacgaagcgcgacaattgttgcgcgaacacctggaaaatgtggaaagaagctccaaagagacggaggaggacatcgcatttctgcaggatcaaatcactaccactgaaatcaaccttgccaacctgtaccactacgctgtgcaaaacagaaaacagatgtccatgaactccgaactttcagtgggacaaatcggattggacgccgtggaataaaaacagaaattcatgagttaaattctttttgaaataaaactatttttgctatttaaataacaacagtcctccactatgtccagtacctattctttttcttttcacttctttcttttcgaccataatcgtttttcttttcgttcataaaattgactttctg

SEQ ID NO: 50103 - DNA, 654 bp, Heterodera glycines
gtttgaggtaaattttttgtcgcacacaaacttgagtaaaaatggcatttcgcgcactttctttcgcccgtcgtccgtttacaacttcgtccatttgccgtaaagaaattgacctggtcgccggtgtttatctgaacaaagttcgggaagtggttggcaaacaaagtgagattctcaattcgcctcagttgaagaaggagttgaacgaccaactgaaccgtttggcccaaaaattccatttgccggatgccgacgcggttgccaagttgggccttcagtttaagggagcaagtgttgtcagttcggtggaccaattggttgatgggggacagtcggtggatgcccagcttaatgcgcttaatgacagtcgtgccaaatatgaagcggagcagaaggggaagagacaggctgaacaggagcggatcggcgcaatttctggtgatgcggactatgcaaaagagtttttcccaattccgccgcctcatatcgaagcccagcaattggccgccgccgccaaagctgcgcaatgatattagaagtgatcagcggaatgagtgaccaaaatgacaaaaaacaaatagcgattttctttgcctctttttttgtgtgaaaatttttgtagaatccgtctccgtataaaaatgtgttgttact

SEQ ID NO: 50104 - DNA, 671 bp, Heterodera glycines
agatttaattgaaaacaatgactcgtgggtcaagcgccggatacgaccgtcacatcacaattttctcaccagaaggaaggatttaccaagttgaatacgcgttcaaagctgctaacactgcgacactctccgctgttggcattgctcttgatgaaactgccgtaattgccgtacaacgtcgcgttcccgacaaattggtggacccatcttcagttaaaagcatttataaattgtcctcaaccgtcagttgcggtgttatcggcattgtcctttaagcggatgcgatgttccaagtgcgccgtgcacaatcggaagcagccagatggaagtatgagaatggctatgaaatgccaatttcggaactcgcgcgtaaaatggccgagatcaaccagtactatacacaggttgctgaacttcgttcattgggcacactgatgcttatgatctcgtacgacgacgaaaaaggcgcttctgttttttccatcgatccagcaggacattacatttctgttcgtggttacggcattggagtcaagcagcagcagatcaacggttttctggagaaaaaactcaaatcaaaagaccgaaaattcggtgacacggaagtgattcaactggcgcttgaggcactgcaaaccgggctgggaattgacttaaatgctgaccaggtg

SEQ ID NO: 50105 - DNA, 679 bp, Heterodera glycines
gtttgagcaattacacagctaaataccgctttaaaccatggcaaatccttcgattaacgctaaggcggcagttttggtggacaatccgcgggttgaatttgtgcaactcgactcattggtggtcatgaaaattgtgaagcacggggacatcgaattctatgccggaatgtccaaaattgctggcgaaacgtgccaaggcattctcaccggactgatctccgtcgaggacaagcggcttgaagtcacgaattgtttctcgatcactcgtccggatgctctgcacgaaagtgaagagagtgccgctggtcccgagacgtccctttcagacgagaacaaacagggcgagattctcgacatgctgaagcgatttcgaatgatgaacatcgattacgagtcggtcggcttttaccaggcgcacccattcggcgcctgtttcagccacgaactgctcggttcattggtggactaccaatcggacatttcagacgccgttgtcattgtttacgacccggtcaaaacccgtcagggatgtctgacccttcgcgcttatcgcctctccaaaaaggcgttggatttggccatcacttgcgacgacagttggtctcctgaacagaccaaattggctggggtcaactttgccaatttcttcgaagaattgccaattgttgtgaagacagcc

SEQ ID NO: 50106 - DNA, 674 bp, Heterodera glycines
gtttgagacaaagactcaaaaatgactagcaaaacttcgcctaaaatgccgcgcaattaccaaattgcatccgggctccagcgtttctccaaggcccgtatgtttcacgccaaagggatgtgggtcaagctgaagaagccattcgagaagaaagcaaagcatgcccaaaaagcagaaaaatttgttgtcaagaaaattggcggagagaaaaacggaggcgagaggaaagtgctcaagaagaaggagccgaagcttttgccacaagtgcccagtgttcaaatcaagaacaaaaacaggccgaagaaagttccattgcgcaaatcgatttcgcccggaaccgttctgatcattttggctggccgtcaccgtgggaagcgcgttatctttataaagcaattgccaaaatcgggtcttcttcttgtcacaggcccactgaagttgaacgcgacgccgttgcgtcgcatcgcacaggcttttgtcatagcgaccaaaacaaaactggacatttcgacgatgaatgtgccggagcatttggacgacaaatattttaaacgacaaagtggcaaagtggcggacagatcgaagggtgggatttttgcggagggagcgaaccagcagtacgctgtgaccgaccagcgcaaggaggaccagaaaactgttgactcgcaagttat

SEQ ID NO: 50107 - DNA, 375 bp, Heterodera glycines
gtccaattaagcatttctctgcataatttattccaatgctaataaaagtgaaaacgctgaccggaaaagaaattgagttggacattgagccgacagacaaagttgatcggatcaaagaaaaggtggaagaaaaggagggcattccgccgccgcagcaacggctgatttttgcgggcaaacaaatgttggacgagaagacggcgcaagactacaaaatccagggtggctccgtgcttcatcttgttcttgcccttcgcggcggatgaatgttcgccatttggacgcttttgttggataaatgatttgattgtctaatgtctcactgactttttaaaaatatttaaatacaaacataaattgagttccacttaaaag

SEQ ID NO: 50108 - DNA, 584 bp, Heterodera glycines
  unsure (1)..(584): unsure at all n locations
gaaaaattattattacaaaggaaaaatggctgacgcagctgctcaagaacaaaaaaagaaacgcacttttcgtaaatttgtctatcgcggagttgacttagaacagcttctggaaatgaatgagaagcaattcaaccaaatgattcccgcccgtcaacgtcggaagatgaaccgcggattgaaccgaaagcacaaatctttgctcgttcgtctgcgtaaggcaaaactcaattgtcccgagctgatgaaaccggagtgcgtgaagactcatttgcgtgatatgatcgtgctgccggagatggtcggctgtgtggttggcattcacagtgggaaggcatacaatcaggttgaaattcgagctgagatgattggatattacttgggcgaattttctattacgtacaagcctgtcaaacacggtcgtcccggaatcggcgcaacgcacagttcgcgtttcatcccactcaaatgattctttttgcgatcatcggaaattgttgtttaccgatcttttgttattgaattgtttggattttgttggaagttagcggactcaataaagtgaaaatttgttaaanaaaaaa

SEQ ID NO: 50109 - DNA, 610 bp, Heterodera glycines
agataaaataagccaattcaaactgttctaaggaaatggctcaacttcttgctggagagaaagttgtgctgagtgacggttcgaaggtagaagcggaagtgttccttaaggacaaagtggtcgctgtttacttctccgccgggtggtgcccgccgtgtcgcgcgttcactcccaaacttaagaaattctacgaggagctgaaaaaggcaggcaaaaacttcgaggttttgttcgtctcgcgcgaccgtgctgctaaagacctcgtcgaatattaccgtgaccaccacggcgcttgggcctacctcgagttcggaaacccgaaaattcaggaacttctcgagaagtacgaagtgaaaaccattccgacttgcaaagtgataaaacccgacggaacgatcgttgtcaatgacgcacgaaccgaagttcacgaaaagggcgtggagaatgcacttggtctttgggaggaatggctgggattctatgaagcttgaaaaagcccattggcaagcgaaccgacgaacgaaggataatttgataaactttcctcaatgcttatttatatagccttaggcatttcaacattccccgataaagtaatcgcgtgacaaaa

SEQ ID NO: 50110 - DNA, 566 bp, Heterodera glycines
  unsure (1)..(566): unsure at all n locations
aaagctggagctccccgcggtggcggccgcttactactagtggatcccccgggctgcattacctcagcacgaggggacacttatcaaaatgaccaaggtcaagactttcgaactccgcaccaagtcgaaggctgagctttccaagcagctcgacgacctccgtcgtgagctcctttcgctccgcatcaagcagcaatctggccagtccaaccagaagccgctcgagatccgcaacgtccgccgctcgatcgctcgcgttctcaccgtcatcaaccagtccaccaaggctgaggtgctcaaggagtacgccggcaagaagtacatccccattgacctccgcgccaagaagacgcgtgccatccgtcgcgccctcacccccgccgagcgcaagatcaagacgacccgcgccctcaagaaggccaagcacttcccccagcgccaattcgccgttcttgcgtaagttttggatgttggaatcttgtgttacacggaatcaatgcatggttgacttctgctgaacnaaagnatgaaaagaaaaggaacaaaaaaacctcgagggggggccc

SEQ ID NO: 50111 - DNA, 880 bp, Heterodera glycines
gtccaataaggcattgattaagacattgcagaataaaacaaattaaagtgaaacatggcaaccgaagttgatgaaaatacagcagttgctgatccttggagcactgttgaagatgtgagcggtggagagtcaatgcaccaattggtcaccctggacgttcccgagattaaactgttcgggaagtggtctcttaatgacgtggacgtgtccgacatttcactcgtggattatgttgcggtgaaagaaaaggcggccaaatatttgccgcacagcgtcggtcgttaccagcagaagcgcttccgtaaggcgacctgtccggtggtggaacggttggtctcgtcaatgatgatgcacgggcggaacaaccggcaagaaactgatggcggtgcgcattgtgaagcatgccttcgaaatcattcatctgctcaccggagagaaccccgtccaagtgttagtcaatgctgtgatcaacagtggacctcgcgaggattccacgcgtattggccgtgcgggcacagttcgtcgacaggcagtcgatgtgtcgcctttgcgtcgtgtcaatcaggcaatttggttgctttgtaccggttcccgcgaggccgctttcagaaacatcaaaacgatcgcggaatgtcttgcggatgagctgatgaatgccgctaaggggtccagcaattcctacgcaatcaaaaagaaagacgaattggaacgggtggccaaatcgaaccgttgaggaaaaaaagcacagaatgcaaaagaggataaaggacacaaagggatcaatttgttcaattgttgttgaattttatgttattttgttcctcataaaacaaagagacaaattctaatcggattgtctgaataagatttgttttgttga

SEQ ID NO: 50112 - DNA, 646 bp, Heterodera glycines
gtttgaggcaggttaacaaagttggcattttttgtgagatcgggccgctttcatgcttcatttcaaggcattgtattccaccagacatggaatttgagccgaacaacatcccaccttgctacaaaactgcggacgaaagcatagtgataaaacaggatgacgagattcgtttaaaattaattggaattcgagtggacgcgaatgacatttttgcaattggaactttgatggatgattatttgggtctttgttcgactgaatgaatgaatttttccacgaattcttttagttgcctaatttattaaaaaaattaacttattttaacattagttgttttttcattatatctaaacaatttttacttttttattaatcttataaccaagaatcacagaaatgggccttttcgatttgtcaatttttgacgagttccgtcgcatggatggtcgtcagattctgtatcaatttttaaatttcgccatgattgtcagttcggctctgatgatatggaaaggtcttatggttgtgacgggctctgagagtccaattgttgttgttctgtccggttccatggagcctgcgttttaccggggtcgtgacatcccaattgtgcacagagtaatcaaagtgcacgagaagaacgacg

SEQ ID NO: 50113 - DNA, 571 bp, Heterodera glycines
cataaatgttttatcatctttcacttgagcatgaaatccaactacatcctaaatattttggccaaaatttaatggagacagtaaaacagaaactttttagtgaagtggaaggcacttgtacgggaaaatatggctttgttattgcggtgacgacaattgatactattgggcatggaatgatacaaccgggacgtggctttgttacttatcctgtgaaatataaagcaattgtgtttcggccattcaaaggacaagtgattgacgcggtagtcagtcaagttaacaaagttggcattttttgtgagatcgggccgctttcatgcttcatttcaaggcattgtattccaccagacatggaatttgagccgaacaacatcccaccttgctacaaaactgcggacgaaagcatagtgataaaacaggatgacgagattcgtttaaaattaattggaattcgagtggacgcgaatgacatttttgcaattggaactttgatggatgattatttgggtctttgttcgactgaatgaatgaatttttccacgaattcttttagttgcctaatttatta

SEQ ID NO: 50114 - DNA, 759 bp, Heterodera glycines
  unsure (1)..(759): unsure at all n locations
ctttatttccttttgccatttaattccactttgttctcccggttcgatattcaatattatgtttaacctgcaagaccgttgtaagggcgttgaccaggaccgcgattaccacgcgactcgcatttcaattcgggacaaattgctcagccaagagaccaaagagttggaacagaaccttcgcgatttgcccacttgcaaattgattttcccctcaacgtcggcgctgcacgaaatggagctgacggttaagccgaacgtgggcctttacaaaggcggcgctttcaaattcagcatcaccgtcccaccggagtacaacaacgtgcctccaattgtgaagtgtctgacccgcttttggcatccgaacattaacgaagacggaagcatttgcctgagtttgttaaggcaaaactcattggacggatatggttggatgcccacgcgccgcatccgtgacgtcatcctcggccttgaccaattgttcaccgatctcatagactttgacgacccgctcaatgcccaagcggcgcagcagtggcaaaccaacaaagatggatttgcccaaaaagtcaaggaatacatgaccaaatactgcccaagaaactgacaaaaagacggagaaagggaaaagacgggcgataaattggcaaggattctttaatgatggacggatttgactaaagtttgttttgatcggacattatttcaactcgtttacatttgatcgttgttataaattttctattctttaaaanaaanaaa

SEQ ID NO: 50115 - DNA, 757 bp, Heterodera glycines
aatctctgtaatctttttttggtgttaatgatgtcgtcaaatgaacaagaagaatccggcggttcaaatgatgaccaattttcctctccgatcagtccggttagccccattcaaccgatgagcaccgattggagcaacgcaattgacgcgcaggaaattggcgccggaggtgttggaggagggatcagcagcggaagcctgcatgagagcctgcacgaactttcgccaatttgggccgacagcgatttgattggtgacacactttcggccgtaccggactcgcccagcgatgaagacccatatgccagcacaatttatcgcccagtttccatggtcacgcctgtcgctgcactgccgaatcccaatccaccgtcctgctcatttggtggaccgatggaaagcattgaggcgaaagggccgttggaattgcccaccaaaacgcggcttaaggtgcgtatcaaacggttggacattgtcggctcgtggcgttgggtggacggcaaagaggacgcgtgcggcatttgccgtactccgttcgagacctgttgcatggactgcaaattcccgggcgacgaatgtccattggtgttgggccagtgcaaacatccgttccacatgcattgcattgtgaagtggacgaacacgcaaagcgggcagaagcccgcctgtccgctgtgccgtcaggagtggaaatttgcgaccagctgattttttgcggggaaggcgaagaagactaataatgacttaatgtttttgt

SEQ ID NO: 50116 - DNA, 514 bp, Heterodera glycines
aatggccgtttttgttaaagaccaaaattttgtgccggaaaaacgagtcgacgaagctgggcatattttaaatgatccgagtaaaagtttggccgatcgtttccgtgcgcttttccttctcagaagcgtaaaaagcgacagggctgtccattggatttgcaaatgcttctccgacccatcggctcttcttaagcacgaacttgcgtattgtcttggtcagatgcaaaaccccgcggcgattcaaaaattaatcttcgttttgcaagacactgaacaagaaccaatggtccgtcatgaagcggccgaagcgctcggagccatcggcgacccgtcgaatgagcacggactcagcaaactgttcgagcagtacagcggtgacgcagtccgagaagtggcggagacatgccttttggcactgcgacggacgcaatgggtcaaagagaagggaaaggacgacacggaaagtcggagcatttacgattccattgaccccgcgccagcagcggacggaggg

SEQ ID NO: 50117 - DNA, 566 bp, Heterodera glycines
caagtttgagtcaggctttttgattatttttgtgactttattcccgtcctaatgccaccaacgagtaaaaaaacaggaaaggctgtcgcaaaggctgtggaggccaagaagaagctggccaaaggccagcacattgtgcgcaagaaaaagatgcgcacgtcggtgcacttttaccggcctcggacgctgaagctggcgcgttcgccgaagtttccgcgcaaagcggtgccgaaacggaacaaactcgactccttctccatcataaaacacccattgaccaccgaatcggcgatgaagaaaattgaggacacaaacacattggtgttcatcgtggacgtgaaggccaacaaacatcagatcaaaagtgcggtcaacaagctctacaacatcgaagcacagaaggtcaacactttggtcacaccagatcacacaaagaaagcgtatgttcgcttagccgccgattatgatgctttggacgtggccaacaagattggtattatttgagtatattctgcgctttgttttgttgatttttgcgaataaattgttgctgtttttctgtaaaa

SEQ ID NO: 50118 - DNA, 625 bp, Heterodera glycines
atcattaatgctttgcaatttccgcaacttcaattgttcgtcctcgcggcacttttcgctcgcttctgttttacttcagcagcaaaaattcgctgctgtttcttcaccgcccaataaaaattggaatgctgtgcttatcgaagcgatgcgtttgaagtcaaccagcatcgtccaggatgatgcaatcactgaacatggccatgatgaccacgggcatggacaccacgcagtcaattatgggccgccgattacctatgactacactcctataccatctcaaccttataagaaggtctataaggaactgaagcagaaattcatcacgtatttggcgatgagcttcgtctttttcatgttttgctgttacgttggctattccactgatgtgctgggacactccgcttggaaacttccgggcagctaccgtaacagaaaagcgattaacgcgcgtttggacgcggaggaagcgaaggcaaaggccggggaaggcgagcaataggaagaaagattgtcaaattgtaggctataattttgttctaattccgagatgtattgtaatagtgcgatcattaattcgttttcgaattgtatttgtttgttgaatgcaacattggacttggtaaaa

SEQ ID NO: 50119 - DNA, 454 bp, Heterodera glycines
ctaatccttggaaaacagaagaggactttggccggcttcagctcctccgtgatccttcccaacaccggcttcatttaccaccacccaatcgtccaaactctgccgcccgaccttcgcagaaaagctgcgcgattggtcgctgcaaaatgcacattggcttcccgagtggattcaattcattcttcgttggacggacgaattggggagcgattgtcggtagaaatcaaagggaaattggaaaaaatgcaagagccaccgccggtcaaaaatgccaagcccctaccaaaaccacttgacaaagccagcaaaaaaaggggtgggaaaagagtgcggaagcagaaggaactgctaaaggcgaccgaactcagaaggaaagcgaaccgaatgaatttcggagagttgcaagaagatgtgatgcaggaccatttgggcttcactttgggacaagcgaaca

SEQ ID NO: 50120 - DNA, 592 bp, Heterodera glycines
gtccaattaagttaatctagaaaaagtaatggcttcacgaaaaggaaaggtcaaggaagagcagccggctgtttctctgggtcctcaggttcaagaaggcgaaaatgtctttggtgtggcgcacatttttgcgtctttcaatgacacttttgttcatgtgaccgatttgtctggacgtgaaaccattgtcaaaatcaccggtggaatgcgtgttaaggccgaccgagacgaggcaagtccgtacgctgctatgctcgccgcgcaggatgttgcggaacgttgtaagcaggttggcattaatgctcttcatgtcaaattgcgtgcaaccggtgggaccaaaaccaaaacgccggggcctggtgctcaggcagcgcctgcgtgccctcgctcgttcgggtatgaagattggtcgaattgaagatgtcacgcctattccttccgactcgactcgccaaaaaggaggccgtcgtggacgtcgtctttgagttgattcaaatgcgtcccgatttttgttgttgtttgagttctctatcgcttttcttcaaataaactttttggttgagaacaaaaaaccaccttgagactagttctc

SEQ ID NO: 50121 - DNA, 719 bp, Heterodera glycines
ccccctagagtactctttttgaacgacggcctcgcaatttttcccttggacaggacattcaaccgaaacgggacttaactcgctttgttcgttggccaaaatacattttgctccagcgacagcgtgccgttcttgaaaagcgtctgaaaattcctccaccaatcaaccagttcaaatttgctcttgacaaaccaaataccaaccagctcttcaaattgcttaacaaataccgtcctgaaactcgccaggcgaagaaagaacgtcttcgtcaacgagctcaggatcgagcagatggaaagcaagagaaactgacgaaacgtcctcctgttgtccacttcggcattaaggatgttgtcaaagccgtggagaacaaaaaggccagcttagttgtcattgcacacgacgttgacccaatagaaattgtgatttgcctgccggcaatttgccgcaaatttggagtgccgtatgccattgtgaagggaaaagcatttctcggtcaagttgtctaccgcaagactacttctgccgtgtgtctttgcgacgttaatccggaggacagaaacgcgcttaaaaatttggctgatgttgcggtcaccaatttcaatgaacgcggtgatgaacttcggaagaattggggaggtgcgatcatgtcccagcgttcgcaagcacgacaggctaagattgaaaaggctcggcagagggatgttgggcagaaagtt

SEQ ID NO: 50122 - DNA, 1033 bp, Heterodera glycines
gtccaattaagatttgtttatctttactcaacaatttgcggtttaataattaaagacgctaaaaaatggcacaacagcaagcgataacgaagaagcgtaaagctgtgcaagacggaattttcaaggccgaattaaacaactttctcatgaaggagttggccgaggacggttattccggtgtcgaagtgcgtcgtgcaccttcccgtactgaagtgatcatcatggcgacgcgcacccaaagtgtgctcggcgagcgcggcaagcgcatccgcgaactgaccgcactcgtgcagaagcggtttggctattccgctggacaaattgagctctatgccgagaaagtgtccagccgtgggctttgcgcggtggcccaatgcgagtcatagcgttacaaattggtcggtgggctcgccgtgcgtcgtgcgtgctacggtgtgctgcgcttcatcatggaaagtaatgcccgtgggtgcgaaattgtggtcagcggcaagttgcgcggtcagcgtgccaaggcgatgaagtttgtggacggagtgatgatccattcgggtaacccggtcaccgagtacatccaagaggcggttcgccacgtggcaaatgcgacagggcgtttttgggcatcaaagtgaagatcatgttgccgcacgcaccccaagggacagatgggaccgcgcaatccgttgcccgaccacatccaggtcaaagagccaccgattgacgtcgcgccgaccacgccgtactcggagcaccgcgaaccgatgaccactggcatgccgccccagacacaaatgccgcccgcccatcagcagcagcagctgccgatggttggccaagtgccgcccccggcacagttttaattgtgaggaagaaccgctgctgatggtcctgatggatgagtgggagatgttcaattaaaatttgttatttgtgtgtcatcggcacagaccacccatttttgttccgttaaaaattctttgttgttgtttttgttttcaatgatttttgttattgctgatgaagcatcgtattg

SEQ ID NO: 50123 - DNA, 504 bp, Heterodera glycines
  unsure (1)..(504): unsure at all n locations
attcagacggtgccccctttctttaccgtaaagcgacttcgagaaacgatgtctcgtttcgatgggcttggccgtgtttatcttcagtcggagaagaggggcgcacagcgaaaaaagcgctatacggagggatgggttgagtttaaaaacaaaaaggtggccaaggaagtggtgagacttatgaacggccgagtggtgggcggaagacggcggagtgcggcgtacgacagcgtttggacgatgaaatatttgcacggtttcaaatgggaacatttgatggaacagctcaactacgaacagcgcattgagcagcagagactacgcacggaaattgtacaggaaaaacgcaaggccgatttttttgcgcaacaggtagagaagggcgaaagtttaaaaaaattggaggaaaaaatactgaaaaagtgcggactttgggagcagtaccaacgccagcacaaacagctgaaaaattgtgggaggggaggagcanaaattggaggagga

SEQ ID NO: 50124 - DNA, 483 bp, Heterodera glycines
ggcttttccaaactcaatgataaaacctgtgaatacattaaagagtttaatgaggacaatgactgattgtcgctggatggcgtcggtgccaatggcatttgagcagaaagtgtcgatggcacaaccacaacaatccatggcatatctcccggacatcgaaactctgaggaagggaaaagtcagtccgacgattctcaaaccttacattgacccggctctgtgctcttccgacccaaattcctttgagagtgaagtgaccgtcggaagaatgctcgacgcgcgtgtccatttgggccataaggttggcactctcaacgataatatgaaatgggcattgtatggagaacgtcttggcatttgcgtctttgacttggaaatcactcggcattatctgctaaaggcgttggaatttgtccgatctgtggctttttttgggcggtcgctttctcttcgtctcgaccaataagtcctcaatgctaatgg

SEQ ID NO: 50125 - DNA, 682 bp, Heterodera glycines
gtttgagaaaatcatattaaactaaaaatgggacgtcgtcccgctcgttgctatcgctacattaagaacaagccttatcccaagtctcgcttttgtcgcggtgtccctgacccgaagattcgcatttttgacttgggtaggaaacgcgcaactgttgacgagtttccatgctgtgtgcacatgatatcgaatgaaagggaacatttgtcgtctgaggctctcgaagctgctcgcaatttgtgcgaacaaatacatggtgaagaattgcgggaaggacggctttcacatgcgcgtccgaatccacccgttccatgtgattcgcatcaacaaaatgttgtcctgcgctggtgctgaccgtcttcagacgggaatgcgcggcgcctttgggaaaccccaagggttggtggcgcgtgtcggcatcggtgatatgctgatgtcggttcgtgtccgtgaccagcatcaagcccacgctcttgaagcattccgtcgagcaaagttcaaattccccggccgtcaatacatcgtcatttcgcgcaaatgggggcttcaccccttttgaccgcgaagtttacgagaagcaccgccaaggaagggcgagtcattccggacggagtcaactgccgattcctcaagcaacacggaccattgacggaatggctcaaaaatccaatctgatcaattg

SEQ ID NO: 50126 - DNA, 543 bp, Heterodera glycines
gctctttgatataagcgttgctattgaattgcgatttctatcgtctcttttaattgttttacgccacaacaaacgacaaaaacaacatggcttttccttataaggatgacaaaccgcaagaggcagcgcccgttgaggaccgaattcgcattaccctaacatcacagaacgtgaaatcgctcgaaaaagtctgtgagcagcttattcgcggcgcaaaggacgagaatttggtggtcaaaggcccagtgagaatgcccacaaaaattctgcgcattaccacacgcaaaacgccgtgcggagaggggtcgaagacttgggaccgtttccagatgcgcatccacaaacgcatcatcaatctgaacagctccagcgacgtgctgaagaaaatcacgggcatttccattgagccgggcgtggacgtggaggtgacaattgcggagtcgcccagcaattaaacagcgcgtgccgaggggcggacggagagatttcccttttttgtcgttgcgttcgttcgttctattgttgctttatgccacaaaattg

SEQ ID NO: 50127 - DNA, 772 bp, Heterodera glycines
attgctttctttcaatcaaatctctcaaaatgtctgaacaatccggggaaacctttgcgtttcaagcggagattgcgcagttgatgtccctgatcatcaacaccttctactcgaacaaggaaatcttcctccgtgagctgatctccaactcctctgacgctcttgacaagatccgttaccaggcgctgaccgacccgtctcagatggagagtgggaaagagctcttcatcaaaatcgtgccgaacaaagccgataagacattgaccatcatcgacactggcattggcatgaccaaagcggacctcgtcaacaaccttggcaccattgccaaatccgggacaaaagcgttcatggaggctcttcaggctggtgcagatatttcgatgattggccagttcggtgttggattttattcggctttccttgtggccgaccgtgtcacggtcacatcaaagcacaatgacgacgattgctaccaatgggagagctcagctggtggctcgttcatcattcgcaattgtgccgatcctgaagtcacccgcgggacaaagatcgtcctccacctgaaggaagaccaaacggattatttggaggaacgtcgtgtgcgcgaagttgtgaagaaacactcgcagttcatcggttacccgatcaaattgttggtggaaaaggagcgtgacaaggaaatttcggatgatgaggcagaggaggagaagaaggaagatgaagcaaaggaggaggagaagaagccagaagatgacgtgtcagatgacga

SEQ ID NO: 50128 - DNA, 618 bp, Heterodera glycines
tgagttgggacgacctcttttcatgaatgctgaattgcatgtccttccataaatagtcattaattaacgcaaaaattaacgacagcagcaaatctctgttataataagcgttttgagtgcaaaatggccggtatcgcagcaggaagactgacggaggagcggaaagcctggcgcaaagaccacccattcggtttcatcgcacgacagtgcaaaaaggaggacggcacattggacctgtacaattggatctgtgccattcccgggcccaagtcgaccatttgggagggtggcctgtacaaattgcgcatgatcttcaaggacgacttcccatccactccgccaaaatgccgctttgagccgcctctcttccatccaaatgtttatccgtccgggacggtctgcttgagtctgttagacgagaacaaagactggaaaccgtccatcaccgtgaagcagttgctgctcggtatccaggaactgctggtgtcgcccaacccggaggacccggcacaggcggaggcgtaccaaatttatgtgcaaaatcggcccgagtatgagcgtcgagtgcgcaaacaggcccaacagttctcagaggaccaggtgctgaagcagttgttg

SEQ ID NO: 50129 - DNA, 755 bp, Heterodera glycines
caataaaggtgccaaatcttatatttttaaattattcacattctttcctccaaaattcgttctttcatgtcccttttgagctttgagggtcgcgttgccctcgtgaccggcgcaggcggaggaattgggcgtacttatgcacttgaatttgcacgcagaggtgccaaagtgatagtgaatgacttgggaggggaccgccacggaaaatccgcgtcgacttcggcagcagacaaagtcgtagcctaaatcctagcggcaggaggaaaagcggtgccaaactatgacagtgttgaaaatggagacaaaattgtgaggactgccatcgataattttggtcgaattgatatcgtgataaacaatgctggcattttgcgggatgtcagttttggcaaaatgtctgagttcgattgggattcggtaatgaaagtccacgtgaagggtgccttttcggtgactaaagcggcgtgggaacacatgcgggcgcaaaagtacggacgtttggtgtttacttcgtccaattcgggcatttatggaagtttcggccaggcgaattatgcagcagcgaaaatggcactgattggtctatccaacactttggcgttggaaggagcaaagtacaacatcgccagcaatgttttggtgccaactgctggttcgcgaatgactcaaacagtgatgcctgaagaattgctgacggcgatgaagccagaatttgttactccgcttactggttgcctggcacatgaaagttgcaa

SEQ ID NO: 50130 - DNA, 543 bp, Heterodera glycines
gtttgagtgaatacgtaactgaagatgcaaattttcgtcaaaactttgaccggaaaaacagttactttggaagtcgaggcgagtgacactatcgaaaatgtcaaagccaaaatccaggacaaagaaggaatccctccggaccagcaacgtttgatttttgccgggaaacaattggaggatggacgcactttggctgattacaacattcagaaagagtccactcttcacttggttcttcgccttcgtggtggaaaggtccacggatcattggcgcgtgcagggaaagttcgtgctcaaacacctaaagtggagaaacaggagaaaaagaagaagaagcgtggccgtgccttccgtcgcattcagtacaaacgtcgttacgtcaacgtcgctgcagcgggaccgggccgccgtcgtgggccaaactcgaatgctgcataaatttctggatatgcaaaatgatacggatgctaaacaatgttgcgtcttttgatatgttgttgttttttttatgaattgaaaaaagtaaattgttgaaagctaaca

SEQ ID NO: 50131 - DNA, 857 bp, Heterodera glycines
aaataaaacaattaattttaattaaaaaatggtccaacaatacaaattgtattattttgacctgcgtggtttgggtgaacccatccgccttttgcttcactatgttggccaaccatttgaggacatccggtttaaagacatggaagaatgggagaaaacgtacaaacccaaatttttctacggaaaggccccagttttggaggttgacggaaagccattggcacaaagttcggcaattttgcgctaccttgccgaaaaatttgacttggccggcaaagatgaatgggaaaaggcgaaggctaacgaaatcattgactttctgaaggatgctaccactgatttgctcccgtatttgatggtcaaaatgggacgccaagaaggcgatttggacaaattgcgtggcgaagtgttcgagccgggagtcaagcgcatttttccactttttgagaaacttttgaaggagtccgggtcagggtacatgctcaagtccggcctctcaatggtggactttcaagtggccaactttctgtacagctttaccatgttggagccggacaccatcaatgcgtacccggagctgatcaaatacgttgaccgtgtccatgcgctgccccaactgcagcagtatttgaagcagcgcccgcaggaccgctgatcagtgatcagaaaagtcgagattgaatgagaaaagaaaatcaatcataattaccgattttttaatgagaaaaatcaataattgagaataattatccgatcagctttttgatgagacaaaatgcttattttgattgttgcttcttactgtttatcaacatttagtttgaccattattttatgataaaaatcagtttgaacta

SEQ ID NO: 50132 - DNA, 734 bp, Heterodera glycines
gaggaaattactataagtaataattgtcctaaaaaatggtccaatacaaattatattattttgatgggcgcggtttgggtgaatccatccgtctgttgcttcactatgttggccaaccgtttgaggacatccgaattaaagacatggaagaatgggagaaaacgtacaagccgaaatttttttacggaaaggtcccagttttggaggttgacgggaagccattgggacaaagtgctacgattttgcgctaccttgccgaaaaatttggcttggctggcaaagatgaatgcgaaaaggcgaaggctaacgaaatcatcgactttcaaaaggatgctaacactgatttggccccctatttatacgtcaaaatgggattccgccaaggcgatttggacaaattgcgtgccgaagtgttcgagccgggagtcaagcacattttgccactgtttgagaaacttttgaaggagtccgggtcagggtacatgctcaagtccggactctcaatggtggactttcaagtggccaactttctgtacacgtttaccaagttggagccggagactatcaatgcgttcccggagctgatcaaatacgttgaccgtgtccatgcgctgccccaactgcagcagtatttgaagcagcgtccgcaggaccgctgatcagtgatcagaaaagtcgagattgaatgagaaaagaaaatcaatcattgagattaattcgataagttatgataa

SEQ ID NO: 50133 - DNA, 980 bp, Heterodera glycines
tccaattaagctactattagatgagcctatgagcaaccaatcgaatagcaatagccaatcgaaacaacagcaaaggagcgaacattttatgtccagtgtttttgaggagtgcgacgccctaaaacaggaatacgacaagtgctttttgaatttcttcaaaacttttgtaaaggaagacgaacgacacgaaaggacagtcaatccgtgccaacaattgcaaaacatttatcacaagtgtttggaaaagaatttaaagacacataagccatacgacatcgatttggacgagttgaagaaggaagtgtccatcagcatcgaggagaacatcgactggaaacaacgcgggaattgatggaggaaattgtgcaaagtgcggcgaacggcggcataagttcgacagcgccggaccaatccagcgaaagtcgtttcaaccaattggaacggaatttggagctgttccaggaaaatgcgcgtcatatgggagtgatcgccagtgacttcacttccaaaagtcaggagccgttgaatcagaaaattcacactctcatctcgggccttcaggttcttgaccaactcaaaagccaattcaccgatgttcgtgttcccattgaattgttggactatttggaccgtggtcaaaaccctcagctgtacaccaaagaattgttggaacgcacgcgacagaggaacaaagaactgaacgggaagacggagatgtacaggaagttccaggcgtgtcttctgcaggaactccaccgcgaaatgccttcggacgtggaggaatacgtgtgcattcgaaaaccgagcggaatgaatggggcggcagcggggaacgcaatggcaaattcggcgatggcagcggaggaaacacagcacgcgatggagtgacggactgcgtgcaaatgacggggtgggaacttttccggacaaatttgttcatttttctttttgcattgtcatccaatcgttccccatttcag

SEQ ID NO: 50134 - DNA, 1074 bp, Heterodera glycines
ctgaagtatttttttgttataatgatcaacaaccacgtcaatggggcgaatgacgtcgacatggaaaggaccgaaaacgaaagttttggtgaacttaaccagcgactgattgcgcttaaagcggagaagaacaacaaagagagtgccactttggcggtcaaagtgttggccttttttgtcaactgcgacaacctcagtgctgcccaggattttgtggaggcgttgaagaatttgcccgagtcggcctcaaacagcgattgggcccggtggttttattatttgggacgcatcgaagcgttgaagggcaccgacgccgagacgtacaaagcggcagagaaacattttgaggtcgcacttcgaaaggccccacaaaacggcgccgtcggcttcaaacaggaagtgaacaaatgggtcgtgctggtcaaattgctcatcggcgaaatccccgagcgcagtctcttccgcacggccgaacttcgccacgtgttggcgccgtatttgctgctgacccaaactgtacgccttggcgacgtggccggctttgaccagacgaagcgcgagcacgggcccatctttgtgaaggaccgcaccgctgcgcttgtcgagcgcatccatcagagcgtcattcggaccgcaattcgcaaaatttcgacgacatattcgcgcatttacgtgtccgacgtggccaccaaattgaattttaccgagcaggaggcgcatcgcgagttggtcaaggcgatcaaagagggcattgttcgtgctcagttggtcgccggcgacccgttggcgggcgggcggcactacgtcaaatttgggaccaccgatgaccaataccgcgggattgagccccgcagggagttcgacgcgcgggtcaacgaactgttggagctgtaccaccaggcggtgaaggcactgcggtacccggacatgcgcaacccggaggtggagaccattgacgagcagcgcaggcgtgaacagttggctctcgaaatggcagcagcggaagaggaggatgatgacgatttttgaccaaaatgatgtttttgtttcacaaaaattttttatatgctgcga

SEQ ID NO: 50135 - DNA, 334 bp, Heterodera glycines
atggaaaaaagggtcacagaatctttggtgtttcacgacgaagtggaaattgaagactttgaatttgacgatgagtttcagctgtatcacttcccatgtccgtgtggcgacagattcgaaattacgcgagagcaactcgagtcaggagaagatgtggcgacgtgtccgagctgctcgctaatgttgcgcgttatctacgacatggaacagttcgtcaaattggagacactgcgcttggaaccgacaaacgctgttgaagcggtcaaatgaatggaagttaatttattaacaaaaaccatatatttattatttaattaagtcatttatcattgat

SEQ ID NO: 50136 - DNA, 475 bp, Heterodera glycines
gtcaaatttcgtcaacatgggtatcgacatcaagaaccaccacgtcaagaagacgcagcgccgcgaggccgcttcccgcaacccttacttgttgctcctcgtcaagctctacaagttccttgcccgccgtaccgatgccggcttcaacaaggtcgtgctgcagcgtcttgtcaagtccaagatctacaagccgcccgtgtccttgtccaagctctccgtatccatgaagggccgcgaggacaagattgccgttgttgttggtcccatcaccgacgacaaccggttccacgaggtgcccaagttgaccgtggctgccctccgcttcaccgagtctgcccgtgcccgcattgtcaaggccggcggtgagtgcctcacgctcgaccagctcgccctccgtgccccgactggcgccaacaccgtgctcctccgcggctcgcgccagcgcgttgccctcaagcacttcggcaaggccccc

SEQ ID NO: 50137 - DNA, 568 bp, Heterodera glycines
gtgactctctttttcgtttctctccgttttcccatgtttacccctggcgacgatttctgcgccgcctgcggttccatcatgcaaactccgaatgaattgaccgccggctccggtgtcaccaatttcatcaaatgctccgtctgcgatgcaaaatggccctataaaattgtccacggccaattgcttagtcggcacgaaaggaatttcgagcagcgaaacgccgtgggggaagagcggcaaaaacagcagagaaaagagacggcgagggaagaggaggaggaggacgtaacggtggaacacgtgtgcccaaagtgcgagtggaccacggcgacttacaccacacaacagacgcggtcagcagacgagggacagacagtgttctaccaatgtgtgcgatgcaaacaccggagcatcgaatattcatagagagagggcgaagataagagaagagagaccaagaaagggcagacggatggacggacaaattgccacgcttttgagtctgtcgtctacgacaatcgcacaattttctttgactttttattggcaaaaaagttgttgagttgct

SEQ ID NO: 50138 - DNA, 484 bp, Heterodera glycines
ccgccacaatgatgttgctgcccacaaaaatcattaccaaactttgggagtgtctcgtgatgcgagcgcaaaggatatcaaaaggcattttttgagctgaccaaaaaacaccatcctgacatgaaccctacggataaaacgaaagcagccgaggcgtttcaaaatataactgatgcatacgaagtgcttggttccgaagagaaaagacaaatttacgatacgctcactgctccgaaaccgcaagcccatttcggcagaacgccaaatttcagacggactcgttccaaccatataaacatgggacctgcaggagggcataaagattggaccgatttggacatcgatttcagagatttcgagcacttccaacgagaaaaccggagacggcagacgttcaaagactgggcccgggcgaatacaaaatccgaattttactggtcatctcaccaatcttcgaaatcatataaaagcccgctagcgttgg

SEQ ID NO: 50139 - DNA, 674 bp, Heterodera glycines
gtttgagttattttactgccatgcacaacatactcaaaaggttctttgcgcatgtttcgccttcgcttttaaagaagcccctcaacgacccatttccgattgctgcgtggcgctcgcacccggccaacatggccaaaggtgtgaagttcgatcacgacaacgcgttcgtgcgattctgccgctactatctatggcattactgttggagtgggcgtcagtacggtcttcaattctacgaccaggcattcgaaccgcatcccgtagtccaagaggcactgcgccggctccgtcttaaggacccctaccagtacgaccttcgtctgcagcgtattcttttggccagtcaattgggctcaaagaatgagcgactgccgaagaacatgtggacaaaatgggacgacgagacattctatctgaacccgtattttaacgaaattgaggaggaaaagctggagcgtgaagccagcacgggcatgaagccgggataccaactcaaagagcagatttaggggacagacattgtgttgtgaacgattaggcgcggaggaaaagcacattgcgtttgttgatactgttgccggagagaaattgatttgatgagtgattgttcacaacttttaggacgacatgtgttatgttcatttaacgtgaagtaataaaaccattttcttttc

SEQ ID NO: 50140 - DNA, 701 bp, Heterodera glycines
ccaagtttgaggtattattaaaataaaattccataatggacgtggcaacggttgtcgatgagtacattgattcatcggatttagagcgttttcgaaagacatacgaagaacagagtcgacgcggatttccaagtgccatggccgtatttaattatgcgcacgctttaataaaatcgacgaaagacgatgtgagcactggcatttttcttcttgagagtttattgaaacgatcggaagaagacattcctaaacgcgactacgtttattatttggccatcgctcacacgcgaatcaaagagtacgaccgtgcgctcgaatacatcaatttgcttctttctgcagaatcggataaccaccaagcattggacctgaaggaattgatcgaaaagaggatgaaacgggatggattgctcggcttggcactgaccgttggctttggcggtgctgcggtcgttggcgttctcggggcggcgctgttggctcggaaaaaatgagtggtgaaaaatgtgatgcccctaatttttaacttatactgatgagttgactgtatttatccgcatcgattgggtatctttgacactgataaaaatcgcttttccgttacactcattacccttacaaaaaattatttttaatttcgcgctcactaaatattcaccacttttgagcaaacttttgtattgagcgatcactgtgaactg

SEQ ID NO: 50141 - DNA, 572 bp, Heterodera glycines
caagtttgagaaatcagctctaataatcttttcacgtcgtcatgggtcgcatgcacaacccgggaaaaggcatttcgcgctcggcgttgccttaccgtcgctctgtgcccacctggcagaagctgaccaaccaagaggtggaggagcaaattgtgaagttggcccgcaaagggttgcgtccgtctcaaattggcgtgattttgcgtgattctcatggcgttgcgcaagttcgtcgtataaccggcaacaaaattgtgcgcattcttcgatcaaaggggatggcaccagaaattccggaggatctttaccatctgatcaagaaggcggttagcatccgcaaggcatttggagcgtttccgcaaggacattgactcaaagtaccgtctaattttggtggagagtcgaatccaccgtctcggcccgttacttcaaaaccaaacggatgctcccgcccacttggaagtacgaatcggcgaccgcctccgcactcgtctcttaatttggcgatgaaggctgctgctaacgcacatttttatttgttgatgattgaattaaactgttgatcttttgtt

SEQ ID NO: 50142 - DNA, 1328 bp, Heterodera glycines
aggtaatatttatttgcttacagcaatttaaaaaaatggctgcatttttgaatggcaatgctcacagcagcattgaatgcaatggtgtcgtccatgacaaaaatggcattgatcagaatggcaccaaattggctgatcgcttacaacattcggtgcaaattgggaccaaaaaagcgccggtgtcaaaggggagcatcaatgtcaacaaatatgtgctggaagtgatcagtgacactgatcagctgcacacattggaacaatatgccattgactacgctcattcaattggtttggtggccccactttcggacccgccggagggaaaattcaccaacatttatgccgttccgcctccaatcgcattgcttccatccccgttcccgcgcgaactgtacgaccacgcagtgaacgtgcaacaagcgatgaacgagctgtactttcgtgttgcatcggaccatgactttttgatggatgcatttaaggacgtggtcaaaggcgacccatttatggcacgccttgtgcaaatcgcccaagtggtccacgacgagggcattcatcagccattggctgttcaactccaacgttcggattatatggcacattgggacccgtcagatgggagcatggcactcaaacaggttgaagtgaacatcggaccaattgggggccctggctttgcctttggggtttccaaattgcatcaaaaaatgctggacaaacttgcgattgcgcatgatggaaagccagcaattttggccaattcggaagcgcccctgaaccgctctcgccaaaacattgcctacacactttatcagtcatggaaattgttcggtgacccaaaagctgtgcttctttttttggacacgccgaacatcacgcattttgagcagttgcaattcattcagtttgaagtggaaaagttaggcaaacaacaaggcaattttgtgaaggtgttggtgctttcgctgaccgaagcatcgaaaagaatttcgcttgacgaaagcggcgacttttcattgtatttggacggcacaaaacgtgtggcattggtgcacattgctgacggcaatgtgccgcatgagtacccaacggagcacgaatggacggcacggacaacgatcgagcgatcaaatgccattttgtcgccaaacattcgcttccacctgagcagcaccaagaaaattcagcaggtgttggccaagcctggcatggtggaacgcttctttcccaacgatccgaaacgtgtggcactgatccgcagcacattcaccggactgtggggccttgaggttgaagacgaggcgacccgagaagtgattgaggatgct

SEQ ID NO: 50143 - DNA, 576 bp, Heterodera glycines
gagtgctgaaatattgtagacattcaaatggtttactacaacaacgcctccagctacattcagtggcaagtcattcgcaaaaacagcgccttcctcaaacgtcagcgtggcatcccgaaacacttcagcaccgagccgttcaacatggcgcgtctgaacagcattcgacacaacggaatgatcaacaaaaaggcggtggacatttctgctgcgaaggacggcaaaggagtggttatgagtgtaaagaagcacaaaaatgtggcgaaaccattgcaggcagttgccagcacagcgttgacaagagacagtcgccgggtgatctccgccgtcggaaatgcggtgaccgcctacaaaccgtcgcacgcgaagctggcgcagcgacgcgcctcgcaaatcctccgctcgcaaaaaaccaaggccaaaccagcgacagtgcgcaaaggaaaggccgaatgaacgaggggattttgtggctgaaagacctttaaatgatcgaaaaatgttgttgtttttgttgaaattaattggaaaagaaccattcccgtgaaataccaatgtttagctcggaaagaaccg

SEQ ID NO: 50144 - DNA, 536 bp, Heterodera glycines
gttttgctttgcttcctgaagagaatacgcaactgaagatgcaaattttcgtcaaaaccttgaccggaaagaccattactttggaagtcgaggcgagtgacacaattgaaaatgtcaaagccaaaatccaggacaaggaaggaattcctccggaccagcaacgtttgattttcgctgggaaacaattggaggatggacgcactttggccgattacaacattcagaaagagtcgacgctccatttggtgctccgtctgcgcggagggatcattgagccgtcgttgcgcatgttggcacaaaagtacaactgcgacaagcagatctgtcgcaaatgttacgctcgtctgccgccccgtgccaccaattgccgcaagaagaagtgcggacactccaacgacttgcgcatcaagaagaagctgaagtagaggaccaaatgtttgctggacgaatgggattattgttgatcgaattatttgattttgtttgatgtcgtgagaagacaattttatgttgaaaaaaaaaaaaaaaaaaaaaaa

SEQ ID NO: 50145 - DNA, 548 bp, Heterodera glycines
gtttgaggtaacttatggcgcaaaatactgcacaaattgaagagttcgttcgtttggtgctcagttcatggccttcatatcaatttgcgattaaaaatcagttggcgggatcattaacaagtgccaaggatgcatggtttgtcgaagagctcagtgcgcatttgctgaagcacaaggacatttgtccgtttgcgctgtccgattggatggaggacattttggacacggagttcagcctgatttcggacgatggcactttggagcccaccgccaaattgttggttgagttggccgatttgactgtcggaaggggcgcacacaaaggggcggaggcggcagcaaaactcgaggagcatttgcaaagactgcgaacactttccgctaaatcttgcacaaattcaacaacgccccgtttggacagttcttcaagtgaaagtgaagaaaacaatggaagcgatgaagagaacgattggcagtagattgttgatgagacgactgctttttaatcattgttgttttttttgtaattaaatttgttaattcaaaaa

SEQ ID NO: 50146 - DNA, 669 bp, Heterodera glycines
gtttgagactaaccatcctttcattgactctgtctttttcatcttaatacgaaatggactctcccgctggtgctcagccgtcgaacccaaacgctcaacaacaaggtggagcccgaccatcgaacaaacgactccagcaaacgcaggcacaagtggatgaagttgtcggcataatgaaggtgaacgttgagaaagtgttggagcgtgaccagaagctgtcccaattggatgatcgtgctgatgctcttcaagaaggtgcgtcgcaattcgagaaatctgccgcgacgctgaagcgcaaatattggtggaagaacataaagatgatcgtgatcatgtgcgcaattgtcatcctgctgatcatcatcatcgtcatttgggctggaaaatgaacgacgtgtgctgcggtcggatgctcgagaatttccaagtcttcgtgaattgaaaagatccatttacaaacaaaacccgcgaatctaatttgaccagagttcttgaccaacaattcctaagtctgtttctcatctcctgtttgtgtaccacccaaaaatccgagtacatacgacacttacttcggtcccttcccacattcctaattttcaaaactgtagagtacgcttggaatgcgatggattgacacattttatgtgatgtggataaactgaatatgtg

SEQ ID NO: 50147 - DNA, 310 bp, Heterodera glycines
gtccaattaagattgtgaaagaatggctgcgcacaaaacatttatcatcaaacgaaagttggccaaggctgccaaacaaaatcgtccgcttccccactgggctcgaatgaagacgggcaatcgcattcgctacaacgcaaagcgtcgtcactggcgccgaaccaaactgaagttgtgagcgatggaccccgagaaaacatcggaagacgccggacgggcgttgattttcgacttttttgtttgttcatggagttaattttcatacatttttgtgtggactattgttggtaaaattgttgaatttgaaaag

SEQ ID NO: 50148 - DNA, 540 bp, Heterodera glycines
gtccaattaagatttttctcaatttttatttttggaattccaagagccaacggtcagtaagcgcgatgaagcttgtccgctttttgatgaaattgtcccatgagtctgtgaccatcgagctgaagaacggcacacaagtgagcggtgctattcagggcgtcgacgtggccatgaacattcatttgcgctcggtaaaaatgacagtgcgtggacgagagcaaatcagtttggacacactctccatcagaggaaacaacattcgctatattgttcttccggattctttgccattggacactttgctcatcgatgacgagccgcgcaagaagcccactcaacgccgatttggtggccgtggaggacgcggtgggccgcgcggacgtggacgaggccgcggagggcctccacgcggcggcggcgggggacgacgctgatgatggaccacaatgggagaagggatcagtgtctattgttgttgttcatttcaaaccactggctgaacatctcatttatttttctgatataaaatggggttactcg

SEQ ID NO: 50149 - DNA, 860 bp, Heterodera glycines
gcaaaaataacgatttaatattttcacagtgaccagaaactttaatttggtgtgcttccaaatgtcatattcctatttgttcaaatacatcattatcggggacacaggggtcggcaagtcatgtttgttgctgcagtttacggacaagagatttcagccagttcacgacctgaccattggcgttgagtttggagcacggatgatcacaattgacggaaaacaaatcaaattgcaaatttgggacactgcaggccaggaatcctttcgctccatcacccgttcctattaccggggcgcggctggcgctttgctcgtttacgacatcactcgacgcgacacgttcaaccatttgacctcgtggctggaagacgctcgtcaacactccaattccaacatggtgataatgctgattggcaacaaaagtgatctcgaagcgaggcgtgaggtcaaaaaggaggagggggagcagttcgctcgcgagaatggacttgtctttatggaaacgtcggcgaaaacggctgccaatgtggaggaggcattcattgatacggccaaggaaatttacaggaagatcccaggagggcgtgtttgacattaacaatgaggcaaacggcatcaaactcggtcctcaacacccgcccagttcgccaagctctcccggtggtgcgccgttaggacgtgcgagcaactgttgctgaatttgaccaacggaatgcgaaagtgaaaaaagaccgcaccgtcagaaactcacgccctcccccccccccttcccctccctctgtggataaatcaaagatttctcacaaatctgtatctttgacaaatttgtcgatcaagtcagcatcataaatacctattaa

SEQ ID NO: 50150 - DNA, 639 bp, Heterodera glycines
gtccaattaagctgtccaaaatgatgagtgccaaattttttacgcatttgattaattcggcatcggtacgacccatctccacttcatgctgcagaaaagaattgcgtgaattgtggaaattggacaaacggaacccttttcaagaaattcccgaagcatgggtcacttccctggacgatattgagcagaaaaattgtggactcattcaactccatccagacattttccgtgtcaaaccgcgcttggatttgcttcatcgaaacatcacatggcaatccaattaccggaatttgacgctcctcaaaatgttgtcccgcgccgaaatgccgggcggtggccggaagccgtggcctcagaaaaagatgggccgtcaccatgcaggaagcattcgttcaccgcatttcattcgcggcggttttgcgcacggcgttcgcggcccgtgcacccaattttacatgctgcccaacactgtccgaattcacgggctccgcaccgcgttgaccctcaaacatgcgcaggacgacttggtcattgtggacagctacgacacgctgaacagcgcggaaccacaatttttgaacgatttggccgacgcacgcaattgggggctattccgtgctgtttgttgatctcactgtc

SEQ ID NO: 50151 - DNA, 1851 bp, Heterodera glycines
ccacccgaaaaatgtcggcgtcaattccaaggcgttcttctcaggattcgctggcagaaaaagtgaaaagcaaggagctgatctacgaggccagaatgaagatccaggaacgactgaaggaactcggtttccccgtccaaaacacaacggtcaaagggccaagtggcagcgaacgtttcagagaaactgtgctcaaacccgaggaggcgagcgcattcactcagttgcacatggagaagataaagcgacttaacgaggcaaggagtcgggctgccaaaggcctttccactctgaatttaaagacaccgtcgttagtttttgacacaatttctgccgaaaagcaaatggtggcgaagcgtgagccctcggggcctatccgccaatccttggagaaggccgattcgtcgactatagaactgaaaaaatctgctgcttctccacatggccaacaaattgaacccgattccagcacaagtgccgctcagcaagaatttttggacccgcgaatttacataaaaccggccgctcgccaaaaacgacactttgaattcaaactccctggagagtatgaaaaactggccaaaatccagcggtcaaaagccaaattggagcgacttcagtctgaaattgaaaaggcggcaaaacaaacgggcatttcctctgcggtcaaattggcaattgtgacgcctagcggactgccggagacgagcactggcgaatacattccgttggtggagtggtgggacgaagtggtgctcgggaacaactgcaaagactacaacgaaatgccctcgcaggagttggccccggttgaacgttacgcggattctgtcaccgatttggtggagcatcccatccaactgaaaccaccggacgaaccattgcaaccgcaatacattaaggcttctctaaccaaaaaggagaggaaaaaattgcgacgccaaaaccgtcgcgaggcattgaaagaaagagcggagaaaattcggcttggattggaaaaaccgccggatccaaaattgaaaatcagcaatttgatgcgcgtgttaggcaccgatgcaattcaagacccaaccaaaatggaagcgaaagtacgaaagcaaatggctgaacgggcgcaaaagcacgtggaggacaacagaagcagaaaactgaccagggaagagaaggccgccaaggccatccggaagattggggaggacacaactttggcagtgcacgtcaccgtttttaagatcaaatcgttggcaaaccctgcgaagaaattcaaagtgatgatgaacgccaaacagttgcaaatgaccggtgttgtcattgtgttggaagacataaatgttgttgtgatggagggaggtcccaagcagcaaaagttcttcaaaaacttgatgctcaacagaattcgatggtctgctgaaattgccgggcaaaagcacgaccgaagggcgacgcataacagagcgaatgaaatgggagaagggacggaggatgggccagcggaagagaagaggaacgagtgcgttttgatttgggagggcgtcgtgcaaaagcgagcattcactggtgagccacgcttcactcctgtgaccaatcataagcaggcccgtgaactgctcgaaaagtacggagtgccacactactgggacctgtgttactctacgactgtccttctgaatgacgagacctgatgagagtgaacggctaaatgagactacaaattgactcaaattcattcagtttttagtgattttgagtttaatcgtgtaaatctgctgaagtgatgagatttatcggtttttatatttgagttgttcttaactgtcgacagaaaaatgtatcacagaaattggaccaaag

SEQ ID NO: 50152 - DNA, 541 bp, Heterodera glycines
ccaagtttgagtcaccgcaatgggcgtacacaatgaattacaattggaaggatgcaattttttgagacagcacattgttttttcactactaactggtaggacaatcacaattacaaagattcggtcttacgacgacaatcctggactgaaggaatttgagcgcatttttctttccatgatcaaaagattgacgaatggaactgagctcaaacttagtaaaaacggtacggaactcagttttcggcctggtctaattcatggaggagaattggagttcgactgtggggttcaacgttgtatcagttactttttggagcctctcattctcatggcgcctttttgcaaaaaacctttgaatgtgaatctgaccggtgttacaaattccgtcgatgaactcagcatcgacgccattcgggctacttggctcccggtcttttcccgctttgttcttgccgaccaatgcacagaaataaaaatcaaagccagaggtttcaagccgagtggcggtggttcagtgactttctccagtcccatcaaaaag

SEQ ID NO: 50153 - DNA, 1326 bp, Heterodera glycines
aagtttgagtatcgtttaatccacataaatcaattgcgcaaacgaagtccaaatggcagaagtcggaaactcgtacagaccgccgctaagcgaagagaaacaaaacgaactccgcgcaattgctcagaaaattcttcagccgggcaaagggattctcgctgctgacgagagcacaggttcgattggaaaacgcttcgatactattgggttggagaatacggagaacaatcgccgtcgctaccgccaacttttgttcaccacaccgagctttggacagaatcttagcggcgtcattctttttgatgagacattccgtcagtcaaccgacaacggagtccgatttgttgacgtcatcaaaaaggcgggagccgttgctggcatcaaagtggacacgggagttgtgccattggccggcactctcgatgaggggacgacccagggactcgacaaattgtcggaccgctgtgccgagtacaaaaagggcggctgtgactttgccaagtggcgttgtgtgctgaacatcggtgcccacaaaccgtcccatttggcattgatggagaatgccaatgtgctcgcccgatacgcgagcatttgtcagcagaacggacttgtgcccatcgtgggagccggaggtgctttgtgacggcgaacacagcttggaacgatgccagaaggtgactgagttgactttggcctacacctacaaagcattggccgaccaccacatttacctggagggcactctgctcaagccgaacatggtcacccccggccaatcccactcgcccaaggccacgcccgaccaaattggtctcgccaccgtgactgccctccgccgttctgttccgattgccgtccccggcattgttttcctctccggcggccaatccgagatcgaggctacgcacaatcttaacgccattaacagtgtgcccgggccgaagccgtggacgctgtccttttcctacggaagagcgctgcagtcgtcagtgatcaaaaaatggaacggcaaagacgagaatttgggcgatgcgcagaaagtgttgctgcaccgtgccaaggccaacggcgacgctcagcaggggaaatacaccggcgaggaggcagccgcgtctgccgctgaatcactttttgtggcaaagcacgcctattgaacagaagtgtggaatatgcgatgaataggcgcgaatccgagaatcactcatcatatattttagctggaggaattggcagaataatctgacaatgaacacaatgataattttgtttcatatttcattgttgtcactttccgtttggtgcacttaataattaacatatagtgat

SEQ ID NO: 50154 - DNA, 599 bp, Heterodera glycines
tttagatattaaaatttgaaatttgccatagaatttcgatattgaaaatgctatatgtttttcttttctatgctggtgctgcgaattattgggctaagaagggcatgccgaaatcaaagattattatcggaatcccaacatatggccgtggatggacactgagcaacccgcaacaatttcgtgacatcgaagcaccggcccaagtggcaaaagcgacaaaatttgtcaaattggcgggcatcggatcatactttgagttctgcgaaatgctggcaaacggtgcgcagcgttacgtggaccgggaaacgctggtgccctttttggtggcggacaacgaccagtggttcagctacgacgacgtggagagcatcagaaacaaactcagttggattcgccaaaactctttcggcggcgctttcgtgtggactttggactttgacgatttcaacggacaatgccccggcagccaactcggccgttacccgctgatccgcacaattgcccaagaattgggcggcatccaactctcacagacacccgtctcggcactttcgaattcgccttcgccgtctacgggcgcagctttgccggctgtcaca

SEQ ID NO: 50155 - DNA, 622 bp, Heterodera glycines
ttataatccagcaaattgaaatgccggaacagagcagcggtgccgatgagtacgaatcgttggctcccacttattcgctttgggttcatttggcggcgggcgcagcggcgggaatggctgagcattgtgtgatgttcccattggacagtgtcaaaacgcgtctccagtcgctgtgcccttgtcccgagtccacgtgtccgactcctatccatggcgttgcttcaatggtccgcagggagggattttggcggacgtttcgcggagtcaatgcggtcgctgtcggctcagtgccagcccacgccctttacttcacggtctacgaaaagttcaagtcttcactgactggcaacactcatggccattcgaattcgttttcgtacgcattggccggcatggcggcaacagtggtccacgatttggtgatgaacccggccgaggtggtcaaacagcgcatgcaaatgctgtacagtccgtacggcggttcgttggaatgtgtgcgttgcatctttcggaacgagggaatggccgctttctatcgctcttactccacccaattgtttatgaacgttccgttccaagccgtccatttcgtatgctatgaattctggcaagagcaatttaa

SEQ ID NO: 50156 - DNA, 728 bp, Heterodera glycines
gtccaattaagatacaaaatgtccaattcttttcgaattctttccttattctgtccgctgtttctgcttctctttgttcctgagacttcacgagctctctattttcacatcgctgagactgagaaaaaatgtttcattgaggaaattccggacgagacaatggtgatggggcggtacaaagtgcaactgtacgacccgaacacgaaggcatatggggactatccaacaatcggaatgcatgtcgaagctaaggacccggaagaaaaggttattttgagcaaattgtacacgagcgaaggcatgttcacgttcacatcccattcccccggcgaacatctcatttgtctctattcaaattcgtccgcttggttcagtggcgctcaattgcgcgttcatttggacatccaagtcggagaacatgcccaggactacgagcaggtggcagccaaagacaaattgaacgaacttcaattgcgtgtgcggcaattgttggaccaagtggaacaaatcaccaaagagcagaattaccagcgctatcgcgaagagcgtttccgacagaccagcgaaagtaccaacagtcgcgtgctttggtggtccgtcggacaaacgattgtcctccttttgaccggtgcttggcaaatgcgccacttgaagggctttttcgaggccaaaaagcttgtctgaatcgatgcttttttcctggcagatatttatttgtctccgaattg

SEQ ID NO: 50157 - DNA, 621 bp, Heterodera glycines
cctgattacgccaaagctcgaaattaaccctcactaaagggaacaaaagctggagctccaccgcggtggcggccgctctagaactagtggatcccccgggctgcaggaattcggcacgaggactacggacgttcaaataaccccacaacgcccatcaccatgaagttctccaaggacgtgtcctcgtcgcgccgcaagtcccgcaaggcccacttcacggccccctcgcacgttcgccgtgtcatcatgtcggctcccctcgccaaggagctccgtgagaagcacaacgtccgctccatgcccatccgcaaggacgatgaggtgctcgttgtccgcggcaacttcaagtcgcagaccggcaaggttgtccaagtgtaccgcaagaagtatgtgatccacattgagcgcatcacccgcgacaaggtcaacggcacctctgtccccgttggcatccacccctccaacgtggtcatcaccaagctccacctcgacaaggaccgcaaggccctcctcgagcgcaaggctgctggcaaggctgtccaggccgagtaaattgtcttcacgcttgtgtggaactctgggactcgtgcgtgtgagttgttctcgtctatgaatgcaatt

SEQ ID NO: 50158 - DNA, 847 bp, Heterodera glycines
aagatttgacaaataaaatgtccccttctctttccgttgccaactcaaatgtctctcgaccgcttggccaaccaaaagtagcgggcttcaaagataaggataagccggaaagtgttcgtactagcaacattgtggcagcaaaggctgttgcggatgcggtgcggacgagtcttgggcctcggggaatggacaaaatgatccaatcgggcaacggagaagtgacaattaccaacgatggggcgactattctcaaccaaatgtcggttgtgcatcccaccgcaaaaatgttggtcgagctgtccaaggcgcaggacattgaggcgggcgatggtaccaccactgttgtggtgttggccgggtctttgttggacgctgcagaaaaacttcttgccaaaggaattcatccgaccaccatttccgactcattccaacgggcggccacattttctgaaaaagttctcgaggaaatggccacacccattgacattaacgatgacgacgagttggtgaagctcgccatgacgagtttgaactcgaaggtcgtttcgcaatattcccatcttttggcaccaatggcggtgcaggcagtgaagaaactgatgagttcaccggaggactcaagtgtcaatctgaagttgattaaagtcgtgaaaaagttgggcgaaacggtggaggagtcgcagctcattgagggagcgctgatcgatcagaagtcgatgggccacggaggcccggcgcgggtggagaacgcgaacattggcctcatccaattccaaatctcaccaccaaagccctacatggaaaatcaagtggtcatctctgactatgctcaaatggaccgtgcgct

SEQ ID NO: 50159 - DNA, 659 bp, Heterodera glycines
gctatttgcgaatttattggaaaatgactgaagctaagaagttgcccgaagtgccggagacgctgttgaagcgacgcaaaatcagagccgcacaacgggctgccaaggcgaagaacagcttgaacaccatcaaaaaagtgaaggccaaaaagacggaaatcttcaaacgggcggaacattacttggttgagtaccgccagaagcagcgccaattggtcgcgttgaaacgcgaagcgaagaaagtgggttattactacgtgccggacgagcccaaactcgcatttgttgtccggatcaagggaatcaacaagatccatccacgccctcgtaaagtgttgcagctgctccgtctgcgtcagatcaacaacggcgtgttcgtcaagttgaacaaagcgacaatccagatgttgcgcattgctgacccgtacattgcgtggggctacccgagtcagaagatcattcgccagttggtgtacaagcgcggctatgccaaggagagtggccagcgcattccgatcacggacaatgccattgttgagcgaaacatgggcaagtcggacgtgatctgtgtggaggacatgatccaccagatttggacagtcgggccccacttcaagcaagtgaccaactttttgtggcccttcaaactcagcaacccc

SEQ ID NO: 50160 - DNA, 844 bp, Heterodera glycines
gagctttttaagaatttattgaaaaatgactgaagccaaaaaattgccggaagtgccggagacgctgctgaagcgacgcaaaatcagagccgcacaacgggctgccagggcgaagaacagcttgaacaccatcaaaaaagcgaaggccaaaaagacggaaatcttcaaacgggcggaacattacttggttgagtaccgccagaagcagcgccaattggtcgcgttgaaacgggaagcgaagaaagtgggcaattactacgtgccggacgagcccaaacttgcatttgttgtccggatcaagggcatcaacaagatccatccacgccctcgtaaagtgttacagctgcttcgtctgcgtcagatcaacaacggcgtattcgtcaagttgaacaaagcgacaatccagatgttgcgcattgctgacccgtacattgcgtggggctacccgagtcagaagatcattcgccagttggtgtacaagcgtggttatgccaaggagagtgggcagcgcattccgatcacggacaatgccattgttgagcgaaacatgggcaaatcggacgtgatctgtgtggaggacatgattcaccagatttggacagtcgggccccacttcaagcaagtgaccaactttttgtggcccttcaaactcagcaaccccgtgggcgggttcaagaagaagtccaaccattttgtggagggaggcgacctacggaaaccgcgaggaccaaatcaacaaattgcttgaaaaaatgatctaatttcggaaacaattgcgatgagttgatgtgcagcggacggcacgcttttgttgttgttattttacagataaacttttttgtta

SEQ ID NO: 50161 - DNA, 395 bp, Heterodera glycines
tcaaaatgacgctcgcggtcgatctccttaacccctcgctcgagtccgagaagcgcaagcacaagctgaagcgcttggtacagtcgcccaactcgtacttcatggacgtcaagtgcggtgcctctggctgctctgccatcaacaccgtcttctcacacgcccagaccgttgtcttgtgctcgtcgtgctcgtcggtgctcgccacccccaccggtggtaaggctcgtttgaccgagggctcgtccttccgccccaaggctcaataagcgcagctcaacgtttacttgtaatgtgggagtcgtcgtcgagtcgacacggacgtgtgtgtttgtcgtcacggttgtcaatcttttcgtcttgcctgcccgccaaatgcaacagtcgtttcccgaacc

SEQ ID NO: 50162 - DNA, 709 bp, Heterodera glycines
gtttgagcagtgcctttatttattgaatccgacaaaatgtcatccagctcgaaagctttcattggtaagccggcgccaaatttcatggcggacgccgttgtgaacggcgacttcaaaacaatttcgctggaacagttcaaagggcaatatgtggtgctgttcttctacccactcgatttcactttcgtttgcccaaccgaaataattgccttttcggacaaggcgggagagttcaaaaagatcggtgtccaactcatcgcgtgttctaccgactctaaattttgccatcttgaatggatcaacaagccgcgaaagcagggaggacttggcgagatgaacatcccggtgctggcggacaccagccacaaaatcagccgtgactacggcgtgctgatggaggaggcgggcattgcttatcgcggattgttcatcatcgatgacaagggcgttcttcgtcagatcaccatcaacgatttgcctgttggtcgctcggttgacgagacgcttcgtctcgtgcaagcgttccaatacacggacaagcatgggcgaggtgtgcccggccaactggcagcccggcaccgacaccattaagccgggacccgaagggctcgcaggcgtactttgacaagaagggctgaacaattgagggggagagaagaaaggaggatgagacgtatggaattgctgatgctgactctgtgttgtgatc

SEQ ID NO: 50163 - DNA, 652 bp, Heterodera glycines
ttgagatttaatttattgtgcaaagctcttaaatctccgacttcaacatgggcaatatgttcgctaatctgttcaaggggcttttcggcaaaaaggaaatgcgcattttgatggttgggctggacgctgccggaaagacgacaattctgtacaagcttaaactgggcgagattgtcaccactattccgacaattggtttcaacgtggagactgtcgagtacagaaacatttcatttaccgtctgggacgttggtggacaggacaaaattcgaccgttatggaggcactatttccaaaatacgcaaggactaattttcgtcgtggacagcaacgaccgcgagcgtgtgggcgaggcgcgtgaggaactgatgcgaatgctggcggaagacgaactgcgcgacgcggtgctgttggtatttgcgaacaaacaggatttaccaaatgctatgaacgccgcagaagtgacggacagactcggactgcacactcttcggaaccgcaactggtacatccaggccacctgtgccacgtcgggcgacggactctacgaaggattggactggctgagcaatcagctcaagaacagaggatgaacagcgagcggaccatgcgaattggaagatgacggaagggaatttgtttttgcgcgcag

SEQ ID NO: 50164 - DNA, 430 bp, Heterodera glycines
gtttgagtttacataaatagaaaattgcattttaactgttattccgaaattaaatgttcgcccatctgacaagagcagagcgttcaggctgtatttttaacaggattctcggcttgatcattgctggccatttgaaatgggaacaacggccgctttggttcgacgcttatgtcgcccattcaccgcattacgagccaaaatgggacatcaaaatgccgaagcgtgacgaaccgttgccacaaattttctaccaagaggaccttatcagagccaagaaattgctggagatgcgcaacgaagaaccgaagtatgagcttgatcagcaacaacagcagcagcctgatcagcttaattagttttccgattttgatgaatttgtgttttctattattattttttgtttattttcgtttgagattttagagaaaaa

SEQ ID NO: 50165 - DNA, 790 bp, Heterodera glycines
ttgagcaattcgagtgctacaaatagttcgaaatggtaactgcggaagataccgttaaaacaaaggaagaagaccccaaaaaaacgacaacggacgacggatcgagttcagaggaagaagtgcccgagctcgaagagggcgacgttactgaagagcagaaaaaagttgctgaggcggccggactcagtgagcaggttgccgaaaagggctccaaacaatcgcgttctgaaaagaaggctcgtaaactattcagcaaacttggcgctcaagcaagtgcacgggcgtttcgcgcgtatgcatccgtaaatcgaagagcattttgttcgtcatcaacaagccggacgtgtacaaaagtccgggctccgacacatacgtcgtttttggcgaggcaaaaattgaagatttggcacaacacgctcaaatcactgacgtggagaatttgaaaccgccctcaatcattcgcgatgttcgcaaccgaatcacaccggcggaggaggaaagcgatggcgaagaggctgatgctactggaattgaagaaaaggatattgagttggtgatgtcgcaagcaaatgtttctcgaaacaaagctatcaaagcattgaaaaaggctgacaatgatttggtgaacgctattatggcattgacaatgtaggaggaagccagaggaattcagagaaaacattgttgaccttcgaatttttgcttcaatatttttcctacgggaatcagttcttttaccattgctgattatgttactttacgaattttgcttataaaaattaaaaagcgt

SEQ ID NO: 50166 - DNA, 549 bp, Heterodera glycines
gtccaataagcaatactccctttttcccaaatcttacaaatgaacatgaatcaacttttggttggccgttcgctgttcccaaaaatcatccgccctttctcgcacaccaaaccccttgccaagtctgaggctgacccggatgattacggctacttcccggacccaattgaacactcatggggtttggagaggaaaatgctcatcgctcgtctgaagggtgacgaccgctatgagccgaaggtgtatttccgcgctgaacataccacccgggactatccgaatttggtgccggtccatttgcaggacaaagtcgtcgggtgcctttgcgagccggacgcggagtacgtgaactattggcatattaggaaaggccagatgaagcgatgcgagtgcggacattggtttaagggcgtgcaagccgaccctgacagtttcgcctgaatgcgatggatacgaattggctttgaagtgataggagatcatataaaatgatcagttattttaattgtatttctaagttggttggataaatgtaaagcatagttaaaa

SEQ ID NO: 50167 - DNA, 426 bp, Heterodera glycines
ttaagtgctctttgccttccttttggcatggcttcctcctcctctgatcattcggcttattccaagcaggtcctggaggagttttggcccggccagaatgtgaagatcggccatatgacaatgaattcttttcgagaagtgaacagacattcagaattgccaattgcacgcataaagaaaataatgaaaatcgaggaaggcgtgaaaacccagatgatcagtgccgaagcgcctgtactgctcgcaaaggctgccgaactttttatcgaagaattgaccctccgcgcttggctgaacaccaacgacaaccgccgtaaaaccatccaaaagtcggacatcgccgccggggcggccaaaagcgaaatgttcgactttctcattgacatcctcccgcgcgacgagctgcaaaaagaacaatcggttgac

SEQ ID NO: 50168 - DNA, 1170 bp, Heterodera glycines
gtccatttaaggcaaccaattactatttgcgttgaaaaaggcattggcagtaacgacattttgtcaaacatttcgtccgtctttgtcggtgtgatcgatcacccaagtccaacccatcagaataacaacaattaaacggtcttttcaaattcccaactcattcggctgactgattcgataatcgcgagtcgtcatcttttcccttttcttttccatcgacatttttggctgggttaaactaccaaccaacaaaaagagagcgaaacgaagggaggcaaaaccaatcaatttagtcgagaaagccgagtgaaggaaacagcctcaacatattccatttgtcttataagttataacggaactacaataaaatggcggatcagctaaccgaagagcaaattgccgagttcaaagaggctttctcgctgttcgataaggacggggatggcacaattaccaccaaggaattgggcacggtcatgcggtcgctgggtcaaaaccccacggaggcggagttgcaggacatgatcaacgaagtggatgcagacggaaacgggaccattgactttcccgaattcctcacaatgatggcacgcaaaatgaaggacacggacagcgaagaagagattcgggaggcattcagagtgttcgacaaagacggcaatggcttcatctctgcggccgaactgcgtcacgtgatgacaaatttaggagagaaactgacagacgaagaagtggacgaaatgatcagggaagcggacattgacggggatgggcaagtcaactacgaagaattcgtaacgatgatgacgacgaaataatcgcttcggcacagccctcaacaccgtcactgcatcgatcttttcatttccttcgttcatttaaattatctcctctccacccatccattcattcaccgaccatttttcccgtggattcgattgattttatgtattctataattttttatttgcttttccgtgttcttttgagcagatactgagaatatttgtattgcgttttcttggtctccatcccatcaatcgtctcgtacacctttaatttgtttgtgtttctgtcgggaaacatcgctgggggccaattcgatgagacacattcaaaccagacgatcattgattgtatttcgttttctcaataaacgatttaaaagtt

SEQ ID NO: 50169 - DNA, 788 bp, Heterodera glycines
ctgatttgctaatttgtccgtcctgacgaagaggcatgaaatggctctttgcatgtggcaacacggagaagaggcactggccaaggcgttggtggcatgtcgcatttacaaaagtttggccaatgaggcagcggaggattacttggaagtggaagtatgtgaggaacttaagacgtatgccgaagagtttcggcaactttcactggaattgctcgaccattgctataaagaagatgacgcacaaacgcttcagttgctgacatacgaacttagctattggggccaccagacatgcttgtcactggccgtcattgtgaacaacaagcaattcctggcacacccttgctgccaaattttgttggccgacctttggcacggcggtctccgtattcgaagcaactccaacatcaaagtgctcatgggcattctgtttcctccctcaatctttctgctcgaattcaaatcccgcgaagaattgctgcttcagcctcagaccgcagctgaacatcagaaggacatcaacgaatcgtcgtcgtcctcctcagattcctcctcttcgtcctcgtcttctgacagtgaaagcgacggcgacgagtcggacgcgggcgaaagaggcggtgccacagccgaagagcgccgacgcacgtcgcattcgcacggaagcatgcagtcgttgaacttcacctccatttttaaaagtaagcgcaaacgccgtcgtccttcccactcgcgttcttccaccacggccaaagaggacattgagatgggcaaacagaggaaccgagtga

SEQ ID NO: 50170 - DNA, 458 bp, Heterodera glycines
caggatttgttcaccgtcaaaaacattgaccccgatgggaaaaagttcgacagagtcagtcgtctcttttgtgacagcgaatcattcaaaatgggcctcattttggatgtgaacacccaactctacgccatgggaatcaacgacaaattccggttgatgctttgctcttcgattcgggacgacggactcaccgaagagggcgaatacgacaaatcaatagaaaacattccccgggttcgaatgttcgaatatgtgatgtacggcaaaatttaccggattgagaacgacgagggcaccgcagaaacgagtcgactgaccgcatacgcttctttcggagggcttctgatgcgaattcagggggaggcgaacaatttgaccggatttgagcaggacaaaaacatttatttgttgttaaagaaagttcctaattgataaagagaggaaatgtgtgttaaaaa

SEQ ID NO: 50171 - DNA, 425 bp, Heterodera glycines
acgaggattgactttgggaatttgacttgttacatggctgtggcgcggaacaaaggaatcgaaattgttgagaatgattactctttgcatgccacgccttcgtgcgtttcctttggacaattcgctcggatgatgggtctcggagccaagcagcagctgaacatcaattacgggaacagtgtcgtgaatttcaagcacatcctcggacgcactttcaatgacaaagtcgtgcagacatttcgtcagcacattccctgcggacttatggggaagttcaccgatgaccaaattgagataaaagtcactcatttgggaacgacgcgagtgctttccccggaacaggtggtcgcctgtctgttgacacatttgcgggttcagctcagctgttctctcgggacggatgtcactgaatgcgtcattaatgt

SEQ ID NO: 50172 - DNA, 525 bp, Heterodera glycines
  unsure (1)..(525): unsure at all n locations
ggnggcggccgctctagactagtggatccccgggctgcaggaattcggcacgaggccttgccttagaggtccccacgagggtccaattaagcttaataccctctttatggctgggattgattttgggaatttgacttgttacatggctgtggcgcggaacaaaggaatcgaaattgttgagaatgattactctttgcatgccacgccttcgtgcgtttcctttggacaattcgctcggatgatgggtttcggggccaagcagcagctgaacgtcaattacgggaacagtgtcgtgaatttcaagcacatcctcggacgcactttcaatgacaaagtcgtgcagacatttcgtcagcacattccctgcggactgatggggaagttcaccgatgaccaaattgagataaaagtcactcatttgggcacgacgcgagtgctttccccggaacaggtggtcgcctgtctgttgacacatttgcgggttcagctcagccgttctctcgggacggatgccactgaatgcgt

SEQ ID NO: 50173 - DNA, 659 bp, Heterodera glycines
gaagaatttgcttttttaattttgtctttggattcttagttcttacaatttgagaaatgtctgcgagaccaaaggtttttttcgatgttatggttggcggaaaatcgacaggtcgaattgtgatggaattgtttagtgacatcgttccgaagactgccgaaaattttagggctctgtgtactggcgagaaagggatgggcaaaagtggcaaaccgttgcactacaaagggtcgaagttccaccgcgtcattccgagtttcatgcttcagggtggcgattttactcgaggcaatgggaccggcggcgagtcgatctatggcgagaaattccccgacgagaatttcaaagagaagcataccgtcccgggactattgtcgatggccaatgccggccccaacactaacggctcgcagtttttcatcaccacagtgaaaacggagtggcttgacggcaaacacgtggtgtttgggcgagtcgttgagggcatggacgtggtgaagcaagtcgaagcccagggcaatcagagcggaaagacagcgaacgaaattaccatcgccgattgtggccagctttcgtgaaagcgacaaatttgtgcatcgttacagctcagttttcgaaatattaggtattgttttgtaagtttttgcactttgttgctc

SEQ ID NO: 50174 - DNA, 724 bp, Heterodera glycines
agagagagagagagagagagagagagagagagagagagagagagagagagagagagagagagagagagagagagagagagcctcgtgccgaatcggcacgaggaaaaatcagaagcgaaaatggtcaacccgaagggataccgtcgcggcactcgttacatgttcgcccgcccgttccgcaagcacggcgttgagccgctttcaacattctaccgcgtgtacaaacggggcgacattgtcaccgtcaagggcaacggcgccttccagaagggcatgccgttcaaggcgtaccacggcaagaccgggcgcgtgttcaatgtgaccaaacatgcgctgggcgtcgtcgtcaacaagcgtgttcgccatcgcatcatcccgaaacgcatcaatgtccgtgttgagcatgtgaaaccgtccggctcccggctcgagtttctgcagcgatgcaaagcgaatgacttgcagaagaagcagcacaaggagggcaacgcaccgtttgtggcgctgaagcggaagccgaaggagccccgggtggcgcacttggtcaaagtgaagagcaccaaagttgagcggctggcgcccgtcaaattcgaaattgtcgcctgaggcgttgtcgggggcaaacgaatggacgagcacagaaaaccaaccgacaattgttatttttaatttgttgatccgtttcgtgttaaagaaaaagttttgaaaaggttgggctgtccac

SEQ ID NO: 50175 - DNA, 1155 bp, Heterodera glycines
taccagattaattctacagataaatgacaagtattcgaggtttgttgttcacgctcgcttctcccttgaaggcattttatgcaaatgtggcagtgaaacaaattgatgttacagggatgtccagcagtgttggaattcttcctacccatgtgcctacaattgcagtcttaaagcccggagttgtcaaagtccacgaacttgatggaaacgtctccaagtttttcgcttcttctggtaccctttcaatgaatattgacggctcgtgtcaagtgctcgctgaggaactttgttctcttagcgaactcaacgaacaggccatcaaaaatttgattgatgtcagccaaaagaaagcttctgacctcaatgcaactgatgtgcagaaggccgaggcgggaatttccattgaagtggccgaagccgcgctcagagccatcagcgaaaaataaagacaattgttgacgtatgaaaaatagatggtattgctgtttattgtcgtaatagttttataaatctaatggaaattcccttttctttcatttctcatttgttttttttttcaacaaattatttttgcttgaaatatttgaactttttttcacaaattaatttcgtagcaatggcattattaaaatgcgctatcatccgggggttgcttcatacattcaatggtcgacatttgttttcaacagtcatcgaacggagaggagaatttgccgaacttactgaagatgatctgcggaattttcgtggaattgtcggcgaccgttgtgttaagacagaagagattgacgaatacaacactgactttatagcaaattagggagcgcttgcgtttaccaaaggctttaccccttcatttatgaaacagtggcctcaacaggcgggagcatttcagcagagcatgggataggactgttgaagcgagaataccatcacaaactaatcgaccaaaaacggcgaatgtttagttctggtattgagcgactgtttgaccctcggctgatattgtctccttacaaaatgatagactaacattagagatggtattaaccttgtattaaccaattatcatgcggaaatatattttttattgttccccacttttctcttgcctaaacatatcaaacttttattgtcatgtaatcatgaacaatt

SEQ ID NO: 50176 - DNA, 715 bp, Heterodera glycines
gtccaattaagaatcgtacgtatttttgctgaaaatgggaatagacataaaccacaaatatgaccgcaaggttagacgtacggcacccaaaagtgaggatccgtacctgcgcgttttggttaaactgtaccgcttcttggccaaacgtgtggacaccagcaaacgctttaatgctgttgtgctcaagcgtttgttcatgtcgaagcgcaaccgtccaccactttcaattgcgcgcattgtgcgctatgtgaaaaagccaggtaatgagaagaaactcgtcgtctgtgttggctccgtgacggacgacaagcgcatttacaccgttccggcgatgactgtctgtgcgttgcgcttcaccgacgcggctcgcgcgcgaatcatcgctgcgggcggcgagtgcatcactttcgatcagttggcattgcgtgcaccaaagggcgagaacacgctgctgttgcagggacgacgaaaggcgcgcgaggcggagaagcacttcggaccgccgccgggagtgcctggcagtcatgcgaaaccgttggttcgcgcgaagggaaggaaattcgaacgtgcacgcggtcgccgaaagtctcgcggttacaagaactgaggaattcctgtttcgctttgttgagatatattcccttgtcatgttacctttttgttatggaaatgaaatctttcttatccataatcaaagaaaaaattgttgattttc

SEQ ID NO: 50177 - DNA, 1565 bp, Heterodera glycines
acgagtaagcaatgggcaaggaaaagatccatatcaatattgtggtgatcggtcacgtcgattccggcaaatcgactaccactggccatctcatctacaaatgtggtggaattgacaagcgtaccatcgagaaattcgagaaggaggctcaggaaatgggcaagggatcatttaagtacgcttgggtgcttgacaagctgaaagccgaacgcgagcgtggtatcactatcgacatcgctttgtggaaattcgagacaagcaagtactatgtcaccattattgacgctcctggccatcgcgacttcattaaaaacatgatcacagggacttctcaagctgactgcgctgtgctggtggttgcttgtggaacgggagagtttgaagctggaatttcgaaaaacggccaaacgcgtgagcacgctttgcttgcgcagactttgggggtcaagcagctcatcgtcgcttgcaacaagatggacaccactgaaccgccattcgccgaggcccgttacacggaagtgatgactgaagtgtccaacttcatcaagaagatcggttacaacccagccaccgttccattcgtcccaatctctggcttcaatggcgacaacatgttggagccgtctgacaggatgccgtggtttaaggggtgggccatcgagcgcaaagatggcaatgcatctggcaaaactctgctcgaggctcttgactccattcttccgccgcaaagaccaactgacaagccattgcgtttgcctctccaggatgtgtataagattggaggtattgggacagtgccggttggccgtgtcgagactggtgttctcaagcctggaatggtggtcacttttgctccgcaaggcatttccactgaagtcaaatcagtggaaatgcaccacgagtccttgccagaagcgcttccaggagacaatgtgggcttcaacgtgaaaaacatctctgtgaaggacattcgccgtggttcggtcgcgtccgactcgaagaacgacccggcaaaggagaccaagagcttcacagctcaagtcatcatcatgaaccacccgggtcagatcgctgctggttatactcccgtgttggactgtcacaccgcgcacatcgcgtgcaaattcgccgaacttaaggagaaggttgaccgacggtctggaaagaaagtggaggacaacccgaaggcgctgaaaaccggcgatgctgggatcgtcgatttgattccaaccaaaccgatgtgtgtggaggcattcacggactacgctccgcttggtcgtttcgccgttcgtgacatgaggcaaaccgtcgctgtcggtgtgatcaaggcggtggagaagactgaaggcggtggaaaggttaccaagtcggcgcagaaggctgcagcccctggtggaaagaagaaatgacctatggagagagcggtcccgggagggccatttgttgacgaaaaacccactccatccctttgttttatcgttattttttgcaattccttccacctccgtctctatccatattgtcgttacgttggataatgttcatttttttgttgttgttctggt

SEQ ID NO: 50178 - DNA, 965 bp, Heterodera glycines
cacaatcattcatccacaggcaataataataatataatgcttttttgtccgatggcatcgcagcggacgcactgcgccctctttcagcagcgacatttggccacaaaatacgtccgatttccgctagttcctcccgacaacaaaaatagcgtgcaaactctgcagcagctgatcgcctcgcaaaaggacccaaatgcctttgtttttggcacaaatatggcgggccgagtgggccaatggctgacgaagcgttcctttgagaaaacggtggacaccgaactgcgcattctgctgttgaagtcggccaaccaaatgtacctttgctgtgccaacaaatacccattcattccgttgttgaacgaatttggccttcccgaccattactcaagctggtacaggctgacactgttgcatatttggatggcattgtgccgtgtccaacagtcgctggaggcaatggcctacatttacttcatgcaccaagtgttggaggtgttcaacacggactggtacactcgcttggacaaagcagcgaaagaaatgggcatgtcggtgaacaagcgcaaggagggcatggcattgcacgccatttacatcagcacgttgcacgactatgacgagggatttttcggagatgaccgcgtgttggccgccgccgtgtggcgctcatttttccttcagctgccggacgtgtgcccggcacaaatcaaccgggtgggccgttacatgagggcaacgatggcctcgctggcacggatggacgacacgcgcctgttgaccgacggcattgagcgctgggatgtggcggaagagttggcacgtctggtgagcgcggaacagtttggcaccattccggcagcgccgccttcatcctcgatggatggtgatggccgcaactcggcacaaccggcgccaaaagtggcggcatcaaattaattcattacttttaataagcagacccattt

SEQ ID NO: 50179 - DNA, 535 bp, Heterodera glycines
agcttgacctgattacgccagctcgaattttcctcactaagggaacaaagctggattccccgcggtggcggccgctctagaactagtggatcccccgggctgcaggaattcggcacgagggtccaaatcaccgcagctgttggtcctttactgtgatcagcttttgcgcaaaagtgcacgcaacatggaggacgagaagatggatgagaacctggagcaagtgatgaccgtcttcaaatacatcgacgacaaggacatgttccaagcgtttttccacaagtttttgtgcaagcgcctcgtctacgacacgtcagccagcgaggagcaggagcgatgcatgatcgcaaagctgaagcacatgtgcgggttcgagtacacctccaagttggagcgattgctgactgatgtcgcgctgagcagggaccactccgagcaattcaagcagcagccgaggacatccaacgttgacttctccgtcattgtcgtcatgtcgaacgtgtggccactgcagcagccggtcaaattcgaaatcccg

SEQ ID NO: 50180 - DNA, 886 bp, Heterodera glycines
gtgacaaggtgatatgttgtcaaagtgtctccgctcgtcaatttttggctgctttaattgtgcgctccaaaatgtgtcttctgctggcgttttaatgaattcggttcgccatgcggggaccgcagagcattggagacgcgcctatctgaaggatttgtacaacagacggcaaatggtcgggcccgaaccgctgagaggcagggcatccgaggacaattggaattatccctccgaaatttccgcgctttctcatcgtcttcacatccccgacatggacaacgcactgattgtgcaagcgctgaccgacaaaagttattttacgcgcaatgatttggacgacgaagcgatgggagacgacggaccattgacgacggaagttgcgagagacaaatccaacgaccaattagtggagaaaggaatgcccctctttcgtcatatcgtactcacttatttgcgcgcccattggcctttggctcccgaggaattcatcattgccgtggccacccgaatcgcccccacttcggcgctggccgagttggccacccaattaggcctccaccacgtggtcagaaccgcggagtttcctcccactcagcaaacgctccagtcgacactgttggcccttgtcggtgccatggacgtggcaaaagcgcgcgacttcgtccgccgttttgtgctgccgcgactgtacgaagtgccgttggaggatgtgctgccgttccggcatcccttcgccgtgttgggcgattatttgcgcacatggcaaggggcaactgacatccaaccgcgtacaattgggtcgggtgctgttatgaaagcaacgcctttttaccaaggcgccgattacgtggacaaacagcaaattgttggaccatcgggcggtgaa

SEQ ID NO: 50181 - DNA, 571 bp, Heterodera glycines
  unsure (1)..(571): unsure at all n locations
agaaatttaccgcaaaatcatcagagagagaatgtccgccggtcgtgccaacattggcaaaccggcgccgaatttcagcgccgaagcggtggtggactttgactttaaaacggtgtcgttggacgactataaaggcaaatatgtggtgctgttcttttacccggaggatttttcgttcgtttgtcccactgaaatcatcgctttttcggaccgttcgaatgaatttgccaacataaacacgcagcttttggcctgttcaactgactcaaaattctgtcattttgaatgggtcagcaaaccgcgcaaacaagggggacttggcgaaatgcaaatcccaattttggctgaccgaacccaacggatcagccgcgactacggcgtgctgaaggaggacacgggaaatgcttatcgcggtttgtttatcatcgacacgaagggcattttgcgtcaaattaccattaacgacacgccagttggacggtcaatcgacgagacgctgcgcttggttcaagcgtttcaatttacggatgaacacggcgaagtgtgcccggncaattggaagccgggcgaa

SEQ ID NO: 50182 - DNA, 420 bp, Heterodera glycines
atgaacagaggcggtggcttccatattacgattcaagcaccagtgaacatcgcactgatcaaatattggggcaagaggaatgaggaactcgtccttccgctcaacgattccattgctatcacaattgatgagctgagcgccaccacacacatcacaattgggcccgatgtgagcacggactcggtgacattgaacggagtcggcattgacatcgccggcagttcgcggtttcgaaacgtttttcagcaaattcgtgaatactcaaacagaaagcgaaaactgaagggcgagcatgcttcaaagggttggcacaccaagattgagtcgagcacaaattttccgacctcggcaggactcgcttcatccgccgccggttttgccgccattgcgtttgggcttggcaaaattttccgcttgccg

SEQ ID NO: 50183 - DNA, 1051 bp, Heterodera glycines
gtttgaggttattatgatattaaaattgaaagttccaattctgctgtattgttttgttcaatgtttaagtgctgtcaaagtggacaatgccgagcaatccgaccaaccaactggcgattcttcctccggacaattcccaatttcgtatcctccaataaaatatgaaaacgatttggcctatgtggagaaaccgagtggcaacgagcgttgtctattctacgcggaaggactttctgtcgtcgtttttgccactaaaaaaagtcaatcggcgtgggcggactatcgctctgacaccaaagaaagtccgaagtataccgcgtcaattgaatgccaaggcaatatgaatgtgggcagcagctttgatgtctatttgaaaattgacggcaaagcggaaggagttgtgagagctgacattggaaaaaaggacgcaaaaagtgtcttcactgttgaaggagccgaatttatactcaacttcaacgtcacacaagtcggcttttggcaattggttggtgccaccgtggaaagaattgaagtgaaaggctcttcggatttcctgaacaaaaatttgaatgtcgacaaaaaatggactttggagccttcagttgttccatccacaaacattaacggcttcaaagactacagctttgcttgtggtcagaccaacccgatagtgtgggccctaaaggactcaaatgattacgcagtcggaattacgctgaacaatgtgcagttccaaccattcaatgcaacttacactgccggtggaaaagaagctgaccgtttaaaatttgggtggaaagtcaacgattgccagggggctggtcagcattggcacttggatgggcttggtagttgccactctgctcatctgcgtgcgctttttcgtctttctcatctgtaattctgtgacatacaatgcacagcattccatcataccaaaccaaaaacagattataattagtctcgaaaactcaatttcatcattttcttttattacatttccctcaaaatttttcattctttgtagctttataaatataaatttatttcc

SEQ ID NO: 50184 - DNA, 616 bp, Heterodera glycines
agtccgttttctgcagcgtttcgtcaacaacaatccgcgcaatttggaaagagtgcgcctccaggggaagcccagcgggtgggaatttgagaagaatcgagcgcaacataacttcatttacagggtcgacttttgtccgacaaaaaatgcaattgctgcccgagtcgtccattacgaagatggaattgtgatcgaagcgtcaactcgtgagaagactgtccaaagtcaactatacagtcagacggatgtctccgccgcttataacattggtcggctgttggctcatcgatgcaaaatggcggggattgagcattgcatgtcgagtttgacggagaatgaattggagggcagcaaaaagcgagaggcctttctgagggcactgaacgaaagcggacttttgctggaggagcccgaggccatcccccacactcaccttaacgaccccaatttggtatgggaaacgtttccaattcagcacaaccgagctgacaaattggacgagttggacttgagtctggaaccgggcaaaggcgtttgctgatggcacaaataaaccttttttgtcttgtttccattttgtttctatgtgaaagatggcaaatgaaattttcgaacg

SEQ ID NO: 50185 - DNA, 476 bp, Heterodera glycines
cttggacgcgatgaacaaccggatgccgattctggacagacgatggagttcaactacgttgtcatgtcgttggttggccgtccaatggacaaactccttcacgaatccggtgaccgcttcagccccggaactgcgatcggcacttcaattcaacttctcaaagcgcttaaggcgttgcacagcgttggatacctccatcgtgacattaaaccagcaaactcggccatcggcacgcctgagacgaacgaacagcgccttctctacctcctcgactttggaatggcgcgcaaatatgtcagagaggacggcacacaccggcgccaaagggacaccgcccgcttcagagggacgccaatctacgcaccaatctctgcgcacatcaaacgcgactacagccgccgggatgacattgagtcgtggttctacatgctgattaaattctacaaaggctctgtcccttggaatagccttcgcga

SEQ ID NO: 50186 - DNA, 764 bp, Heterodera glycines
gtccaattaagatacataaatcaaaaattagcatttgccatttctgccgagcgaaatgggtgcctataaatacatgcaggaattgtggcgcaagaagcagtcggaggtgatgcgctatttgctgcgcatccgctgctggcaataccgccaaatggaggccatccatcgctgcacgcggcccacgcggccggagaaggcgcgccgcttgggctacaaggcgaagcaaggctttctcatttaccgcgtgcgcattcgccgcgggggtcgaaagcgccaagtgaccaaagggcaaacgtacggaaagccgaaaacgcacggcgtcaaccagctgaagaacacgcgcagtttgcaagccgttgcggaagcccgtgccggccgccgtttgggcgaacttcgtgtgctcaattcgtactgggtgggccaggactcgacctacaaattctttgaggtcatcctcgtcgacccgtcgcacaaaaccattcgtcgtaacccggacacccaatggatcaccaaacccgtacagaagcatcgcgagcagcgcggactcacctcggccggccgcaaaagccgtggcctcggcaaagggattaagcacacgaagaccattggaggttcgcgcagaaagtgctggaaacgccaaaacaccgtcgaattccatcgcaagcgttgagcaattcattcatttattatggtccattggacagaacggagattctgctgttacttttttctttttttgttgataaataaagcaaaaaattatt

SEQ ID NO: 50187 - DNA, 660 bp, Heterodera glycines
gagatacacaaatcaaaaattagcatttgccatttataccgagcgaaatgggtgcctacaaatacatgcaggaattgtggcgcaagaagcagtcggaggtgatgcgctatttgctgcgcatccgctgctggcaatatcgccaaatggaggccatccaccgctgcacgcggcccacgcgtccggagaaggcgcgccgcttgggctacaaggcgaagcaaggctttctcatttaccgcgtgcgcattcgccgcgggggtcgaaagcgtcaagtgaccaaagggcaaacgtacggaaagccgaaaacgcatggcgtcaaccagctgaagaacacgcgcagtttgcaggccgttgcggaggcccgtgccggccgccgtttgggcgaacttcgtgtgctcaattcgtactgggtgggccaggactcgacctacaaattcttcgaagtcattctcgtcgacccatcgcacaaaaccattcgtcgtaacccggacacccaatggatcaccaaacccgtgcagaagcatcgcgagcagcgtggactcacctcggcccggccgcaaaagccgtggcctcggcaaaggaatgaaacacacgaagaccattggaggctcgcgcaaaaagtgttggaaacgccaaaacaccgtcgaatttcatcgcaggcgt

SEQ ID NO: 50188 - DNA, 481 bp, Heterodera glycines
gtccaattaagaataatctgaatcagatttgtagttctcactattcaatcctacaattagccttattttgcaaaacatccatttttgaacttcaacaaatgtctacgtggattcattgcaaccattgcttcatcgtgccaacaaatgactgcaacaaaacgcgattttggttcacttcgtgcggtcatttgatgtgcgcagagtgtctgaaggcgaagcgatccaacaacaacaacgggcagcactttgagtgtttgctgtgccatcaacagaatgtgcaactcgtggagctcaaccgccatctgaggcccgagctgctggcgctgtttcgtccggcgaaggatttgatagacgaattcaacgccaagttgaagcaagtcctcacatttcagcagtcgcatcagaagcgacttgtcgaccatttgacggacaaggcacaaagggccacaaaatgggcacagtcagttcagaaggacatgca

SEQ ID NO: 50189 - DNA, 783 bp, Heterodera glycines
  unsure (1)..(783): unsure at all n locations
cctgtcgctgtgctttgtactatcatttccttatcaaatgcctcccccaatttcctctcacagcccaaaatatgagaaaaacgagttgcacacacagaacaaaccgtcgaatgttgttgaggcattgacactctctctctgcccatggcttcgtcgtccgctgccagcgatgactcatccgccgtttcttcgcctcctccgccgcttctctcttctcccatccgatcggaaatggtcgctgctgccaaacagtttctggccaacccgcgagtccgcaacactccaatcagtgaacagaccgaatttttgcgtggcaaaggactgacagagacggaaatacaaaaggcaatgaaattgacaacggacggagggggagagcaggtgccgtccacttcgctttcgtcccttcctcccgcgtccgctccctctccctccgctcgtgccgtcgtcgacttggcacgttccgcgcttctcttcggcactgccggttacatggtctacagatttgttcgttcgtggctgctcccgcagcttctcaatgtgccggacccggccgaggagcgtatgcaacgacttgagcaacaggtcgaaaggctgagcgattccacgcgatgcatcgccgaatcggtgacacaaacactcgttgcggtgacggaacagaacgagcagctgagccgaacgatgatgatggtgcagggagggacgaangggacggtttgcaccgccgacattgaccgtgtacataccgaaattggcattgtcaagtcgctgctactcaaccaa

SEQ ID NO: 50190 - DNA, 610 bp, Heterodera glycines
aagcaaaaaaaaaagccaatggaattcaaaggcgaagaatggtcggacaatccgataagcgaatgccgaatggccgagttggtccggcactttttcgccttgggttggatgtgcgacaacggcagcggaatggcggtccgagtgaaagacgaacggacgggcgaacatttgattctgaactcgtccaattcgttggagaaggaaattttttcggaaaacgatttatttgtgatgaaaatgaacggcgaaattttgaaaagcccgtcaaaatcggaccgatctccgacggcgccgttttatttactgcgcgacaatccggatttggcctgtgtcattcacactcactcaaaatgggcaaatctgatcacccaactgatcagaggagacgagttcaaaatttcaaaccaggaaatgattcagggttgtgaaaatcgtctcacaaaaggccgtctggataacattgacgtgctagtggtgccaattgtgcagacagagatcaatgagcatctgctttatccaattctgctgaggacgctgaagcaaaacgcgggggcaagtggcattttagtgcgtgggcacggctttttctgcttcggcagcaacagttggc

SEQ ID NO: 50191 - DNA, 762 bp, Heterodera glycines
cttctattctcttgcattttccgtggaccttcaacacataacccacataaacaaatgaaccgaattcgaaaagcattgacagtactcagcggcaatgaatcaaacattccggagaagatcgcaaaggccgagcctcaacaccatgacattgagaagccggtgtcctccttgaaattcggtggtggcgcaacattgttccccgctgaatacgccgacgacgtggacctctacttgcgacaactcgaaagacgcaccccgctggacttcgactttctgtccgtgcacaaaaccgttgacggacgaatgcggcaaattctcgtcgactggcttgtccatgtccaagtccgcttcaagctgaccattgaaactctcagcctatccgtgcacattctcgaccgcgttctattggcactcccggggattaacaagacaaatttgcaactgttgggcgtcacgagcattttcatcgcagccaaattcgaggaagtggtcatgccgaatgttgacgactttgtctatgtggcagcaaacatgttcaagagggaggacatcatgcggatggaaccgcgggtgctgtccgggctcaagttcaacctcagcgtgccatacgccgtgcagtttctgcgtagctatcgcttctacgcttcgccgtcaaagagtgtgtgggaatttgcgaagttcgtcagcgaagttgccatggtctgttacgcgttggcccacttccctccctccgttgtggccgccgtgtcgctccatttggct

SEQ ID NO: 50192 - DNA, 956 bp, Heterodera glycines
cgggcgatgggccccgggggaagaagcgtatttaagcggagagaagtgggggaagggcatcagttgcagttcaaccaacagcagcagaagcaaaaatggctgatttcgacaaacacgctgcccagcgcgaggcggagtcgctccgcactttggccttcttcggcgtgtgcctgtccaccgtggccacggttatcgctgtgctttccgtgccgttcgcctaccagcacttccagcagcttggcacccaaatgcagaacgaagtggacttctgcaaaatgcgctccggcaacatgtggcgcgaggtcacccgcacccaggcctactccaaggtgtcgcacgacagccgtcacaagcgtcaggcaggcggttgctgtggctgcggagtgtcgcccccgggcccgcccggaccccctggcccatcgggacaacccggcggagacggacaacccggaggctcaggacagcccggagcaccaggccaggcagctcctcgcccgtacccgccaagcggcggatgcgtgccgcaatgtgaggccgcccagcccggacttcccggcccgcccggaccccccggacccgagggacagaacggccaacccggacagtcggcaccgcccgcgtctcctggccgccccggaccccagggacctcctggacccgatggacagcccggcaaccccggagagtctggccaacccggccagcccggcaaactcacccagggcccgcccgtcgtcggaccgcctggcccagcaggaccccctggccagcccggacagcccggcgagaacggacagcccggccagcctggaaaccccggcccgcaaggataccctggcgacggcggaagccccggccaacccggcaaccccggaggcagcggcgagcccggacagcccggagcacagggatccagcggccaatgctaccactgcccaccgccccgcaccgccccc

SEQ ID NO: 50193 - DNA, 465 bp, Heterodera glycines
tggttttacaaatgggtcaaaaccaaccgcagggaggtgggcgaaagccaggcgatgacaaaggacaggaccctgaaaaaaaaacggaaataccatggaccgccggttccaacgcgaattggaaaacgcaagaagggctctcgtggtcccgacacagcaaacaaaatgcccaccgtgactccgatcactcgttgtaaactcaagctcctcaagtatgaccggattaaggactatcttttaatggaggaagaattcataaagaacatggagcgtttgaagcctcaggacgaacgtcaggaggaagagcgtgttaaagttgacgaccttcgtgggactccaatgtctgtcggatcattggaagaagtcattgacgatcaacacgcaattgtttccacgaatgtcggcagtgaacattacgtcaacattttgtcatttgtggacaaagaacagcttgagccgggctgt

SEQ ID NO: 50194 - DNA, 1133 bp, Heterodera glycines
gttgaggatggctgtgccaaatccaaaatccatttcaaacaattggataagcgttcaccgattgctcacatcgtcgagaatgagctcatcgtcgccgcactgcagcaatgcattcgggaccgatgtgccaatgtggaagtgcgccaaggcgcggttgttgaccagaatttgagtgttcctgacaatctcggccaaaatgtcaccattcagttcgaagatggcacaattgaagcttcattgatgattgccgccgatgggtccaaaagtacggcacggaaaagggccggcattgattttgaagaaacggcctatgagcagcgtgccgttgtgggcacattggccctccagcacaattcggagtccgatgaatccttcgcttggcaacgctttgtgccgtcgggccccgtcgcgcttctgccgcttggccgtgaactgtgctcgttggtttggaccgtgtcaactgccgacgcggcacggcttctccaactgtcgcccgaacactttgtggaagagctgaatgggacacttcaatttgacaactcttcggctaattccctcgtcaacaattcgttggattgtcttggcaaggcactgaactttttgccgtccaaagaatcgcctgccaaatgcacaattccccgcgttttgtcgctgccttacgatgaccgtgccgtgtttcctctgtcccttggctacgcttacgactacattcggccgcgggttgcgcttattggagatgctgcgcatcgtgtccatccgctggcggggcaaggcgtcaatttgggctggtccgatgttcgcttcctcaccgctgcgcttcagcgggctttctacgagggaggcgatttgggttcgttgacatatttgcgcgactttgacagtgcgagccaaaggcgaaatgggccgattatattcgcaattgactgtctgaaccgactttactcgaccgaccaccccttttgcacgttgttccgttccgttgggctcaacattttggaccggattcttccggccaaggatttgattgttcatctggcctcatgatttgatttggtctttactcgatttatgacgaatttcgttgatttgtactgccttttttattttgagtaaatttttttatttcaaaaaaa

SEQ ID NO: 50195 - DNA, 965 bp, Heterodera glycines
tttatttttgactttccaaaatggtttccgttggacttgcaaatgctcagcgacttgttgcgattgtgactggcggtgcttcggggcttggctgtgcgactgttcgtcggttggtcgccaaagggttcaacgtttctctgttggatttgccaatgtctgaaggagcgaaagtggtggaagaattgggcaccactgacaatgtgcttttctctccggtcgatatttcgtctgatgatcaagtgtattttgccatggacgcaacaacggagaaatttggtggtctcattgttttggccaattgcgctggaatcgctttcgcgcacagattgtacaatccgtcgagcagagcccaaatggacctcgacaaaattcggcgactcatcgacgtgaacatcttcggcaccatcaacgtgatcagacacgccctcccgctgctgattgacaatgtgccggacgaaaacgaccagcgcggagtgatcatcaacacttcatcaattgcagcctttgaaggacaaatgggacagaccctttattccgcttcaaaaggtgccgttgcatcattaaccgttccattggcgcgcgattattccaacaatggcattcgcgtgatggcaattgctcccggcttaatggacacgccattgctttcctcgttgccaccaaaagtcaaaaagttcctttctggcactgttccgtttccgaaccgattggggaagccggaagaatttgccgcattggtggagcatatcatcgacaaccattacttaaacggcgaaatcatccgattggatggtgggattcggatgaatgcttgagaaggacagcagcagaagggcacaattggctctttgatcacttttgttgactttttatctttgcattgttttttgttgtgcgtccattcccacaaccctttggattttataaattgccaaaagcaatcggtggggtaatttgtcttttat

SEQ ID NO: 50196 - DNA, 838 bp, Heterodera glycines
gtccgtgctgtggaaaatgcttgctctgaagtcgcttttgggtaggagccctctggtcaatcctttggttttgtctttgcggaacagatccatcaaaaaagtgaagaaaaaacttgctgcaggggaaacactcggcggtccggaggattatgcgtataattatgttgaaaaaaagagaggatttatcaaaccgatccacacacttgaggaacagatagaatacatgaacagcgaagtttttgccgaaacttacaaaggacgtccaatttgttttatgtggaaacgtaatatgaaaggccagtggaaattgcaaccgccgcctcgacttttttgcattgaccgcaatggtcgtttcaacgttggaaatgcgtgtacggtgtgtcgtgatgagtatttgttcttcgattatagaaatcccaaattgcttgagcatttcctttaccccggcactgatcagcccctgcccataattcaaaccggactttgtcaagaacagtacgtcaatttgcaagcccaacttctcaaggccaaagagcacggtacgtttattttcaacgtgcccttccgtcacttcaattatggtcaatggtatccaaaagatgcgaatgcattaataagcagtgatttggaggaggaccaaccgagcagagacttgacaaacgtcgaatacatttatccgaatcctcaaatcgcatttgaaacacacaaccgggacaaacacaatgcttgggatgaatggtggatgagacaagaaagattcattaaaagactcaaataatcgcacatttgttactattgtctgtttgttgcattcacttcgaaaaatatttcaacgcga

SEQ ID NO: 50197 - DNA, 854 bp, Heterodera glycines
tggatccccgggctgcaggaattcggcacgagggtttgacatagcggatatttagatacaatctaaagcttcgtttgcatggatttagtttaccacgaaaagcaagttggacgtatgtgtgctcaacatgcactgaacatgcttctgcaaggcgattacttcacgcccgattctctcgcttcaattgctcaagaattggaccaaagagaacgtgcgatgctaagggacgaatctgagtttcaaagtcaaaattacgacgattcgggatacttctcaattcaggtgataactgaagctttgcgtcgtcaagcgaatttgagtctggagcctatcataagcccaaatgctatgaaggttttgcaaaatccgagtttggcacatgcttacatttgtcacctggaggaccattggttcacaattcgcaaaattgggacgacttggtttatcctcaattcgctgttcaaagcaccgcgcattgtatctgaaacgtttctcgaattgtacgtccatcagcttaataccgaaggttggtccctttatgttgtcgaaggcgaattgcccgcttgtgcagcggaaactgtgccaagagaattttggaatgagacgcgacggacaaaaaagtttgaaaatgacatggaaagggcaatcgcattgagcctaaatgaagcacggccgtttcttgttacaaagactgccgatgaagaattgtttggagcggcgacaccggtgatcagccaagccgaggagttggacatccagcgtgctttggaggacagtcttcgtgaggcgaatagggccacttcggtaagcactgccgaatcgtttctcgtcggagaagcgatccgcaacagtgt

SEQ ID NO: 50198 - DNA, 518 bp, Heterodera glycines
gtccaattaagattaaatttactttcctatccattcttttctaaattgaaaatggccgacgaaagtggcacgaacgcaggaggagccggtgccgctggtggcgctcagcccgccgagtacatcaaactgaaggttgtgggccaggactcaaatgaagtgcatttccgggtcaaatacgggacatccatgggcaagctgaagaaggcgtacgctgagcggactggcgtccaggtgacttctttgcgctttttgttcgatggccgccgcgtcaatgacgacgacacccccaaatcacttgaaatggaggaggacgacgtcattgaagtgtaccaagaacagctcggaggctacattgtggaggaataatgaagattgtgaacatttctccgtgtttctttctctgacgatgatcttttgcggatgttatatttatacttcgctttgtttctttttttgtttctttgaaagaattggattccaaacttttgttgtttaatttatcacacttgtaaaaaaaa

SEQ ID NO: 50199 - DNA, 459 bp, Heterodera glycines
atgttgcgacagcttgactctgtccgtgaatacatccaacaattgcatgcgcgactcctttcactgaccgacaggtttgcccaaatttcaccgctttggcaacgtggcgaacccatttcaaaaccgctgccggtgatggcactttgcgagtacaagagcaaggacaaaattcacatcagacaaggggacaagtacactctgttggacaaccatgaccaaattcagtggcgcgtgcgcggcatggacgacgttgaggtggtgtcaactccgggaacaagcggcgccacgggtgccaccgctgtgtcacaactcattgaagaagacgaggaaaaatgtgcccgttgtgccacagcatcagccactgtacgaaagattgcaacaagcgttgaatcggaagaattatttttattatcatttgtgcgtttgttttgatgtgttaagcataaaaatttttcaatt

SEQ ID NO: 50200 - DNA, 484 bp, Heterodera glycines
  unsure (1)..(484): unsure at all n locations
gtttgagattatacattgaaattgcgatggacactttgtttgacgtgcgtaacaacttttatttgggcgcttttcaacagtgcatcaacgaggcacagaaagtcaaatgcaagtcggaagaggagaaggagctcaaggacgcgttcatgtaccgcgcttacattggcctgaacaaatgttccgtgccgttgggcgaaattgacgccaccgatggcaatgggtcggccgcccttttggcaatccgacggttcgccacgtttatgagcggtgcgccggagaagaggtcagagattgttgaccaggtggccaaagaatttgaaacgaaaaagtacgctgacaacgaaatttgcctgctgatcagcacactcattttcatgcacggagaaaaaactgaggaggcattgcgcgtgctgaaccgcacggcgtccgattcgttggagtgcgccgcgttgcgcgtccaatgtttgctgaagctgaacanggg

SEQ ID NO: 50201 - DNA, 541 bp, Heterodera glycines
caattaagcgattcacattccgtattcaatcgatatacctttcaatttgcctttactatgcttcttgctttgacttctgtggacactcgcaacgcacttttgtgcgccgccgttccttccattggcgccttcgtgggctcgacgatggccatcaaagatcaggaattggttcaattcctcaagaaacaaaattttccttctttcgcacgttgttgcaaatacaattatttgctggccaacactgccgtcaccattccgttcggttacgcttcttatttggtctacaaaattggaggaggtgtcagttgcaccgactcaaaaatcgcattgggactgtacggtgcgacgctgctcagcggctgttttttggtgcccactctcaaaaagcatgacattaaggcgctgactgccaacgctgttgtccttgccggactttccgtcgctacttcagtggctttctacaacatcgataagatttccgcttattggaccatgcccttcactctttgggccattttatacgctggacttacggtgaagg

SEQ ID NO: 50202 - DNA, 701 bp, Heterodera glycines
tggtcaatccttgattttgcatgtttactgattgaaataaaaagttcaaaaaatgcaatcatatcattacatttatcatatcagctaatacaaattccctttgcctaactatgcctcttcattggacttctgtggacactcgcaacgcacttttgtgcgccgccgttccttccattggcgccttcgtgggctcgacgatggccatcaaagatcaggaattggttcaatttctcaagaatcaaaactttccttctttcgcccgttgttgcaaatacaattatttgctggccaacactgccgtcaccattccgttcggttacgcttcttatttggtctacaaaattggaggaggttttgattacacggacacgactgttgcattgggactgtacggggcgacggtgctcagcggctgttttttggtgcccgtgctcaagaagcaggatactaaggcgctgactgccaacgctgttgtccttgccggactttccgtcgccacttctgtggctttctacaacatcgacaagatttccgcttattggaccatgcccttcactctttgggccattttctgcgctggacttacggtgaaggcttgaaatgtttgaagtcggctgcctttttctggattgtcattttatgttaactcatcttttgttgagttaggaatattttacttccaagtaaattgtctcgacatt

SEQ ID NO: 50203 - DNA, 1035 bp, Heterodera glycines
gacctttaggggtcccttttttcaccctttgacgacaaacagaagcagcaatgagtggttgggatgcgtacattcagtcattgacttccagttgtgcggagattactcgcgtggccataattggcaattcggacgcgagtgtttgggccaggactgaaggggagaacgaattcaaggcgagtgaacctgagctcaagaaacttgtcggccaattcgatgatctttcgcaagttccgtccgtcggtgccgacctcgagggaattcattacattgtgccgcgaacggatgaaaatcttatctttgggaagagggacaaaacgggctttttcgctgtgaagaccaagtccgccattctgatcgccatttacaaggacgaggaaagtgtcgtcggcgccgacgtgcgaggggcggtggagaaaatggccaaataccttgaggacgccggttactgagccgttgctcggtttcctaaacgacttttgtgttgccaaacgaaaagtgctgagaatggctttgacttattcttccaaatgcattccttttccatcccaaatgatcacttattattttattattacacattctgtgaagtgcgcgtgccgatttcttttttattatttggcctttggatgtgaataataaaaaggtgtaaccgctgagaaccaaaaactgcttttgcttttcgaaaaccttttccatcaatccgttggcgggcaaatgtctccgccaatccaattctgtaattgatacgggcagtccctttaattaatctgacccacaggtgccatgctttttgtttggcttggccttgcgtttgtaattcgagctcacctcgggggggggggaggaatgtccgttcccttttgccttggcaacattcgccttatttcgcgatgctttttgtctcctttttcgtcttggcattactttttccccttggtgactccgttctgtccgtcgttgcccctcctccgtctccgttgtctatcagtgcgtttcctccgtcactttccgccgatttcgtcacttttcagc

SEQ ID NO: 50204 - DNA, 472 bp, Heterodera glycines
cttaagaaatttattgaattcacttttttatttggtttcgtccgacaacaagaaatggcaaagcgcacaaaaaaggtcggcattgtcgggaagtacggcactcggtacggcgcctcgttgcggaagacagtcaaaaagatggaggtgtctcaacatgccaaatacacatgtgcattctgcggcaaggaggccatgaagcgagtgtgtgtcgggatttggaattgttccaagtgtcacaagaaagtggccggcggcgcctacgtgtacgccaccaccaccgcggcaacagtgcgaagcaccatccgccgtctgcgcgagaccaaagagtgatttgccgaatcccaacggcggagaacaatggtggtgacgacgacttttgcaccccactgccactgttttttgttgttatgtgttgtttttgaatgaaaatgggaattgttcttcttttgggaatgcaatatccaaaaaatgg

SEQ ID NO: 50205 - DNA, 1163 bp, Heterodera glycines
ttggctgcttttcccagaaccgccgttgcctttatgcagcaatgttctcgcttaatgagtgtcaggatgaaaagcagttctattaaggtaactttaatcggcgcaagtggaggcatcggccaaccgctcggattacttttgaagaagaacccttccattgcacacttggcactttacgatcttgtcggcactcccggagttgcggccgacctttcccatataaacaccccggcaaaagtgactggccatttgggaccagaccaacttgttgcagcgttggaaggtgctgacgttgtcattattcctgccggtgtgccacggaagcccggtatgactcgtgacgaccttttcaccacaaatgccggcattgtgcgggacatggccgaagcagccgcaaaaacttgtccgaaagctttcatgggcattataaccaatccggtgaactcgacccttcccatcgcctgcgaagtctacaaaaacaatgactgtttcgacccgcgacgcattttcggcgtcactcttcttgacattgttcgagcacaggcattcgtttcagaactaaaagggatggattgtttcccaaacaaaagtgtcggtggtcggtggccattccggagtgaccattgtcccacttctgtccagatgtacgcccaaagtcagtctgagtgacagtgagacgaaggcactcaccgaacgcatccaagaagcagggacagaagttgtgaaagccaaggctggcgcggggtcggccactctttcgatggcacttgcagctgaatactttgtttcggctttgatcaacgcgctgaagggccagaagagtgtgcagtgtgcgtatgtcaaatccgacgtggtggaaggccttgattactttgctggaccattggagctgggacccaacggcgtggagaaaatactgccattgggtgacctgaccgcttacgaaaaggagctgatcagcaaagcggtgcccgaactgaagaaggaaattgcgaagggtgtcaactttatcaagcaagggtagaagccagccggtagtaattagccaatcatttttgtgtcgagaaatgcattggcactgttactgtttgtcaaccgatgattttcatattatatgtagttttggttcttaatatcccaatcatgttttgtcctgctaccat

SEQ ID NO: 50206 - DNA, 867 bp, Heterodera glycines
ctaaaatgcaagagactcacattgttctcgggattgcctcggtgtgctctctgttggctatcatcgccacagtcgtcactctgccatctctgtactcggagatgagccaaatgaacagcaaagtgcgcgacggagttgaggccttccgcgtcaacaccgactcggcctggactgacttgatggacgtgcaagtggtcgtgacgccgccgtcgaagccccgtgataaccccttcaactccatcttccgtgccaaacgtcaactgcccggacactgccagtgcgctggcctccaacagccaagctgtccccctggtccgcccggccccgtccggaccgcctggacagcccggacagcctggaggcgcaggacagcccggacagcctggacagcctggccaacccggacagcctggagcgaacggagttgtctcacgcccaattcctggcccgaagggaccgcctggagcgcctggccagaacggaaaccccggaagccaaggtcagccaggacagccaggaggccaaggaccgcccggacctcctggcgcgcccggtcagcccggccagcctggaaactctggccagcctggacagcccggagcaccgggacagcccggcaaggacagcggctactgtccgtgcccgccccgctcttccgtgttggcagtcaaaaagaagatggcggcagccaagaaagcataagcgacaagcgcagggagaagagaaccgaaagacaaaggaccgacgcgaaagcgaagctgaagatgatcataattgggtggaagttgttgtcggaatttgtgttcaccagcgcatttcccacacgaataaagggcattcactaaaaaaaaaaaaaaaaaaaaaaaa

SEQ ID NO: 50207 - DNA, 484 bp, Heterodera glycines
caattaagagccagtttatttactcatttcaacaaacagcaatgaaatacgtcgccgcgtacatgttggcatcgctgggcggaaatggcgacccatcgccaaaggatttggaaaaaattctcgcagcaggcggactcgaggtggacatggacaatgtgaaggccgtcctcaacgcagtgaaaggcaagtccattgaggaggttattgcggcgggccagaagaaattggccaccatgcccactggtggaggcgctgcagcaccaactgcagcagcagcggccactgctgcacccgctgctgcggagaagaaggaggaaaagaagaaggaagaagtgaaggaagaatcggacgacgacatgggcttcggactgttcgactgatcaccgaccgattgatcgatcggacggaatattgtttttgcttcttaccatttcatcaaattaaaacgacgaacggaaaaacggagataaatttgttttttgtt

SEQ ID NO: 50208 - DNA, 620 bp, Heterodera glycines
taagggtttaaaatatttctgaatttgttgtggtattttgtccaatgtctgtgctaatcaccgagagaaatcaggatgcgacaatttatgttggtggtctggacgagaaggtcaccgaggcgatcctctgggagttgttcgtcaacgctggtccggtgaccaacgtgaacatgccgaaggatcggatcaccggcactcaccagggcttcggctttgtggagttcatgagcgaggaggacgctgattatgccataaaaatcatgaacatgatcaagctgtttggcaaaccgatcaaagtgaataaagcgtctgcgaatgagaagaacatggacgttggggcgaatttgtttgtgggcaatttggacccggaggtggacgagaagttgctgttcgacacgttcagcgcgttcggtgtcattttgcagcccccgaaaatcatgcgcgacgtggagacaggcagcagcaagggctacgcgttcatcaattttgcatctttcgaagcgtccgatgcagcgctcgaggcgatgaacggccaattcctgtgcaaccggcccatcacgtgttcgtacgcgttcaaaaaggacaccaaggggggagcggcacggcacaaccgcggagcg

SEQ ID NO: 50209 - DNA, 776 bp, Heterodera glycines
gtttgaggatgtttttttctaattttgtggcgctcactttctgcattttctccatcttcattctgatcccaaatgtgtcagctgctgcctgcgagtcgcccaaatactccgccaacggttactccacgcaagacggatttttccactacaaaacttcttacattgttgaatttgcgatccaatgctctaacaattacaaggacgcgccattctacgcactggtcggtgaaaaaacgctccaattggctgtgtctgaggagaccaacaagtaccaggtgtcctggcaattggaacatgccgattctggtgcacaaacattcgatattcgcgtttatgacgaagacaaattcgcggagcacaaaaaggccgatgagtccggctcaagttctgtccaaccattgttcactgtccagcattaccacggcggcacctctcacaaaacgtggatttcctcagagtccgtcttccttttgttgggcgtcgtggcgctgtactttacgatgaatttacgccaattgttggccaaaagagactgactgaccaattggttgttgcccattctcccgaatttcacccttttaatccttcaatctgtgaaatgaccattttaagttattcctgacactttgggcttactcaatttatttgtaaccttttttggtggggtattttcgttttaacaacattttcaaccgtctcttcgagccttgttttgtcatccaattgatgttttttgcctaacttcattctttcattgttgataaaaaaagtggttg

SEQ ID NO: 50210 - DNA, 510 bp, Heterodera glycines
gtcgtcttacgctcgacaaaaaaccgccataaaccgcgccatgcctcccaagttcgaccccaacgagaccaagatcatcaccctccgtgtgacgggtggtgaagtggctggtggttcggcccttgcccccaagatcggtcccctcggtctgtcgcccaagaaggttggtgatgacatcgccaaggccacccaggcctacaagggtctccgcgtgactgtgcagcttaccgtgcagaaccgtcaagccgccatctcggttgtgcccacggcctcgtcgctcgtcatcggcgccctcaaggagccgcccagggaccgcaagaaggagaagaacatcaagcactctggcaacctcaccttggacgccatcatcgatgttgcccgccaaatgcgccccaagtccatggctcgcaccttgaccggctccgtcaaggagattctcggcactgccttctctgtgggttgcaccgtcgacggcatgtcgcccaaggaggtccaggagaagattgacgc

SEQ ID NO: 50211 - DNA, 779 bp, Heterodera glycines
  unsure (1)..(779): unsure at all n locations
ccccgcggtggcggccgccctccaactagtggatcccccgggctgcagtttacaaacacgaggcggcggagaaaggaggaaaagcgggcggaggagggaaaagtttcggccgcggggcggcacggtaccatcggggggatgagaattacccctacaaacaggagatttcattggcggttacgctggccatggcaatttgtctgatcagttttgtgtaccacagcacttgggtcacttctgaggcgtacagcagtccttccattgtcctttccgcgcgttcgggcgatggcggacgcataattttcgacgatttccgctaggcttattactggttacgaaaaaacacgcccgatgatgcgaaagtgatgtcctggtgggattatggctaccaaatttcggcaatggccaaccgaacgacaatcgtggacaacaatacgtggaacaacacacacatttcgcgtgtaggacaagcgatggcatcgaatgaatcgcatgcatacgaantaatgcacgaattggacgtcgactatgtgctggtcatttttggaggagtcaccggctattcatctgacgacatcaacaaattcctgtggatggtccgaatcggcggttcgacgccggaggggcgacacattcacgaaaatgattactacacaaagaatgggagagtttcgcattgacaagnagggttcctctacnatgctcaactgtttaatgtacaaattgtgctatcaccgcttcggcactgtgtacactgaacatggccgtgccaccggttt

SEQ ID NO: 50212 - DNA, 641 bp, Heterodera glycines
ggtaatttcaagcacattatttttggaaagcttatttgatttatccatcaacagctgcaaaatgacgattagcaagaacaacaagatgatggcgcacctcaactacaaaatgaaggtgatcgtccaggattcacgcgtttttatcggatacttcaaagcattcgataaacacatgaacataattctggccgactgtgaagagatgcgccgcattaagcccaaacaaggagctaagaagtcaaacgtcgaggaggaaaagcgcattcttggcctggtgttgctgcgaggggacaaaatcatctccatttcggtggaaggaccgcctcaaaaggaggattctggtgtgcagttgccaaaggctggcggactcggtgggcctggacaaggacgaggtgccggtcgaggaatgccgatgggtgtggtgccgccaatgggagctgttcctccgggtttgcagggcgccgttcgtggaattggtggtcctgggatgggtgggcccatgcagcccggatacatgcaagggatgcccgcagggaatgccgccacgtccattttgatgctcgattttgttttctttgttcgaccattatttgttttcttacttttacacaatgatctgtttgtttgataaataagttatc

SEQ ID NO: 50213 - DNA, 484 bp, Heterodera glycines
gttccacggatttttcttgtaatggtggatttcgacacatcgtctttatacagtgtcaaggccattcttatccttgaccaggacgggaagaggataatggcaaaatattacgacaaacagctttttccactcgaaaaggagcagaatgtctttgaaaagaatgtttttcagaaaacccacaaagctaatgcggatataatccttttggatggcctcgtttgtctttatcggtataacgtcgatttgtttttttacgtggtcggaagtgcaaatgaaaatgaattgattctgcaaagtgtgctcaattgcctttacgaagcgttttcgacaattcttcgaaaaaatgttgagaaaaaggctctgttcgagcacattgacacgtcttttctcattatggatgaaatttgcgatgatggcattattctggagaccgatccccaggcagtggtcgcccgttgtgcggtcaaagcggacgaattggcat

SEQ ID NO: 50214 - DNA, 530 bp, Heterodera glycines
gaggatttggcggatatcgcggcggtggggcaggtggtatgggaatgaaccgcacgcaaagttctcgttatggaccgcctatacagacgcgttatcgaatgttggtgactaatttgtcaacacgctgttcatggcaggacctcaaggatctgatgcgaaatgccggcgaagtcacttatgcggacgcacacaaaaaagtgagaaatgaagcagttgtctgcttcgccacccatgaggatttgcgacgtgcagtcgaacgttatcagggcaaggatataaacgggcgcagaatcaaactcgtagatgactccgaaggctatgccgggcgcaaaagtcgctctcgttcgccccgttcgcgttcccgctctccgcgttctcgtactcgttcaccgccttctcgttcacgctctcctcgttcgcgcagcgcttcgcctgctgaaaatggtcggtctcgttcccgatctcgttctcgctccccaactccaagtcgttcccgttctcgttcgccaaatgatgaaaagtgaaccaac

SEQ ID NO: 50215 - DNA, 500 bp, Heterodera glycines
ccaagtttgagatgaatctccgcgatcaattttccaccaacaaatatgttgcgcatcgcttcatgcagttgccaacgcacaacaaagtgcaggtggaatatgtgtggattgacgggtcgggcgaaaatgtgcgttccaaaacgcgaacagtggactttgtgccgtccaaagtcgacgatttaccggtgtggaacttcgacgggtcctccactggacaagcatcgggtgccgattcggatgtgttcatcaagccggttgccatgtacaatgacccgttccgtatgggcaaccataaaattgtaatgtgtgaggcattcgacaacaaaatgcagccccatgtgaccaacaaccgtgcgcgatgtaagcagacaatggacgcggctgccaaagagcacgcgtggtttggcatggagcaggagtacacactgctggacgttgaccagcatccgttcggatggcctaaggcgccgttcggcttccccgggccccaagggccttat

SEQ ID NO: 50216 - DNA, 484 bp, Heterodera glycines
gtttgagttacctaattactagtaattagccggcaaaaatgtcctcttccaacacaattttgttggactgcagcgacgacagtgccgtcgtcgtcggcttcgagcagtgcgccaccagcgaaggcggaggggcggtagaaccgcagcagaaactgactaagaatcagcagaagaagcgcgcacgcatggaacggttcaatgcggggaaagcggaatggagacggaagcaaagggagcggcataaggagcggaaacgcgcgcggaaagcggacggacagacggcgacggttgtgcacaacgacaggccgaacaaactgaacacgatgaacgagtccaaatgtcgcgttcgcgttgctgtcgacatggcctacgacgacttgatggacgaacggtcggtgtgcaaaacggtgtcccaacttcgccattgctacgcgtccaatcgccgggcggcggaccctctccaattttatgtggtcaatttgga

SEQ ID NO: 50217 - DNA, 613 bp, Heterodera glycines
atttttgccaaattttcgcaaatcaatctacaattacgatacctatttttaacttgcactaaaatttacgcaatatgtcgttgaacacggcgaatacgccggacggacgtggggttatcatttacagtggtgaaatgattttgcttttcgttcgcgaggttaatctttcttttgacaaattcactaacgccgcgttcaaaggcacaaagaagggcaacctttacctaaccacgcacagaatcattttcaataacactgaaacttcgtctcgcggcaatttcaagtcgttgtcaatgcctttcggatgcattcgaaatgtgaagttggaacagcccatctttggcgccaattatttggctggcgaattggtcgcacagccggacggaaattgggaaggagaagtgaattggaaattgacgttcaatcggggcggatgcatcgaattcggccaagctttgctgaaaaccagcgaaatggccaataacttttgtcctcggcccgcaaatgcgccgccgccgtacgctccgccgcctggcgcttattactcaccaccacccgcttattattggagcggaggccaattcaacggataccaggcgccggtccacgcgtt

SEQ ID NO: 50218 - DNA, 723 bp, Heterodera glycines
ctggagctccccgcggtggcggccgctctacaactagtggatcccccgggctgcaggaattcggcacgaggagagaatttcgctgagtgttttgctccaaattttcgtttcattcaaaaattgctgtctgtgctgcgaaaagttgcaggaaaatgtcatctgagtcaaatatggagaatttccccgtcaaattggacatggattatatcaaacggttggcacgcatcgaacggaccggccctaacacttttaatgccaattttcttgtggcaggctatcgcaaggcggtgaatagggacgttttcgggggacaaatgttcgcgcaggcaattgccgcggcagaagcaacggtggacggcgacgaatttgcaccgaacgcggcccattcgatgttcattagaaaagcattcattgaccatcccatcgaatatattgtcaccagaacgcgcgacgggcgttcattttgcactcggacagtcgaagcgcgacagaacggcgaaaccgttttctgtgcgcagatttcactttgcgttaaggaacgctcttccattgaacaccaaacagaaatgccagcggaagtgccggagcccgaggagttggtgccgttcttcgagacggtccgtcgagtggtcaccgaacacgacgagggcaggacggagcgtaacggacggaccatcgctaaccttcgcgcggtgctcgaggacgagcagcaaccgtccgtct

SEQ ID NO: 50219 - DNA, 775 bp, Heterodera glycines
cctcgtgccgaattcggcacgagggtttgaggttaaatggcaaggtcaccgctgtttttactttccatttttatttgcactgaatttgtcctttgtgcagtaaaatcgaagaatcttttgaatctaaatgaggaaaattggcgaaacattctcagcggcgaatggatgatggaatttcacgcgccgtggtgccctgcctgcaaagacctccaaaaatcatggaattcattcgctgattggtcaagggatttgaacataaatgttgcggaaatagacgtgaccacgaatccagggctttctggacgatttcttgtcactgctctgcccaccatttatcacgtgaaggatggcgtatttcgactttacgcgggaccacgcgacaaaaatgatttcatctctttcatcgaagacaaacgatggaccagcatcgaccccctcccgtcctacaaacatccggacagctctcaaatgggcgtagtcgccgtcttcttcaaactgtccatggcagtcagagacttacacggacattttgtcgaaaatgtcggtgttcccgcttggggcttcgtatgcattctttgccacagtgactctcgcgttgggctgtgtcctcggatttatcatcgtgtgcattattgactatgtgttcccaactggggcgcttaagaagaaggaagccgagcgaaggaaggagcaaccaagtgccaagaaaaatgcaaaagaaagcgctgagaaagcaaatgggcaaaaggaagttttatcggacgaaaagaaatcg

SEQ ID NO: 50220 - DNA, 831 bp, Heterodera glycines
gtccaattaagatcaaaggaaatggtctgttttccgccttctcttatgccgtctttccaatgtttttgtgcttcctcttcccgtctcttttgctcatctgcttttgttcgacccgtccgcgtgcgcttcgccccttcccccacgggggaacttcatttgggctccgttcgcactgctttgttcaattttctgtgggcacgtaaatacaacgggaaatttgtgttgcgaatcgaagacaccgacagagagcgattggtggagggatcggagcaaaggattgagcagaccctctcccactttggacttacacccgacgaaagtccgttgcgtggtggccaatttggttcctattaccaatccgaacggttgcctctttaccgggaattggctgatcagttggttgacatcggccattcgtacaagtgcttctgcagtcaagaacgactcgactttttgcgtcgaaaagcgaactccgaacgcattccgttccgttacgatggcatttgtcgccagctttcgacagaagaaacgcgagctcgggaacgaaacgaggaacaatttgttgttcggttcaaatttgacgggagaagggccggatttacggacatcgtattcggcgattatgaacattattcggaggagggcgattttgtgatcctcaaaagggatggatttcccacttatcactttgccaatgtcgtggacgaccgacggatgaaaatcagccatgtaataagaggagcggaatggatatgttcaacaacaaaacacttgcaaatttacagtgccttcggttggtctccgccacactttgcccatttgcctctgatc

SEQ ID NO: 50221 - DNA, 561 bp, Heterodera glycines
gtgtgctcagagtgagcgatttaaccaaagccaacgaaagagtacccttccgtttgctgaacctttccctcgcttctttggatgtgaatatgcgccccttttgcgactctgagggccattcggccgtccgattgcccggctttttgctcattttgtccggccaaattgtcctttcgcgccctttgcctccactgaatgcgtcgtcccttcgtttgtctctcactttggagcaaaactccgtttgggtgggccgaatttgtgacaaagggcgaagtcaaagtgcctttttatccgacgatttttgttctttttctctgtgctcccttctgccggacgcgtgcaattcgctggaggctttggcttccaaatatgctgagagtgatttccccctgcttttgccactgtccgatctgttcccgactgatcagccaattgctctcgtgccaatggccaatttcccattgctcgagggctattggaaggcgcctgcgcaaatccaagcggacgacggaaacgccatggaggaggaggaggacgaacagaatgagcagcatattctga

SEQ ID NO: 50222 - DNA, 475 bp, Heterodera glycines
cagatgttgaaacagggcgactcaaattgtcacagcaaaaaagcgtcagggagccgttacagtgaattatttgaatgcattcgggacaatttgctgactttcatcaaggccaacatgcgccaaatgctcttcgacaagatttccgctgtccttgttcttgacactttggaagtcccgtcaccttcggatccctttcttcgtgaaattggcgacagcgatttggatgactgtttccgggcaattgctgagattgccactgacgaattcgtcccccactcgcccgatgggccgtcccatattgtgcagggcggttgcgctcgcttcgtgttccgcaaactgttgcaggcggacctgggacggtgtgacggacaccgcctcagcgacttcctggccgaccttccggccgacaatttgtcctcctggaccagcatggactgcggatgttacaccctggtggaggtgttcaagagcgggt

SEQ ID NO: 50223 - DNA, 481 bp, Heterodera glycines
gacactttggaagtcccgtcaccttcggatcccttccttcgtgaaattggcgacagcgatttggatgactgtttccgggcaattgctgagattgccactgacgaattcgtcccccattcgcccgatggtccgtcccatattgtgcagggcggttgcgctcgcttcgtgttccgcaaattgttgcaggcggacccgggacggtgtgatggacaccgcctcagcgacttcctggccgaccttcccgccgacaatttgtcctcctggaccagcatggactgcggatgttacaccctggtggaggtgttcaagagcgggtcggacaaggcccgcaaggtgctcagacgggcgctcagtgtggccatgttgcagaattcgcatttgtccggcgccaagtctttgttggatttgctattgggcaaaggcaaagagcaaccgacgcgggaacattcggtggctaatggcggcggcgctggtcgaaaaa

SEQ ID NO: 50224 - DNA, 1286 bp, Heterodera glycines
gtcttttctttccgatgtctgaaattggtaatttcgaaataagaaatgtgtctaaagtcgaacgtatcggtgcacattcccatatcactggtctcggcttaaaggcaaatttcgaaccaatttttatttccgatggaatggtcggacaatgtgcggcacggaaggcagccggattgattgttcgcatgattaaagatggacaaattgcgggcagagctttgctaattgttggcgagccggggacgggcaaaacggcggtggccatgggaatttcgaagtcaattggcggcgatacgcccttcatttccatttcggccagtgaagtgttttccatggatctgagtaaacccgaagcattgactcagtcattccgaaaggcaattggagttcgaatcaaagaggagactgaggtcctttgcggtgaggtcgtacaactcgaaattgaccgtccccagtcgggtgccgggccacgagttgggaaattgactctgaaaacaacggacatggaagcaatttacgacattggaaacaaaatgactgaatccgtcatcaaagagcgaatcacggccggcgacgtcatccaaattgacaaggcaaccggtaagatttcgaaaattgggcggtcgcttgcccggtcaaaggatttcgacgcacttgggccccaggacaaattggtcgcctgtccgtcgggggaaattcagtcccgcgtggaaacggttaacacaatttcattgcacgacattgatgtgatcaattcgcgttcctccgggtatttggcggttttttcgggcgatacgggcgaaattaaaagcgaagtgagggagcaaattgacaaaaaggtgatgggatggcgggaggaaaacaaagcgcaaataatcccgggtgttctgttcgtcgacgaagtgcacatgttcgacctcgagtgcttctccttcatcaaccgttacatcgaatcggacctttcgcccattttggtgatggccaccaaccgcggcattgtgaacattcgtggcacttccgttgagtctccccacggcgtgcctttgttcttattggaccgcagccttatcatcaggacgtcgagttacaaagaaaatgaaattggagagatactgaaaatccgtgcttctgatgaactcgttgaaatggaggatgccagcatcgcagtgctcgtccaaatagcattggaaacatcgatgcgttactgcatgcaactcatttcaactgccgacattttacgacagagaagaaaaggcgaaaagacaaaatgtttacgtcactgaaga

SEQ ID NO: 50225 - DNA, 891 bp, Heterodera glycines
gttccttagactgtctcccgctttttccattgtcgcgcgttgtcccctgtgaatttggtggttcatccgtttgtcgctaggaagtgcgcctttttgtctacaccatctttgtcttttccatttcggcgtcaatactcatcattggcatctgctacaacgacgggagcgagcaacgacaagctgaatgtggacaaactgttcgaaaaaataaactttgaagtgcgcggtcacgacttcacagtcctcaagtcgtattcgctttttgttatgaatgtgtgccgtgtgttggacatcgatttcacttctcggcatcgtgctatgatcaatacggatcattccaagagtaaccgacccaaataccagcgatggttccagtggctgctgagcgcaaaatttgcaaagaaaaaatacaaattgcactatgaaacgcggacttatttgatggagttcgatgtgcatcacttgacgggaagcactgcgagtgcttttctggaatatatcgaaaggaatatacccgagggagtggccatgaaagttacatataccgagatgtgctttctgccagaaactattgttaaaacagtgatggataattagttctttgtcgtacatgataaaacattttatgattttcaacagtttgttcatgagctgataaattcatttttcgtaacaatccaatactgattggcatctcgattcacttctgctccgtcctttttcttaagtgtggtggaatatacacatttccgcctccagctgccggagtctcttgcgaagtcggttgcggtgtcgccgctggctttgacacggttcgccaactgttctgggaatccgctgtgctagtgattccagtcggtttggttctccaatttgaatccccttcattag

SEQ ID NO: 50226 - DNA, 814 bp, Heterodera glycines
agtcaacgtccaccgatattgagtttcaacatcatcgccatgtggcagtgcccgcctccgaattgacgccgtccccgtcgaccaccaccgcaacggccactgacgatggttcaacaacaacaaacgctgctgcggatatggaacaacacgaaaatgctgggcgtaaacggcacacaaaggaccggttccgctacggtaactacaaccgctactacggtgtgcgcaaccaaggctttgaccacgacccccgtgtcgacttgtttcccgtccaatggttccatgggcgtcgcgtgttggacattggctgcaatgttggccatttgacgcttgaaattgccaagaagttgggcccagcgcatattgtgggcattgacattgacgaccatttggtcggtgtggcgcgcaaaaacattcggcattattgtggcagcgcgcaaaagctgatcggcaaattccccgcctcactgttaccaccggcggaggaggcggaagcgtcgtcaacaaatgctgtcaatgacgacggcaaaagtgccacaaaaatggagtcggaaaatgggaaggaggaggggccatcttcgaccaccgcaaagcccgccgttctcccatatgggcaattcccaaaaaatgtgtggtttttgcgcgaaaattacgtgctcgactgtgacgagttccttgaaatggttcgcgaggagtacgacgtgattttggcgctgagcatcaccaaatgggtacatttgaactggggcgacgatgggctgaaacggttcttgcgtcgcacctttttgaaccttcggccgggcggacgactgctgtt

SEQ ID NO: 50227 - DNA, 1140 bp, Heterodera glycines
ccaagtttgagcagagccgggcccaaacacattctctcccgtgagcagcaatcagcaaaagctgaacacactccttcgaactcactgattatttgatccatctctgagagcaacttctgatcagccaaagatgccggaaagcgaaaacgacttcgatgaggaggcgcccaacgccaccatggagaccaaagtggcgggcggcggcgcggcgccgaagcgcgtcgggcgctggacgttgtcacagctgcgccagacggacggcatcatcccgtcccaggccggttggaacaagggagactcgcagaagttgatgaccaactttggtacgccgcgtaacaccaccaccaaagtcaaagtggagaatctggccgagattccggaggacattttgctgaaaagccacggggaggtgcgtctgcagtccggtaccaaccggttcgcctcccagaagggctttgtttcgttcggtaccggacgtgatgtgtgtcgtgaaggtgtgaatgtgaacatcctggccggccgacttggagccgcttgccgggaggagaaaatccgcgccagtgacggccattgtgcgtctgcaagccggtacgaacaaattcgactcgcagaagggcatgaccctgttcggtaccggacgtcgtgagaccaccagaatgaaggacagccaagcacccggagtactcgcacgagcgcgacattgacaacacggagattccgcttcagatgggtacgaacaaattcgcctcgcagaagggcatgactggcttcggcacaaaccgtcgtgagaccaccaaaatgttggacacctcgcacccggagtacagccacgagcagagcatcgaccagaccagcatcccctaccaaatgggatcgaacaaatacgcgtcgcagaagggcatgaccggctttggacagccacgttgggaggtgcttgacccgtccatttcgtaccagaaccgcaagtcgcaaggcatggttcgtctccaatccggcaccaaccgattcgcctcccaggcgggcatgaccggctttggcacgccgaggaacaacacctacgaggcggaggcgggcgagctgccttacgaggatatgaagaagtcggaggcgatcatcccgtcccaggccggatgggacagg

SEQ ID NO: 50228 - DNA, 829 bp, Heterodera glycines
gtttgccgtcctttggctgtggtaaaactgtcatttcgcagtcgttctctcaaatattccaactccgatgccattatttacgtgggctgtggcgagcgtggcaacgaaatgtcggaagtgttgcgcgactttcccgaactgacgatggaagtggatggagtgaccacgtccatcatggagaggacggcgctggtggccaacacttcgaatatgcccgtggcggcgcgtgaagcgtccatttacacgggaattactctggccgaatacttccgcgacatgggtctgaacgtggccatgatggccgactcgacctcccgatgggccgaggcgctccgtgagatttcgggccgtctcggggaaatgccggctgactcgggttaccccgcctatttggccgcacggctcgcttccttctacgaaagggcgggaaaagtgaaatgttttgggtcgcctgaacgcgaagggtccgtcactattgtcggcgcagtgtcgccgcccggcggagacttcgccgaccccgtcacatcggcaaccctcggcattgtccaagtgttttggggactcgacaaaaaattggcccaacgaaagcacttcccttcaatcaattggctcatttcttacagcaaatatatgcgtgcgttggacgattattacgagaagaattttgccgaatttgttccactgagaacgaaatgcaaagaaattttgcaggaagaggaagatttgtcagaaattgtccaattggtcggcaaagcatcgcttgccgaggccgacaaaatcactttggagctatgatcgcttctgtcccttctacaaaactgttgggatg

SEQ ID NO: 50229 - DNA, 1968 bp, Heterodera glycines
caaaaagttaaacttttcctcaacccgcgacaaaaaatgccaccgacgacaagagaacacattaaggaatcccaatatggctttgtttacggcgtttcgggaccggtggtaactgctgagaaaatgtccggtgctgcaatgtacgaactcgtcagagtcggccattctgaattggtgggcgaaatcatccgattggaaggcgactacgccacgattcaagtctacgaggagacttcgtccgtcacaatctgtgaccccgtgctgcggacggggcagcctttgtctgttgagcttggcccgggcattatgggctccatttttgacggaatacaacggccattgcacgacatttcagaaatgaccaaatccatttacattccgaagggggtcaatgtgaaggcattaaaccgtgcaaaacgatgggaatttatgccgaggaaagatttgcgagttggggaccacgtgacgggcggagatatcatcggaatggtgcacgaaagtgcgttggtcaagcacaaaattatggtggagccgaaggcgtgcggaacggtcaaattcatcgcccccgcaaggccaatacaccgtcgaagacaccattttggaagtcgaattcgctggacacacccaaaagcttacgatgatgcacatttggccagtcagaaacccccgcccgtccgccgaaaaattagcggccaatttccctctcctctgtgggcagcgcgtgttggacgcgctcttcccgtgtgtccagggcggcacaacggcaattcctggtgcctttggctgtggtaaaactgtcatttcgcagtcgttgtccaaatattccaactccgatgccattatttacgtgggctgtggcgagcgtggcaacgaaatgtcggaagtgttgcgcgactttcccgaactgacgatggaagtggatggagtgaccacgtccatcatggagaggacggcgctggtggccaacacttcgaatatgcccgtggcggcgcgtgaagcgtccatttacacgggaattactctggccgaatacttccgcgacatgggtctgaacgtggccatgatggccgactcgacctcccgatgggccgaggcgctccgtgagatttcgggccgtctcggggaaatgccggctgactcgggttaccccgcctatttggccgcacggctcgcttccttctacgaaagggcgggaaaagtgaaatgttttgggtcgcctgaacgcgaagggtccgtcactattgtcggcgcagtgtcgccgcccggcggagacttcgccgaccccgtcacatcggcaaccctcggcattgtccaagtgttttggggactcgacaaaaaattggcccaacgaaagcacttcccttcaatcaattggctcatttcttacagcaaatatatgcgtgcgttggacgattattacgagaagaattttgccgaatttgttccactgagaacgaaatgcaaagaaattttgcaggaagaggaagatttgtcagaaattgtccaattggtcggcaaagcatcgcttgccgaggccgacaaaatcactttggaggtggccaaactgatcaaggacgatttccttcagcaaaatggctattccagctatgatcgcttctgtcccttctacaaaactgttgggatgctcaaaaatatgattggcttttacgactttgcccggcactcggtggaaacgactgcacaatcggacaacaaaatcacgtggaatcagatcagagatcacctcggggacatcattcacgaactttcttcgatgaaatttgaggacccatccgaaaaaaacggaagatcagatcaaaaaggattacgaagaactgtatgaacggatgcagaacaaattccgagcgttagaggatgaatgaacaaactgtgatcaatgataacaatttctcaaaattttccctcatttctcttagtgtagtgatggaaaaaacgtctcagtgagta

SEQ ID NO: 50230 - DNA, 1681 bp, Heterodera glycines
aggcacattaaatgaaatttatggcctcgatggtggcgtcatttcctgtgtcatttttcctgtttttttctacggctctaatccacggcacaatgggaggccttttctggtcgaaaaagccggcggattcagcggacgattcgctgtggagccgataccatgatcaaaatgcaatggaagagttgttggagaaggtgcacagcaaatgccccaatgtcactcgtctgtacagcgtcggccgatcagtccaaggccgcgatttggcggtcattgaattttccctccatcccggacggcatcaaattttgaagcccgaaatgaaatacatcggaaatatgcacggcaacgaggcgatcggcagggaattgctgctgcgattggctcaattcctctgcgacggatggcggcaaggccaacggtcggtggtggagatgctcaattcgaccaacattcacattatgcccagcatgaacccggacggctttgagttgacgctgaagacaaagccggaacagcgcggatgggtcacgggtcgcacaaacgcgcacggggtcgacctgaacaggaacttccccgacttggacgcgatcttttacaaggccaacgcacaacggctgccgttctttgaccatttgctggaagtgttccacgactccgacaacggccaacagtttgagcccgaagtcactgcagtggccaattgggtgctttcgtggccttttgtcatttccgcaaatctccacgagggcgatttggtggccaattatccattcgacgaaagtctgaacccgaacgaacttcgcgcctattcaaagtcgcccgatgacgtcacttttcgatacatcgccgagacttacgcccgtgcacacgcgcacatggcgaagaatgaccacgcgccatgcgatgggacggcgggggacaatttcgcgagacagggcggcataaccaacggtgccaaatggtactcagtggcgggcggaatgcaggacttcaattatttgtccaccaatgccttcgaaatcactttggaattgagctgtgagaaaatgccggcgccggaacgactcccccaattttgggttgacaataaattggcattgttggaattcattcgtttggcacacattggcatcaaaggaatggtcagcgatgcacgtaacggtgaaccaattgcaaatgccgtggtgtgggtgagaaatgtgaccgacggagacggacaaacggccatcaaacacccggtgaccacgtggatcactggcgattatttccgtccgttggtctccggctgttaccaaatcgcggtggaagcggacggttatgaaattggcatcaaaacgctgaacatcagtcagaaggacgtgaaggaacgacgtccacacattgtgaacttccaattgcgtccgatcgaagttgaagtgccggaggcgcgaattggaagagaaatgggcgaggaagaacggggggaggaggagaacggaccactgacaccagaacaagcagccgaatttttgcaactcatccgaatgcaacagccggtgggcgtacggactgccaatgcgccgtccttctcacaatgaaacggaacaaaagagaaaagggatgatctcgacagaacaatggacagacaaaaagcagcagaaacgaagtgttggttgatatgatttgtgttgtgtgtacattt

SEQ ID NO: 50231 - DNA, 727 bp, Heterodera glycines
gtttgagctaattatggcacggaatcggccaaatgctaatatcataacgagtgatctcggcgaggcacaaataaaaaagcacaaaccaaaagacacgaggttactacaacagagactcgttgcatggcagcctattctgaccgctaaaacggtcattccgttggttttcagtataagcattttgttcatcccaattggaattgttcttcttcgcataagtcaatctgtccaggaatatgtcgttcaatatgtaaacgatgccaacgagtgcaaagactaccatgcgaatggccaatgcgcagtgaacttcactctgaatgaggacttcaaaggcgatgtttacttttattatgctctcgagaatttcttccaaaatcatcgtcgttatatgaaaagcagaaatgatcagcaattatcgggcattgattttttaaataccaaagattgtactcccttcgagaaagctccggacggtcgtccgatcgccccttgtggcgcaatagcaaattcattattcaatgattcattccaactcaattatcttgggcgtaatggcaatggttatgcaaatatttcatggagtcacgaagggctcgtctggccggtcgatttggagtcgaagttcagaaaccccacttgtgatggccagccatgcaaaacaatcgctgaattgtgtcacaaattttccttaaccgtccgaccgcccaactgggaaaaggacctctgc

SEQ ID NO: 50232 - DNA, 479 bp, Heterodera glycines
gtatgtatcagtttctttaaaatttgagaattaataattttgtgttcaaatgtccaacgacaacgacaaaagagatgcatcatcaattccaacgaatgcccttgttaacaaagaagagtctccggacggaaatgaagagaagaaaattttctgcggtgggataagctacgaaacatcgaatgaagatttggctgtttatttcgggcaatatggcaaagtgaaggaagtacaagtgaaatatgatcgagtgactggacgttcgcgcggtttcgcctttgtggagtttgatacggttgcagcatgtcaggcatcgctcgtacaacgtgaacaagtgataaaaggcaagcagtgtgagataaagccggccaaatcgagggaagttggctacatgaacaagaaggtatttgtcggtggattgcctggagatttcccagaagaagaacttcgaaagcacttcaaccagtacggcaaggtggagg

SEQ ID NO: 50233 - DNA, 964 bp, Heterodera glycines
ccctcaatacggcgtttctcagcccatatgtacgaaggaaccaacagaaaaggatttgagactaacgaaagaactcgagagttatctaagaagctctggcattttcgagtcggacttggacatacagaagagatttgatgtcttgaggaggataaattcgttggtcaaaagttgggtcaaacaagccttttttttataggtaccgcccgaacagttggacactgtcggtggcaaactgttcaccttcggttcctaccgtctcggcgttcatacgcccggggctgacatcgattctctgtgcgtcgtcccccgtcacatcgaacgcatcgatttctttacttcattttaccaaatgcttaaagaggatgaaaaaacggcggacctccacaaagttgaggacgccttcgtacctctgatcaaactgcgctacgatggcattgaactcgacattttattcgctcgtttggcgttgaaagaaataaaggaagaccaggaactctcagacgacaatttgcttaagaacttggacgagaagagcattcgttctctgaatggttgtcgtgtggccgatgaaattttgcgattggtcccaaatcgactgaatttcattttggttcttagagccggtaagctttgggctaaaaaccatggcatttattccaatgtgttgggctttcttggcggcatttcttgggcaattctcgtcgcccggacctgtcaattgtatccaaatgcaacaccttctgttttattgcagaaatttttcctcgatttttctgcatgggattggccacatcccgtcattctgaaggatgtcgacgctaccccgcggattgacataccctatttcattgacatgatttgggatccgagaacacgcgcatcggaccgctaccatttgatgccaatcattacgccagccttcccagaacagaattccacatttaatgtgacaaggtcaacg

SEQ ID NO: 50234 - DNA, 815 bp, Heterodera glycines
ataaaattcactgactgttctttttcaccttccttcaattcaacaaaatggcgaaatctgcaattgatgttaatcgcggcatcacagaagaccaaacagctaccataagaaattatttcacacaaccgcacttaatttacaaaactgtcactggagtgcgcgggcctttggtcatattgggcgatgttaaattcccacaatacgctgaaattgtgaaacttacactgcctaatggagaaaaacgcatgggacaagtactcgaagtaacgaaggacaaagctgtcgttcaggtgtttgaaggtacgtcaggtatcgatgcaaaaaacacaatttgcgagttcactggcgatattatgagaacacccgtttccgaggatatgcttggaagaatattcaatggatccggcacacccatcgacaaagggcccaatgttttggcggaggattacttggacatcgatggacagcctatcaacccatggtccagaatttatcccgaagaaatgattcagaccggcatttccgcaattgatgttatgaatagtatcgccaggggacagaaaattccaattttttctgctgcaggtcttccgcataatgagatcgctgctcaaattgtacgccaagggggcctcgtcaaacagccgaacagaaagaaggaaaatgaggtggagggtgacgacgactttgccattgtgtttgctgcaatgggtgtcaacatggagacggcgcgctttttcaaacaagactttgaagaaacggttccatggaaaatgtgtgcctttttcttaacttggctaaatgaccaaccatcg

SEQ ID NO: 50235 - DNA, 829 bp, Heterodera glycines
aattttcctataaatttattaattggactgcttttgctgttgctcaatttcgatggcagaggaaccagtgaaactgattcttgtcaccggcggagtgatgagcggcgttggcaaaggcattgtgtcgtcgagcatcggtgtcctattgaagggttgcggttaccgagtgactgtgatcaaaatcgacccgtacatcaatgtcgatgctggcactttctctccattcgaacatggcgaagtttttgtgttggatgatggtggcgaagttgacttggatcttggaaattacgaacgttttttggacattcgactgacacgggacaacaatatcacaacgggtaaaatcttccaccaggtcatccaacgggagaggaacggcgactatttggggaagacggtcaaaacggtgccgcacataaccgacgcgatcattgaatgggtggagagagtttcaaagatttctgttgatggcagcggaaagacaccgcaaatttgcattgtcgagctcggtggcacaattggtgacattgagggcatgccgtacacaatggctttcagcatggcatttcgccgcaaaacataccgtaatcgttttctgactgtgcacgtgaccaaattgttgcacgagtcgggcgaaataaaaacgaaaccggcgcagaatgggctgcgcagtcttcgcgagacgggcctttaccccgaccttttgctctgtcgttctcaaaaaccgttgacccaagcgctgcgctccaaaattgccagctttgcccaattggacatcaacgaaatcatcgacgtgtacgactgtcacgacattcacagtgtgccgttg

SEQ ID NO: 50236 - DNA, 1432 bp, Heterodera glycines
ccaaaccgatttggactcgcaatcccgatgacatttcaaatgaggagtatgcggagttctacaagagcttgtcaaatgactgggaggaccatcttgctgtcaagcatttcagcgttgaaggccaactcgaattccgtgctctcctcttcgtcccccaacgcgctccgttcgatctctttgagaacaaaaagagcaagaatgccatcaagctttatgtccgtcgggttttcatcatggagaactgcgaggagctgatgccggagtacctgaacttcatcaaaggagttgtcgactctgaggaccttccgctgaacatttctcgtgaaactttgcaacaatcgaagatcttgaaagtcatccgcaaaaaccttgtgaagaagtgcatggaccttttcgaggagatttctgaagacaaggacaacttcaaaaagttctacgagcaattcgcgaagaacattaagcttggtattcatgaggactcggtgaatcgtaagaagctctcagactttctgcggtactacacttcggcctccggcgaggaaccatgcagcttcaaggactatgtttcgcgcatgaaagagaaccaaacatgtatctattacatcaccggcgagtccaaggacgttgtccaaaactcctccttcgtggagcgtgtgaagaagcgcggcttcgaggtcatctacatggtcgacccgattgacgagtactgcgtccagcagctcaaagaatacgacggggaagaagttggtcagtgtgaccaaggaaggccttgagctgccagagagtgaggaggagaagaagaaatttgaagaggacaaggtcaagttcgagaagctgtgcaaagtcattaaggacatcttggacaagaaagtccaaaaggtttctgtctcaaaccgtttggtctcttctccgtgttgcattgtgaccggagagtacggatggtctgccaacatggaacggatcatgaaggcccaggcattgcgtgactcctccacaatgggatacatggcgtccaaaaagaacctggagatcaaccctgaccattcaatcatcaagtctttgcgcgaccgtgttgagaaggagcaggacgacaaaactgcaaaggacctcgttgtgctgctgtacgaaacttctctgctcacctccggcttttcattggaggacccgcaacagcatgcgtcgcgaatttaccgaatggtgaaacttggacttgacatccccgacgaggaggagccggccgagcaacagccgagcacttcgggcgagccgacaattgcggagaaaattgctggtgccgaagaggaggcctcgagaatggaggaagttgactgaatggtgacatcgtctatccattcttggatctcggctattcaatattttgattcattgtttttttgttttcttgtttgacataaatttgaattaaattttc

SEQ ID NO: 50237 - DNA, 1068 bp, Heterodera glycines
gtttgaggtagtgtaataaattcttattgtagtaaaaatgtccgaaaataagtccgaaggtggcgctgaaaagaagaagagcggtggattcaacacgaagaagtttttgttggacctcgcatccggcggaactgctgctgcagtctcaaaaaccgctgttgcacccatcgagcgtgtcaagctgttgttgcaggtgcaagatgcttccattcacatcaccgcggacaagcgctacaaaggcatcatcgacgtcctcgtccgtgttcccaaggagcagggctttctgtcgttgtggcgtggtaacctggccaacgtcatccgttactttccgactcaggcgctgaacttcgccttcaaggacacttataagcgagtcttcacgcaaggagtggacaaggagaagcagttcttgaagttcttcgccatgaatttggcttcgggcggtgccgctggcgccacttcgctgtgttttgtgtaccctttggactttgcgcgaacgcgtttggcagcggatgttggaaaggccgatgcccgtgagttcaaaggtttggccggactgcatcatgaagatcctcaagtcggacggtcccatcgggtctctaccgcggcttcttcgtctcccgtccagggcatcatcatttaccgcgccgcttacttcggctgcttcgacaccgccaaaatgctcttctccccggagggcaagcagatgaacttcttcgtcaactgggccattgcgcaggtcgtcaccgtgtcgtccggcgttctctcctacccgtgggacaccgtccgtcgtcgtatgatgatgcagtcgggccgcaaggacatcatgtacaagaacactttggactgtgccatcaaaatcatcaaaaacgagggactgctcaagggcatgttcaagggtgctttatccaatgtgttccgtggtactggcggtgcccttgttcttgcgttctacgacgaaatccagaaatatatccactgattgtgtgtgatcttcttagtatatttgtttgtgttgcgtcatattcggtcatttgggtaatgataaagaagataggtgtgttaaaa

SEQ ID NO: 50238 - DNA, 624 bp, Heterodera glycines
gtgatttaagaaggacggactcggaaagagcaaagtttaaataatgaaagaagctaaaaaccttagtgcttccttcggccgggcttttttctttggattcgcctgaattgtttggtcacaattcgccttccctcaccgaaaaccttcgtccgtcggcatgtccaccaggtcggccgcctcgtcctccaaaaactttcggatcgaagctctgacggcgtcgtcgctctcctcgttggcggcgatgagcttattcttggagaattcatccagcagtttctccgtttgttcgtccgcctgaaaatggccactatttcgctgactttgagcaccaaactcactttaacattcagacgtttgtcgccgatggggaagtccttgaggacactcagtgctttctttgctccgtctgggtacataaagtcgcaaaatccaaacgctttaaattttccgcctgagtcttggagacgtttccaattgcacacggaaccgcacttcttaagtaataaaggttttaagagaattaatttttacgaaaaacaagacctttagaacttcctgtatgattcggtccggacatttatcggaaatgttcccaataaaaactgttgtggtcgttggtggccc

SEQ ID NO: 50239 - DNA, 956 bp, Heterodera glycines
ttttgttttatttgtgctttttccacgctcaaagtcccattcattcctttgcttttgccgatcgattgatccgaacaaaacaaaatataatcgaagtccaagagaagacgacgtaaaggaatgccttcgggaggcgacgatgaacaacagtttgaggaggcggtcaaaccggcattggagtcccttttggcggatttgcaaaagaccaccgaagttcttcggcaaggcaaacatggcaaaggccgacggcaacagaaggaggacgaatccgccgctttgttggacttgaagaagcttcggaactctccccgccagcgaaaccaatcgccggcagcggtcgccaatttgcgaaacggaagaagcgaagagctgcagcctcgccgtgacccgatgcttgagggcgacaaattgggcatccacacgataccgaagggggactgtgcttcgtgcaaccaagcagtgattgggcccgtggtgatagcccttgggaagatgtggcatcctgaacatttttgctgcgctcattgcggagcattccattgaaaatcggaattttttcgagcggcaaggaaaggcgtactgtgaaagcgattaccacgatttattttcacctcgttgttcctactgtaacgggcccatcaaagaacgttgtgtaacagcacttggcggaaagaattttcacgtggagcattttgtttgcgccgaatgcggcaaaagcttcggagacggcggattccatgagaaatccaattccgcgtactgtcgcgattgtttctaccgtacttacgcgccccaagggcagtcctggcaacagccgatcactccccaaatcctcacggcactcaacacacattggcaccccgaatgcttttgctgccgggaggggggccaaacccttccctgggggcccccggttccaccattttgggccccccttctctggaaaaagggccctc

SEQ ID NO: 50240 - DNA, 600 bp, Heterodera glycines
cacagccgaaaagcgcttcttctcatcgccttcgccttcaaaacttagaagcaccaatcccaaccagaaaaaatgtgcgacgaagaagttgctgctctcgtggtggacaatgggtccggaatgtgcaaggccggtttcgcgggcgatgacgcgccccgcgcggtgtttccgtccattgtgggccgcccccgtcatcaaggcgtcatggtcggcatgggacagaaggactcgtacgtgggagacgaggcgcagtccaagcgtggtattctgacgctgaagtacccgattgagcacggcatcgtcaccaactgggacgacatggagaagatctggcaccacaccttctacaacgagctgcgtgtcgcccccgaggagcacccggtgctgctccaagaggcccggctgaacccgaaggccaccggagaaagatgacccaattcttggttcaaaagtttcacacgcccggccttgtacgtggccatcccagcccggcttgtcctttaaccctcgggccgaccacggggttctggttgaaccccggaaatggggtgcccccaccccggcccctttcacaagggttatccctttccccagggaatt

SEQ ID NO: 50241 - DNA, 446 bp, Heterodera glycines
cttttttggcatttcaatccttccaaaagcgcactttcggtgccaattccgtctgtttggtggtcagctgttcagtgacgatgcttttgctgatttgtttgccgtgccgagtgtagatcagaacctgcgcccttcggctgtcattgccttttccttgcccttcccctaattacttgcacattgacattgttcgggaagcgaatcggtgcccggtaatgaagggcgagagtgatcagaaggtgaaggatggccacaatgtcctaaactttggtcaataaccatcattgagcaaccactctctggcgataaaatccattaatcactctaaacaattggatgagccgtcgtccctctgattaatctcccgtccctcctatctgataaactaattgtttgatcagcgttcctctgatcattaattggttctgatcagtcgttctcattcc

SEQ ID NO: 50242 - DNA, 1135 bp, Heterodera glycines
gcaccaaatgctaacgcagcctcggctcaaacaacccaaccgcaggttatggcaccatcttatccgttggcttctctctatgtcggcgatcttcatccggatgtcactgaggccatgctctttgagcggttcagcaatgctggtcctgtgctctccattcgtgtttgtcgtgatgcaattactcgtcgttcgcttggctatgcctatgtgaattttcaacaaccggcggatgctgaacgtgctttggacaccatgaactttgacatgatcctgaacaagccaattcgcattatgtggtcgcaacgtgatccaagcattcgtcgctcgggtgctgggaacattttcatcaaaaacttgggcaaggaaatcgacacgaaggccatctacgacactttttccatgtttggaagcattctgagctgcaagattgccactgacattgagggaggaagcaaagggtatgggttcatccattttgagactgaggaagcggcgaacagtgcaattgcgaaagtgaacgggatgcttttggatgggaagaaagtgtttgttggaaaatttgtgccacgcactgctcgtgagaagcaaattggtgacccgtccagtcgtttcaccaatgtttatgtgaaaaattttggcgaggcaatggattcggagaagctgagcgaagtgttctcacagtatggcgaaatcatcagtgcaaaagtgatggaggatgacagcggcaaatccaaggggttcggctttgtcgcctacaaggaccatgaaagtgctgcgagggcggtggagaagatgaacgaggtttcggtgccaggcagtgagaaggtcgagcaaaagtttacggtgtgccgtgcgcagaagaagagcgagcgccaggctgagctgaagcgtcgttacgagcagtacaaagctgagcgcatccagcgttatcagggagtcaatctgtacgtcaagaacctgcacgataccatcaatgatgagacacttcgaagcaattttgaatcctacggaaacatcacaagtgcaaaggttatgtgtgatgagcatggtcgctccaaaggattcggttttgtgtgctttgaaaaggcggatgaagcaaccaaggctgttgtggaaatgaacaacaaaatcatcg

SEQ ID NO: 50243 - DNA, 2059 bp, Heterodera glycines
ggaaaatccttaaaatggcgcaagcagttgctgctgttgctcccgcacctaatgcaaacgcagcctcggctcaggcaacccaaccgcaggttatggcaccatcctatccgttggcttctctctatgtcggcgatcttcatccggatgtcactgaggcaatgctctttgagcggatcagcaatgctggtcctgtgctctccattcgtgtttgtcgtgacgcgatcactcgtcgttcgcttggctatgcctatgtgaattttccgcagccggcggatgccgaacgcgctttggacaccctgaactttgatatgatcctgaacaaaccgattcgcatcatgtggtcgcaacgtgacccaagcattcgtcgctcgggtgctgggaacattttcatcaaaaacttgggcaaggaaatcgacacaaaggccatctacgacaccttttccatgtttggaagcattctgagttgcaagatttccactgacattgatggaggaagcaaaggatatgggttcatccattttgagactgaggaagcagcgaacagtgcaattgcaaaagtgaacgggatgcttttggatgggaagaaagtgtttgttggaaaatttttgccacgttccgctcgtgacaagcaaattggtgatccgtccagtcgtttcaccaatgtttatgtgaagaattttggtgatgcaatgaattcggagaagctgagcgaagtgttttcacagtttggcgaaatcatcagtgcaaaggtgatggaggatgacagcggcaagtccaaggggttcggcttcgttgcctacaaggaccatgaaagtgctgcgagggcggtggagaagatgaacgaggtttcggtgcccggcagtgagaaggtcgagcaaaagtttacggtgtgccgtgcgcagaagaagagcgagcgccaggctgagctgaagcgtcgttacgagcagtacaaagctgagcgcatccagcgttatcagggagtcaatctgtacgtcaagaacctgcacgataccatcaatgatgagacacttcgaagcaattttgaatcctacggaaacatcacaagtgcaaaggttatgtgtgatgagcatggtcgctccaaaggattcggttttgtgtgctttgaaaaggcggatgaagcaaccaaggctgttgtggaaatgaacaacaaaatcatcgaaaacaagccgctttacgtcgcgcttgcgcaacgtaaggaagaccgcaaagctcaactggcctcgcagtacatgcagcgcttagccgcgatgcgcatgcagaaccctgctggcctcatggggacaatgtatgcgcctgccagcggtggatttttcctgccacaggccatccagaaccaacgtgctgcgccgttcatgcaaacaccgaatctgtccggggcacaaatgcgtggcgctgtccctcgctggaacaatatgggcggtttcaaccatccaatgcaaggctacatgatgggtccagctgttggcggtcagttcggcggtgctaatcaaattgctcgtggaggacctcgctccggtggtatgggtggtggcggtggaatgcgtcagtacgggggacaaccccgtcagcaacagaaccgcatgccgggcatgggcggaggtcatcagcagcaagggatgcgctaccagggacagccgaaaggaatgcagcaacaacaacaccagcaggctcagcaaccacaaattgcctattcgtcgtatccgcagcagcagagccgtggcatggcaccgcaaatgggcggcggaggcggtggaggagtcaaagctggccatgcgatcactgcaacacaccaggaaccgttgaatacacagatgcttaccgaggctgacatgaccggacaaaagcaaatgcttggtgagcgtctgtacgcgatggttgcgcgttgcttccgggacggtgatgtcgagaaagttggcaagatcacgggaatgcttctcgagatggagaatgccgagattttgctgttgcttggagacgaggaaatgttgcgtttgcgcgtggacgaagcagcaacggtgctttaccaggctacggggca

SEQ ID NO: 50244 - DNA, 1326 bp, Heterodera glycines
gttccgtttagcagaactatgatatttttgacttcgttttccaaacatccgttgtccgctgcctttcggttcttttcttctgttaacgaagtgaccctccaaacgcgtccctacaaactgttcaaactcgattcgggtccttcgacggaggtgcgactgacgcgggatgaggcgttggattattacagaaaaatgcaattggtccgacggatggagacatcggccaataatttgtacaaggaaaagcgtattcgcggcttctgccacctttactccggacaagaggcgtgtgccattgggatggtggcagcgactgacccgaaggatgccgtgatcacggcttaccgatgtcacggatggacatatttaatgggcgcgacggtccaggacattttggccgaactgacaggacgcattgctgggaatgtttacggaaaaggcggatccatgcatatgtacgccaagaacttcttcggtggaaacggaatcgtcggcgcacaagttccgattggggcgggcattgcctttgccatgaaatatcgccgccagaaaaacgtttgtttgacactttacggagatggggcggccaaccagggacagctgttcgaagcgacgaacatggccaaactgtggggattgccgtgcattttcgtttgcgagaataacggattcggaatgggcactcccgtggaccgtgcctccgcctcgaccgattattacacgcggggtgactatgtgcctggcatttgggtcgatgggatggatgttctgaccgtccgcgaggccactcgctgggccaaggagtactgtgacgcgggcaatggcccactgatgatggaattggccccttaccggtactacggtcactccatgtcggaccccgggacgagttaccgtactcgggatgagatacaggaagtgcggaagagcagggaccccatcaccagcttcaaagatcgcattgtcacggcgggacttgtcactgtttgaggaattaaaggacattgacaagaaagtgcgtcaggaggtggacgaggcggtcaaagtcgcactttcagacgaagttttacctccggaagcgctcttctccgatttgtatgccaacactccgccgcttgcggtgcgcgggacgactgccgacgcaaccgtcacacagccatttgtgagcacggcggaagtgttgagaaaaatggggagggagccgaagaattattgagagaacgaatagccaaagacgcattgatagttaggagaagcacagaataattaattgtttcattatatttattcgaagcaaactctcagaggaagaaagagattcctttt

SEQ ID NO: 50245 - DNA, 420 bp, Heterodera glycines
ttagattagagtgggttgagtgatatgcatatttacaaagatccttatgctcctccgttggctccaaaagtgcctgttgatccaccgccatggtttccttcgtggaaaagaatacaaagggcgaaccgaatggtgggcttctcttggatacaaagaccttgacctgaagcgtggcttgacaactggtttttatcctttttttgaggaaagggacattcgttatgttgattcgaaagtgcctgatggaacttcgatggtcgggccgcaagggaaggacagtcgctaccaccaaagtaaaatggtcaaatggggaattcccggaaagtttgaagacttccagaagcagatcagggagaactgttcgcaatacaaacaaatcgctgaaaaatgggacctcagtgacgagcacccgggcattgc

SEQ ID NO: 50246 - DNA, 1257 bp, Heterodera glycines
cacatttttacgggcgaatttggccgaattggggcctacgagaaacagaggccgccatttgagccgaagaatccgttcctggccacacttacgctcaatcgcgagttgcactcagtggccagcgatcgttcgtgtcggcacattgagttggcggtggacaaggcgttgatccgctacgagaccggcgatcacattgccattttcccgaccaatgacaccgaaaaggtggacaaattgggcaatctgttggtggttgagttggacacggtgttcaagctggtcaacacagacgaggagagtaccaagaaacatcccttcccctgcccgtgcacttttcgaacggccctgacccattacgtggacatttgctctccggtcaaatcgcatgttttgaaagcgctcgtcgaagtttcggcggacgaagagacaaaggcaaaacttacgctgctgagcacggcgtcggaggagggattgcgcgagtacgcccaattcatcgtgaaggagcggcgcagcattgtggacgtgttgcagcacttccccgcctgcaaaccgcctttagacctgctgcttgaactgctcccgcgtctccaggcccgctattacagcatttcgtcgtcgccccgcgtggacgcgtcactcgtcgcggtcactgccgttgtgctgcgctacaacacaagcgacgggcgactggtcaaaggcgtgtgcaccaacttcttggcggaccgtgccccgggcgtgtccaccgcgccggtgttcgtccgcaagtccacgctgcgcttgccccaccgggtgcagcagccggtgatcatggtcgggcccggcaccggcttcgcccccttccgcggcttcctccacgaccgattgtggcacaaacagcagggcaaggaggtgggcgagatgcacttgttcttcggctgtcgtcacccagaccatgaccacatttacaaggaggagatggaggaatttgttcgggtcggtctgctcacccaattgcacgtcgcttactcgcggttgggaagcgaaaaagtttatgtgcagcacaaactgtgggaggcgcgacaacaaatttgggagctgatccaagcgggcgcttctgtgtacatttgcggagacgcgagaaacatggcccgggacgtgcagaatatgttttacaaaatttttgccgaagttggaggactcagcgaccaggaatcgcagaagatgatgaaagacatggagagacagcgacggtaccaagccgacgtgtggtcatgagag

SEQ ID NO: 50247 - DNA, 483 bp, Heterodera glycines
gttcggtgtatcaaagatcagaatgggaatcatgttgtgcaaaagataatcgagcgtgttcagccgcaccagctgcagtttatcatcgacacgatggtcaacggttttacggactcggtcacttccctctccgtccatccgtacggctgtcgtgtcatccaacgtgtgcttgaacactgcacggagggacaaaaacggcctgtgctggaacaactgcatgagaatgtgctcactttggtcaccgatcagtacggcaattacgtgatccaacacgtgattgagcacggactgtttgacgatcgggagcgcattgtgcgcgctttgcatggagacatcctgaaatatgcacagcacaaattcgcctccaatgtcatcgaaaagtgtctcatttgcgggacgacagaccaaaagaatgcgctgatcgacgaagtttgtgcggacaacggttcttccaacccacccctcttggagatgatgaaggac

SEQ ID NO: 50248 - DNA, 903 bp, Heterodera glycines
caagtttgagatggcccgtcgctatgatactcgtacgacaatcttctctccagaaggccgtctctaccaagttgaatatgcaatggaagcaattggtcaggctgggacttgtcttggaattcgagctcccgatggcattttcattgctgcacaaaaactaacggcaaacaaattgcttgatgatcgaatcatgagcgagaaaatctacaaggtgtcggcgaacatcttctgcacggtggcggggatcaccagcgacgcgaatgtgctggtcgacaaattgcgcgaaatggcggtgatgaacactttggatttcggagagaacattccggtggaacagctcgtgatcagactgtgcaacaccaaacagcactacacacaagttggaggtaaacgaccctatggagtgtcacttctctatgccggttgggacacgcaccacggctttcagctctaccaatctgaccccagtggaaattacggtggttggaaggcgacttgcatcggaaagggccaccaaaatgcactttcaattctcaaacaagagtacaaggacgaggacatgacgctggaaaaggccaaggatttggcgatgaaggtgctctccaaaacaatcgaagccaaaatgttgcccgagcagttggagatggctcagctcacccttgacgaaaagggcagacccgagttgcgcatactcgaggaggcggaaaggaagcaactgaccgataaatgggaagccagcgaagaggccaaacagccgtgacgggaaaaattgtgttgtgctttggggcacctttggtcggactttggctcggctaatctatatgttttgtttatttgcgccttgatttgatagaaaatgaattctatgtagaacgcaaaaaccgatgggactgaacaatcaat

SEQ ID NO: 50249 - DNA, 622 bp, Heterodera glycines
cttttttaccgtccatgcgtcgttttgataaccgtagcagtggcggcagattcgccaagatttcggcgaacaaaagagggtgcgcgctcaaccgagtcgacatatcgaagctgaacatcaatttcgaaagcccaaaatggcaggaaaggaaagaggcattggacgcactgcaacaattgttgttgcaatcgccgcgacttgctgatttgccaaattaccgggagctaatcggacgcttaacaaagattatggcaaatgatgcaaatatctttgtcgccgcaagtgccaccaaatgtgtgatgctgttcgccaaaggattgcgtgccgaattcacgcctcacgtgtcgttggttgtcccggtgatcttcgacaagttcaaagtggagaaacggttgctcagagatgctctcgtcgagtgcatcgatgtcatcgcagcatataccagtttcgaccacctaagcaaggccttgctcgaggctatgacctccaaacagaatccgagtcagaaatcacagacggatttgttcatctaccgcctgttccgttctcttccggccgaagacgttcccaagggtttgctgaaggatttggtggccattctgagcaaacatggctttgatgc

SEQ ID NO: 50250 - DNA, 503 bp, Heterodera glycines
gcaatttgaaaacagaacataattcacttcttcttctgctaaaccctccgcaacagaagtcaaatttcagaaaagaaaatgcacgaagcgaaaattataggcggaattgcttccctttgttcgctggccgcgattttggccactctcgtggtgatcccgcaactgtacactcaaatcaacgaaatgaacaaccgcgtgatggacggtgttcaagctttccgcgtgaacacggattccgcgtggactgagctgatggaggtgcagatcagtgtcactccgccgacccgtccgcgagagaatcccttcaactccattttcctacgccaaaagcgccagggattgcctccccaatgcgtttgccaactgcagcagccaagctgtcctcctggtcctcctggcccgcctgggccccccggaacacccggcgagcccggcggcgccgggcagccgggaagcccaggacagcccggacaacaagcaccgccatgccctccgcccgtgtc

SEQ ID NO: 50251 - DNA, 482 bp, Heterodera glycines
cgacaaccagcgcagcctctcactgatgatggcaccggcaacttcttcctgagcgcatatgccatgtcagcgcagaggatcgccagcaattcggagtggaagaaaacgcccctcggacaaactggcctcttcaatatgggaaatacgtgcttcatgaacgccactcttcagccactgttccatacgcccggattttctcaactgttccaagaaaagagcgcgcagcgattcgtcaatgggaacaactcgtttggcacgaatgggatgatctccggctcattctctgcgctcatcgacctgatctggtctggcaagttcaacgcacttcggcccaccaccttcctggaattcttcgctcgccgtgtcaacaccgaaatggccgaccgacggcagcacgacgcccaagaatttcaactctatctgctggacgcgcttcacgaggacaccaaccgggtcaacaagcgacaatcgtttgaacagaa

SEQ ID NO: 50252 - DNA, 931 bp, Heterodera glycines
ccccgtagagcttgtcaattaattgcttgcaaatttgccgatggctgctatagacccgaaggatttcttcaacaagtttgccaaaccgagcaaaggtgccggagtcggcgctggcttgatgactgcagctgcggtggccggttatgcgctgtacaagtcgatgtatacgattgaggctggccatcgtgcgataatgttcaaccgaatcggtgggctcggcgacgaggtgtaccgggaaggactgcactttcgcattccatggttccaatatccgattgtctacgacattcgtgcacgtcccaaccaaattcggtcgccgaccggcagcaaggatttgcaaatggttaacatcgggcttcgtgtgctgtcccgaccggacccggggcagctgcagacgatctgccggatgctcggcaccaattgggaggagcgagtgcttccgtcaatttgtaacgaggtgctgaagggcgtcgtggccaagttcaacgcctcccagctgatcacccaacgtcagcaagtgtctctgctcgtccgaaagggtctgattgagcgtgcgttggacttcaacatcattctcgacgatgtggccatcaccgagttggccttctcgccccaatacagtgccgccgttgatgcaaaacaagtggcggcacaggaggcgcagcgggccagtttcatggtggagaaggccatccaacagcgccaggagaaaattgtccaagccgagggagaggcgcaagcggccaaattgttgggcgagtcgatgaagaatgaccccggcttcctcaaactgcgaaaaatccgtgcggctcagaaaattgcgcgtttcattgccaactcgtcaaaccgcgtctatttgccttcggacggacttttcttgaacttggccgacgaagactatttgagtttggcgaccaacaaagggcgccgt

SEQ ID NO: 50253 - DNA, 656 bp, Heterodera glycines
ctgcgaccattaatcatatatctgcaagcaacggaaatgatcaaaaacggcgacatttggcaagtggaaatgagccgttgcaacgcttcggagaggcaaaaaaatggatgactgatatctatgggcaattggatggacatgttggagagttactcgaattctatttgggtttggttaaaaacggacaaaaatttgttcctcccgctcaaattgatgaaattggacattttcgcgactcagtaagggcaattcgtgaagtaatcgggcgggacaagatgaaggtcgtcttcttcgggagaacaagcaacggtaagagcagtgtgatcaatgcgatgttgtcatgccgagtgttgccccaggggatggggcacaccacttgctgtttcttacaagtggaaggggggtcggagcaggacaagtacttcatgatggaagacggggcgaagcactttccaattgctgaattggattcggttgggcatgcgttgggctcggaaggcatgggctccctgggacgcgactcgctcattcacattttctatccaaaatcggcgtccaaattgcttcaaaatgatgttttgatcgtggacagccccggcgttgacctcagtcccgagtttgacagttggattgacaagcactgtttggatgcggat

SEQ ID NO: 50254 - DNA, 645 bp, Heterodera glycines
atcagagtgtcaggtgacgatgtgatcattggaaaaacaattgctttgccggaggtggaggacgagttggaagccagcacagcgcgctactctaagaaggatgcgtcgacaacacttcgaagcagtgagacaggcattgttgaccaggtgatggtcagtgtcaacgcggagggcaacaaattcgtcaaaattcgcgtccgttcaattcgaacacctcaaatcggggacaaatttgcttcacgtcatggtcaaaagggaacaatgggaatgatgtacagacaagaggatatgcctttcacatgcgagggcataacgccggacattatcattaatccacacgctgtgccgagtcgtatgacaattggacatttgattgaatgcctccaaggaaagctttctgcaaacaaaggcgaaattggcgacgccacccctttcaacgacacagtcaatgtgcagaaaataagtgctttgcttgagggctacggctaccaattgcgtggcaatgaaataatgtacaacggatttaccggggcaaaagttgagcacacaggtgtttctgggcccaacttactaccaacgggcttaaggcacatggtcgaggacaaaattcactcacgcgcccgagggcctgttcaggggatgaac

SEQ ID NO: 50255 - DNA, 632 bp, Heterodera glycines
actgtaccggcttcacacttcgaccggtggccggccttctaagttcccgcgattttctggccgggctggcattcagggtgttccattccacccaatacattcggcattcgtccaagccccactacacacctgagcccgacatttgtcacgaactgttgggccattgtccactgtttgcggaccccgattttgcccagttttcccaagaatttggactcgcatcgcttggcgcctccgatgaaatggtggagaaattggctacgctctattggttcaccgtggagttcggcatttgcattcaaaatggggcaaaaaaggcgtacggtgcgggactgttgagctcatttggcgaattggaatatgcgctcagcggacagcccgaattggctgcgttcaacccgccggagacgtgccaaaccaaatacccgatcactagctaccaacccaaatattttgtggccgaatcgttcgcggatgccaaaaacaaactcgctacatggtcaacgagcataccaagacagttccaagtcaactacaacccatacacacaacgcatcgaaatgttggacaatgagagtgcagcaaacaagcttgtccgggatgtgaaaagccaagtttcaaagctcgaagaa

SEQ ID NO: 50256 - DNA, 481 bp, Heterodera glycines
ctcaacccgtgggagaagcagcaaccgaacaacaacaacaggcaaaacaagggcaaggagaacggcacacgccaaccccaggctatgcctgtcggctgggtgctcggcgttcgttccaaaaccacgtccataaatgaagatgccggaccaagccatccgtcgacctccgacgctctctcaacaacggtcaagccaccggcatcgtcgtcgtcgattgccagcgttcttcctcctcatccctctttctcattgattcaagaaaacgggttcgaacagcgggtgtacactgattggaggagtcagtgcaaaaaacagcgtgaggcacttggctacgacattcccgagatgcatacgctctatcggttttggtctctgtttttgcgggacaatttcaacaggtcaatgtacaacgagttccgtaaatttgcactggaagacgctgaccatggccttcggtatggcattgaatcgcttttccgtt

SEQ ID NO: 50257 - DNA, 368 bp, Heterodera glycines
gagaatccctgagtcgtttaataattgtagtcagtaaagacaagatttatttaacgaaggacaatgccgcgccaaataactgatattaagcaatttctgctgactgctcgacgcaaagacgcgaagtcagtcaagatcaagaagaacaaagagaacaccaaatttaaggttcgctgtacgcgctttctttacactctcgtggtggatgacaaagagaaagctgagaaattgaagcagtctttgcccccagggcttcaggtcaaagaattgaagtgattgacgcacgaaaattgcatatggttttttgttttgtttttccattttattctcgataaactgttgtgttaaaaatcagcttcccatcgacg

SEQ ID NO: 50258 - DNA, 637 bp, Heterodera glycines
gtttcgaacggatgactgaaatccaagccaaaagcatcccgccccttctggagggaaaggatgtgctcggatccgcaaagacggggagtggcaaaactttggcatttctcattccgtcgattgaattgttgctgagaaatgggtggaaacagcaacaaggcaccggtgttcttattgtgtcgccaacacgcgaattgtcaatgcaaacgtacggagttctctatgaattgatggagaaacacccgaacatttcccacgggctcgtgatgggcggcgcaaatcgccaaaatgaggagaaacgactcgctggaggcgttgccattctcgttgcaactcctggccgactgctcgatcatttgcagaatacatccaattttgtcgtgcgcaatttgaagtgtttaattgtcgacgaggcggaccgaattttcgacattggatttgagcaggaaatgcaccaaatcgtcaaattgttgccaaagaaacggcagagcatgcttttctccgccacatgttcgcccaaagttgacgagttggtaaagactgcgctgaaaacggacccactgaaaatcggagtgatggagcagcaaagggacccaaatgacatggccacggttgaggggttggagcagggttacgt

SEQ ID NO: 50259 - DNA, 784 bp, Heterodera glycines
gccattgtgccgttgctgactttttcagtctttttctaattagaattgcttggtcatcttccaattagttttaatggtcagaacatctctggaaaatacccacagattggataaaataccaaccacttggtgcaagcattgagggatcgaggatttttgcattcaaaacaccacttttgcccgagttgcaaacatcaatcccaaaggagtgtcgtttttcaactttaactttattacaacagttggctttctctaatcgttcattgggacttgtgattaactgcaataatactaaaagatatttttgtcgaagagacatcgaagggcttgggatttgctacaaagaaataccatgtccaggccgcggctttctgtatcgtactgatgccgtaaaaactttcataaaaacaatagacgactttttggaacttaacagtgacaatgatttgctaattgcggtttgttgtagcaatggaattaaccgttctggctatttgatttgtaactatctcatcaatcgacttggctggagttctcatgatgcattgaatgcatttgaaagtgccagaggttattccatcgagagagggtcatatgttcaagcattacacaaagtcgacagagaacgtcgttctaaaacgatgccgttcggtttggacagaagtgagcatgaaatgggaaatgacgaagcacttcccgcgaagactgaccaattattgcctggcattagcgacttcaacccacaattgacagcgcaaatgatgcaacaattcttcaacatgga

SEQ ID NO: 50260 - DNA, 471 bp, Heterodera glycines
gagatggaatcgtatgtgcaagttgaagatcaagattcgagggactccggcatttcgttggctcaatccaccacctcgcagcaaagctgttttgccaaaatttattttccaactttgttcgacttcgggttcaaggttcgggaattgtattcgcttgacaccgttgaacggccccaagttccgcacaaagccttccgcagcattaacgccgatacgatggccaaccttttggggtcactaacagaagaacagttccaacggcggttcattctgatcgattgtcgctatccttacgaatacgatgcgggccacatttggtactcactgaatttgtgggagaccacttccattgagaagctcttctacccagaagaggaagaacggttcggcgaaattattgtgcgaactcccatcttctactgcgagtactcgcagaaaaggggacccaaaatggctcttgcactgcgagaa

SEQ ID NO: 50261 - DNA, 491 bp, Heterodera glycines
tgacagaagaaatttcgggcacggagcgtgtgtatgcactgtcggtgaacgtcggcggcttcctgaaccacgtcatcttccgccgacacaagggaatgttttccgtggacctcaactccgacaagggcttccgaacaatcgaacgattcgtcgacaattatctgcgcaccggagtttccgtcaccactcaacaatacgtcgctctcatcagggccgtgccccgcgcgcactgggagctgtcgcacacttcaatcatcctgggcaatgaacttggccgcggcacgttcggggtcgtcaagagtggcgtctacgtggatcagcaggggactcgagcggcggtggccatcatagaggtgtctcagacgagcaccaaagagcaaatcaaggagttcatgaatgaggcgcgagtcatgcggcagctccgacaccccaatgtcatccagttctacggcgtcgcggttggccaggagcccctgatgatcgtcatggag

SEQ ID NO: 50262 - DNA, 884 bp, Heterodera glycines
  unsure (1)..(884): unsure at all n locations
cattttgttcccaatcagcaaaccataatattccttgattctctacattttcctacacaaaatgggccgggagcatcgttctgaccgcaaacgagactatgagaaagagcacagtccgttggcggacgaatcgtcgagtggcagcagaaagaggacaaaaagggagaagaaccgaagtgtgagcccggcgcgttctcgttcccacacttacagtccgtcaccacgccgagaaatttcgccaaagcgccgcgctcgaagtcgttctcgctcgcgtgatttgccctcctcacgcggtggtggtggcggcggcggcggttactacggctcgcgtcgtttccatgacggacgcgacaacccaaatccgaacccatgcttgggcgtgtttggcatgagtttgcataccacggagcgcgacctgaagcatttgtttggccgctatggcgaggttgattcggtgcaaattgtgtacgaccgtctctcgggacgctcgcggggctttggctttgtctacttcacacacaccaaagacgctgcgagggctaaggaaaatttggtggatgcagtgattgatgggatgaaagttcgtgtggattattcggtgacgcgcggcggtggaccacatagccgtcatgtgcgcaaaagcttctcgcgcagtccggtgcgcaacaaccgtagccgcacgcgcagccgttcccggtccgagtcgcggtcggtgtcgcgttagaaaggtgaaaagtgctaatggtttggagaaatgaatgaatgatggatgaggatgaattgattgattgacaatgattttgatccgctttttgtggtttagtattattgggctgtcgaatcataaagaacacataacgtnaagaataaaacaccggagatat

SEQ ID NO: 50263 - DNA, 579 bp, Heterodera glycines
  unsure (1)..(579): unsure at all n locations
ttcagaccttcactattttcttgtttaaaaaagttgcaacgatggtcgaaaccaaaggttggcatcaacggttttggacgtattggacgcttggcattgcgtgcagcgattgaaaaggacactgtccaagtggtggcggtcaacgacccgttcatcgaactcgactacatggtgtacatgttcaactacgactccacccatggccgtttcaagggcaaaatttccacaaacgccggcaatttggtggtggagaaggaggggaagagcgcgcacaccatcaaagtgttcaacctcaaagacccggtcgaaatcanatggggcgaagcgggcgcgggatatgtgatcgaatccaccggagtgtttaccaccattgagaaggcctctgctcctcttaaaagcggtgccaagaaagtaggcatcttccgctccgtctgcggatgcccccgatgtacttgaatgggcgtccacgaaggacaagtccgacccgggctaaggacgaacggaatcagcattgcggtcgggcccaaccacttggtttactccctttgcgcaaaagggaccacaaacgagtttggcatc

SEQ ID NO: 50264 - DNA, 1024 bp, Heterodera glycines
ttggcacaaacgcttggcctttcgctacgaccgcctcctccatctgacaaactttttcgtcttgtggcaatagctaaacaatttgtggaagatcccgagtctaaagaacgggagacaatcttgcaggtgttgttttgatgactgactttttccttttatgaccatttatttcattgacaaaaggtcggtgggtttgagtctgctgggcttgacttggaattcgatgctgatgttgtcccgacaagccctgaaccaagtttgtacgaaactgtgtacctcaccacacacaaggccccgtgtcgggcggctgctttctctccagatggagctcttgtcgccacggcctccaatgattgttcaattaaaattttggatgtcgataaaatcatttccaggattgacgtgactctgagtgagtccggccccgacgcccatcacccggtcattcggaccctttatgaccacctcgatgtgacaacaaaaacactttacgaagaatcgttggtctttttgctaggaagtcacttgcgttgctttccatccccgcgagtccgtcctcctttcgggcagcaacgattttacgctgaaaatgttcgattattcaaaaactgcggttaaaagggcaatgaaaacgatcacggaggtcgagccgatcactgcggtcagttttcatccgagcggagagttttttctatgcgcaactcggcatccgaccttgcgtctttatagtgccgaaacacagcaatgctttgtttctacaataccgaaggaccaacattctgattccattacggatgtgtgctattcggaaaatgcgcgaatgtttgtcacgggaagtcgtgatgggaatgtaaaagtttgggacggagtttccaatcgatgcattgagacttttacccgcgcgcatgacggagccccgatttgcagtgctcagttcactcgtaatggaaagtacgttctcacagtaggaatggacagtgtgcccaaattatgggaattgtccaccaatcgctgtttgatcgct

SEQ ID NO: 50265 - DNA, 928 bp, Heterodera glycines
gaccaccagaatgaaggacagcaagcacccggagtactcgcacgagcgcgacattgacaacacggagattccacttcagatgggtacgaacaaattcgcctcgcagaagggcatgaccctgttcggtaccggacgtcgtgagaccaccagaatgaaggacagcaagcacccggagtactcgcacgagcgcgacattgacaacagggagattccacttcagatgggtacgaacaaattcgcctcgcagaagggcatgactggcttcggcacaaaccgtcgtgagaccaccaaaatgttggacacctcgcacccggagtacagccacgagcagagcatcgactagaccagcatcccctaccaaatgggatcgaacaaatacgcgtcgcagaagggcatgaccggctttggacagccacgttgggaggtgcttgacccgtccatttcgtaccagaaccgcaagtcgcaaggcatggttcgtctccaatccggcaccaaccgattcgcctcccaggcgggcatgaccggctttggcacgccgaggaacaacacctacgaggcggaggcgggcgagctgccttacgaggatatgaagaagtcggaggcgatcatcccgtcccaggccggatggaacaagggcgactcgcagaagctgatgaccaactttggcacaccgcgtgacgtgaagggcaaacatttgaagcgcatttgggaattggagtacccggaggaagccgaagtgtcgctggaccgtctctgatcagcgacacggattgaattgtgctgctgatcagcacatgaatacacacggaggaaggaggagtaggacaaatgccatcgtcctcatcaagttggagcagtacacacccaccacaccgtcatcctttgccgtccggagagtgatcgatccattgtttgatagattgattga

SEQ ID NO: 50266 - DNA, 609 bp, Heterodera glycines
tcttctcatcgccttcgccttcaaaacttagaagcaccaatcccaaccagaaaaaatgtgcgacgaagaagttgctgctctcgtggtggacaatgggtccggaatgtgcaaggccggtttcgcgggcgatgacgcgccccgcgcggtgtttccgtccattgtgggccgcccccgtcatcagggcgtcatggtcggcatgggacagaaggactcgtacgtgggagacgaggcgcagtccaagcgtggtattctgacgctgaagtacccgattgagcacggcatcgtcaccaactgggacgacatggagaagatctggcaccacaccttctacaacgagctgcgtgtcgcccccgaggagcacccggtgctgctcacagaggccccgctgaacccgaaggccaacagagaaaagatgacccaaatcatgttcgagacgttcaacacgcccggccatgtacgtggccatccagggcctgctgtcccttgtccccttcggggcggaaccaccgggtttcgggttgaactccggggatgggggcaccccaacccgggcccctcaacaaggggtatagccttgccccaagcattctttcgtttggatttggcggg

SEQ ID NO: 50267 - DNA, 468 bp, Heterodera glycines
gtgatacatcgccaaccagtggagccggcttcttgcaacaactgcttgacttcttaagtgccgaaaactatggcgaattggcaaccattgttggtcgttattatgccatggaccgtgacaaccgatgggagcgaattaaggttgcctacgaggcattggttgccggagagggcgaaaagtgcgaaccggcgaatgctgtacaattggtgaacgagcgctacgcaaaccaacagactgacgaattcctgacgcccatcgtgttttcggacgaagcgcgtgtgaaagacaatgacacattggtctttttcaattatcgtgctgatcggatgcgtgagattaacaagtgcatgggtgatctgcaaaacctgcaggatttgggcaccaatgttgcattgccgaacggactgcacatcaaaacgatgacacagtacaacgcagagtttccattccccattctgttccctcccg

SEQ ID NO: 50268 - DNA, 453 bp, Heterodera glycines
ttagagcacttaaatggcactgaaacgtatacaaaaggagctgcaggacctcggccgtgacccacccgcccagtgcagtgctggccctgtcggcgatgaccttttccattggcaagccaccattatggggccaccagaatcgccttaccagggcggcgtcttctttctgaccatccacttcccgacagactatccgtttaagccaccgaaggtggcgttcaccactcgtatttatcatccgaacatcaacagcaacgggagcatttgccttgatattctgagatctcaatggtctcctgcactgactatctccaaagtcttgctttcgatttgctctcttctctgtgatccgaatcccgatgatccattggttccggagatagcacgcatctacaagacggatcgtgaaagatacaatacgttggcgcgggaatggactcagaaatatgcgat

SEQ ID NO: 50269 - DNA, 1247 bp, Heterodera glycines
gtccgaccaaattttccactcattttgcgtccaaaacattccatccaaaaatgaccatttctgcgcccgctgacgttgacaagctccaggatgcggccaaccgaatgcgcatttcgtccattgagcagacgtgcgccgccaactcgggccacccgaccagcagttgcagcgcagcggaaattgtggccactctgttctttgccgaaatgcgttatgacgtgaaggacccgcgcagcgcatccgccgaccgtttcattctgtccaagggtcacgcttgcccaattctgtacgccgcttgggaagaggcgggcctgctcagccgtgaccaagtgctctccctgcgcaagattgactccgacattgagggacatccgaccccgcggctcaacttcatcgacgtggccaccggctcgctgggccagggtctgtcatgcgctgccggcatggcgtacactggcaaatatgtggaccattcgtcctaccgcgtgtactgtttgatgggcgacggagagagtgcggaaggctccgtgtgggaggcggcagcatttgcaagtttctacaagttggacaatctggtggccattgtggacgttaaccgacttggacaaagtcaggagacccaactgcagcacgacattgaagcgtatgtgcaacggtttgccgcgttcggttggaatgccatcggattggaggacggacacgacattacggcacttttgaatgcttacgccaatgccaagaacgtgactggcaaacccacggcaatcatcgccaaaacgctcaagggcaagggcattgacggcgttgccgacctgaacaaccagcacgggaagccggtgtcgaaggacaaggcggagcccatccgggcattgctcaaaagtgacaagccggcaaattggaccatcccggcaccgattcgggacgcaccggcggtcgacttaggcatcggtgccatcgcaatgagtgcaccgccgcagtacaaaatgggcgaaaaggtggccactcgacaggcgtacggaaacgccttgctgaagctggcggaggccaacaaacgcgtcattgccttagacggtgacatctccaactccaccttctccaacctggtgcaaaagaagctacccgagcagtttgtccagtgttacattgctgagcagaacatggtcggtgttggagttggcatggcgtgccgtgggcgtgtgcttccgcatgtcagcacttttgccgccttcttcacccgtgccggtgaa

SEQ ID NO: 50270 - DNA, 1041 bp, Heterodera glycines
gtaatgtgcggcatcttcgcttacctaaatttcttttcgccgaagaaacgctccgaaatcatcgacattcttttgcaaggactccgtcgcatggaataccgtggctacgattcggcgggcattgccattgactgcagcaacgacgtgaatctgccgcatgccgacgtcgctgtgtatcgcaagacgggcaaagtggacaatttggacgacagcatcaaaaattccgaaggcgtggacatggacttcacctacaacgtccattgcggcatcggacacacccgctgggcaacgcatggaaagccaaaggacgaaaatgcgcacccgcaacggtcgaactttgacaacgattttgccgtggtacacaacggaatcatcaccaactacaaggagatcaaggactatttgctgaccaagggctacaaattcgagtcggagacggacaccgaagtgatcgccaaactcacgcaacacatccaccaacggcacccacactacggcctccggcaactcgtcgaaattgtcgtgcaacaattggagggtgcttttgcgttggcgttcaaaagtcgccgttttcctggccaattggtggccactcgtcgcggcagtcctcttttggttggcattaaaagtcagtccaagctgaccactgaccatttcccggtcttctacagcagaccacgccgtggccccgtttcgctggtgttcgacgaaagttgcaccactgcgatggaaacgccaaacaaactcaacgcttccgacatgttcgcctctttcagcgctccttttaatgacacaataaattctacggcacgtaaaatcgaatgcagcgattcgacgcgaagtgttcggccatgcgacttggcaaactttgaggtggaatatttcgtggcgtcggatgcgagcgccgtcattgagcacacgcgtcaggtgatctttctggaggacgacgacgtcgcatttgtcgaggacggcgctttgtccatccatcgcatcaaacgcagcgacgacaccgctgctttgacagaacagacgcgagaagtg

SEQ ID NO: 50271 - DNA, 782 bp, Heterodera glycines
  unsure (1)..(782): unsure at all n locations
ccaagtttgagatgtttcagaaagttttcttggttcttttgtttttacttgcctttacagtctcaaatttgcggtccgatgaaggaattggggagatggatgcgaatcaaaaacctttgaattcggctcgaatactcgcttccaaattcactctttctcagtatgccgttgagagtatggaccttgtgatggagtacaatttgtttaatgttggcgaccgcactgcttttcgtgtcgtgctggacgatcgtaactcatttcccacccattcatttgacattgtgcgtggaatgcttcacatccgatgggaaaaaatctcaccgggagaaaatgtgagtcattcggtggtggtacgaccgcgcagttacggcattttcaattacacttccgccatggtcacttattatgtgaccgaagatgccaaacaagcgaccgtcgggtacagcacagcgccaggcgaagggaacatttaccggctaaaggattatgagcgccgattcagttccaaaatcggtatttggctcgtctttttgctgttagctttacccacgaccttgttgcctttcttcctctggtacaaattccaacagaaatatgcgacaaaaagcgggacatccggtcaacaaaattctaaaaaggctcaatgaaaactaaaggcaattatggagtgcgcaaatccatgccacctttatatttattaccattttgtttccatgcaaacttgtatttgttgtgttaaaccatttcattccttatgctgttggcgtaaacgtntggnaaac

SEQ ID NO: 50272 - DNA, 783 bp, Heterodera glycines
gtaattcttactttttcattgtacaaagaatgagattgtgattgactctgtgccatctttttcttctgtttgtatttttggtgggcttttaaggaaatatggcatagaaaaatcagtgcagaatctttgtgtcgaatggatgacaaaagtcccgccgcaatttttgctcgagaatttgagcatcgtcaagcgcgcgatgtcgacgagttgcgcaggatattccacaggcacattgaagaggaaagtcgaagtgacgagcagcaaaggcacgagaaaacggcggcgccgatgctaacgacggcaccagcgatggcggcggcacttcccagtgcgcgcattgttcggacgccacacattggcacaaatgcccgcgagaatggcaccgcctcattgtccgccatcactccaatcgctgccgcctttcgatggtgcactccgctggccaacacaccaactgtaagtcgtctcactttgcccttccgtacgccatgttttgtccatatttctgtccatgtcaatcctggtcatttcttcgtccaattgccctcccatccgacattttcgtcgcttgcgctgctcaaccaatatatgctcaccgtatacacgcacaatcagccgggcgttggggcaccaggcttggccaagccgtacgacgtcggcgtgctttgcgctggcccggcgtgcgacggatggtgccgcgccattactgtggcatacgaccaggaccaggatgggatggtgggccgtttcgtcgattacgggggctttgcccgtttggcccgg

SEQ ID NO: 50273 - DNA, 908 bp, Heterodera glycines
aaaccatcggaacatcgccaatttgcattttcaataaaaatctgtcgtcgacaatgagtgcttatcaaacaattgaaaagggttctcttcatacccttaactatcgcgtattttttaaaaattcggatggaaaattgatttctccttggcatgacattcctctctatgcgtccgagtcaaacaaattgttcaacatggttgtcgagattccgcggtggactaacgctaaaatggagattgccactaaggaagtgatgtctccaattcgtcaagacgagaaaaagggtcttccccgcttcgtcaacaatattttcccgcaccgcggatacatttggaattacggagcgcttcctcaaacgtgggaagacccaggacataaggacgagaacactggcgaaaacggagacaatgatccaattgatgtgattgagattggaagcaaagtgcagaagaggggcgccgtcattcgggtcaaagttttgggagttttggcacttttggacgaaggcgaaacggattggaagttggtagcaatcgacgaaaatgatgagttggctccgaagttgaacggaattgaggatattgaaaagcatttgcctggactgctaagtgccactcacgaatggttccgcatttacaaaattccaacgggaaaacccgctaaccaattccccttcaatggtcaattctgagaccggaacttcgcccaccaagtaatcgaacgaacgcatcaattttggaaaaagcttgtcacttccgctagtccgcatccattgaacactgactgtcacaaggaataggctgttttcaaagcgaatctttcggattgggaaagctttatatcgaaacagccaaagtttggtcatgcccagcaggtgccggaacatgtcgacaaatggcactttatt

SEQ ID NO: 50274 - DNA, 1218 bp, Heterodera glycines
tggaattgtgccttttatgggagatacgccggaggcgttatttgccaacataattaatgaagacgtggaatacccggagggggacgaggcattggattcggatgctgagtcgttgattcatcttttgctggagaaaaatccgctggaccgactcggaaccgtcggcggtgctccccaagtgtccgcgcatccgttctttgcaccactcgactttgacacaatcttgcggcagaaggccgagtttgtaccccaactcgagaatgacgaagacacttcctacttcgactcgcgctccgaccgttacaaccacgacgccaatgagtcagcggaggacgacgacgcggcggcggtgccaatgttttggtccttctcgacggcatcgcctcggcatagcattgtcgggttggaattgcccgccgggggaatggcaatgcttcaggccgcccatgcagcagcaattgaacggagtgggcagccgctgcagcaacaagaccgaattgtggacgatgaccgggtcgagagccgcagacgactcctttcctcggcaaccaccgcttcttccggcattggcagcgggccaaactcggcattcggtccattgtcctctacacttttaacgcgtggtggcaattgctccgactcccaagattcttcccacgaaagtgccgttggcagacgagcaaccgctgctgcttctgaattcgcttgcgatgtgatgccatcggcagtcattctgcgacggcgtttctccaaccagcggcaccatacaaatgattcgtcaaccagcagttcggctggtacaacaattggtacaacagcgggcggtggggtcggttcatcaacagacgactcgtcgtccttggacatagcgacgacgatgcatttagaacagccgagacggtcccagggacagttgccgagacttgcaatatcaccatgcggtaccactttcgactcttcaactgggggtgccattgtgacacaccaacgggaaagtgcgtgtggcaccggcggggaattcttgtcgccggtcaatgaacggcatatcactgccggaggcggaagcggtggaatgaagcggatggagaagcgtccttccgccgttgtacacgaattgataaccgatgtcgtccgtgtgtcctcctcctatgggcagtctttggcccgtcagtctcgctcctcttcatgtcgcgtcagtaacatgtctcccggggccgc

SEQ ID NO: 50275 - DNA, 640 bp, Heterodera glycines
gaaataaataaatttaaaagcctcaatgctgataaaacgcgcattttcattctcttctcgtgcattgcaacagcacagtgtcgtcaggcctcccgtccaagtgacaggcattgagggaaaatacgcgtctgctctgtactcgtccgggataaaggagaaaaagctggaaaacatcgagaaagagttgcgtcaagtgaaggagttgtacgacaccaacaaagagtttaagtctttcattgacaacccaattctgaataagcaaaagaaaaaggaggccgttgaggatgtgctgaagaagcagggcgtctcacaacaagttcagaacttcttcggccttttggcggagaatgggcgaatcaacaaattgaccggtgtcgtgagctccttcgaaacaataatgcgagcgcatcgcggagaacttcacgtggaagtcgcaagtgccgagcccctcgacaaaaaacacgaacaatcgctgaacgacgccctgcaaaagtttgccacgcgtggacagaagctgaacttgactttcactgtgaagccggacttggttggtggactggtggtgaacatcggcgataaatatatcgatttgtcaatggcaacacgccttaagaaaatggacgcggtggtaaagggatcg

SEQ ID NO: 50276 - DNA, 772 bp, Heterodera glycines
cattagctgtgttaagagatgccaaagaaacaaatgcacaacggaggaggaggagaagccgaaaagtgccgaagtgccgccggaagcacagcagacgacgacgacgagcagcagcagaagcagatggggcctgagaggcttcagctatacaaacgccgaattcccgaaacatgggctttttcctgtcttttctatggaaatgccaacaccgccgaccaacgcatcgcatcgcaaatcggcggaaggcatcggcaccaccctccaggcgggcatgggctatggcacgcagcaggcggaggcgggcgagctgccctacgaggatatgaagaagtcggaggcgatcatcccgtcccaggccggatggaacaagggcgactcgcagaagctgatgaccaactttggcacaccgcgtgacgtgaagggcaaacatttgaagcgcatttgggaattggagtacccggaggaagccgaagtgtcgctggaccgtctctgatcagcgacacggattgaattgtgctgctgatcagcacatgaatacacacggaggaaggaggagtaggacaaatgccatcgtcctcatcaagttggagcagtacacacccaccacaccgtcatcctttgccgtccggagagtgatcgatccattgtttgatagattgattgatcagaaaacatccatccatcctccgatcacagcccctggcattttttgctgcttaaaactttgtggttttaaatacatttagtgcctgcggcaacactttttttcaaa

SEQ ID NO: 50277 - DNA, 964 bp, Heterodera glycines
aaacatgtctggcggtggcaaagatcggattgcagtttttccgtcacggatggctcaaactgtgatgaaaacgaggctgaaaggcgctcaaaaagggcatagtttaccgaagaaaaaggcggatgcgttgaatatgcgatttcgtgaaattctgaagaaaatcactgaaaacaaaaaacgcatggctgatgtcctgaaagaagcagctttttctcttgccgaggcgaaattcactgccggcgatttctctcacatggttgttcaaaatgtgtcttcccaagcgcagtacacagtcagaatgaagcgcgaaaatgttgttggtgtttttctgccggtgttcgaagcccaccgaaaagagggctctgacggagacgcgtacaatttgacgggacttggcaaaggcggggcgaacattgggaagctcaagcgcaactacaacaaagcggtggaactgctggtggagctggccactctgcagacgtgctttatcacactggacgaggccatccaagtgacgaatcgtcgcgtgaacgcaattgaacacgtaatcatcccgaagattgaaaatacgctcacttacattgtcaccgaattggacgaaatggagcgcgaggaattctttcgcatgaagaagatccaagccaagaagaaacgccaacgcgacgaagaaaaagcccgggaaacggagaatgtgctgaccgaacggcagccggacgatgggagggcgccgaagagtttgctggaagatgaggaggaagtgcccgtgttatttgcctaagggcagtcgaacggaaagagggaacaaacagacggactcaattaatatttgtttgattggttgtgataatggcagtgtgtttatatcatgctaatagagaacaatcattatgtaatttcgcaaattttcattccttttaatcagattttattttccgattcaatttgtagtgaataaaaactcatc

SEQ ID NO: 50278 - DNA, 638 bp, Heterodera glycines
ggacagcggaaatgatccacgcgaaggacattgtggccatccttcaccttctgatcactctcgcccttcattaccgggcaccgattcgcttcccgaacaatgtcaatgtgcaagttctgatctacactcggcacggcaaacaaatcagcaaaagcatcgtcactgaacagctgaccaccaaacagacggaattggcaccgaaaggcgaacgtgacgcatttgatactctttttgactatgggccggacaaattgcaacacgtgaaaaattcgctagtcgccttctgcaacaagcacttgaacaagatcaacttggaggtgaccgacttggagacgcaattccaagacggcgttttcctcatccttttgatgggtcttctcgagggttatttcgtgcccctctacaaattccatctccaagtgaacaacaacgacgagaagctgaagaatgtgcaattcgcttattttctgatggaggaggcgggcatggccaagccaaagtgccgtccggcggacattgtcaacggcgacctgaagagcacgctgagagtgctgcacgcactgttcaccaagtacaaacacgtttaggaggaggggagaacagacggagcagcgaaattagggacaaaagagcgacgt

SEQ ID NO: 50279 - DNA, 483 bp, Heterodera glycines
caatgactgaaccttccgcctcaattgttcgtccaactttcttcgattcggttgaaagatgggccgaccgcgactttggagaagatctcagaaattttttggaagagattagttactccgatttggcaagttacgcgcagttgatccatcacaaagatatcattatccaatgtctcctccgtcacttggccgatcggtctctctctttgcccgctttttgcgatttttgttcggctattgcgacggatttgcgtgacgattttcacacgcatttttggcagatttttgatgcaatttcaaatttggttttggcatcgaaaggtaaagagcaatgcagtgataacgaattggagtgcacatttcgcgcgatggaacaaattgtgcgaattaattttcgattcgtttcagcgcggctaaaacaattgtttagccgtcttttaccgctctttgcttttccttctgatgggcgcctccgttttatct

SEQ ID NO: 50280 - DNA, 371 bp, Heterodera glycines
  unsure (1)..(371): unsure at all n locations
aaagggggacgacgcctttgcacaaggcagcatcgcagggccatcaacgcattgtcaatttgctgttaggctgtcgaaaaaacttgcaaattgatttgccaaatagggagggcgacacggcactgcatttggcatgcgaagaccaacagatggatgttgcgttgcttttggcacgttccggggccagcatcgaaaagaagaatcgccagaacaaaacgccgattgatttggtcgacggcaaagaacagaaactgaaactgatcaaagcgagtgaatcggtgaagccaactgccggaacatagccgaattcctttgttaaatcaattctattgtttttcaatgtaattgtaatgaatcttttgatttcnctt

SEQ ID NO: 50281 - DNA, 447 bp, Heterodera glycines
gttcgttatgcccaaaaaacatacgcaatcgaataaaacgaggaacatgtcgggaagagaccttgacgagatccatgctgatctgatcaggcccgacaaaatgcaaagaattcaggaacggccttttgacgacgaccttcccggcggaggatggcactattgcgtcgcttgtgaccggcactttgtggacgaacagacaaaagcggggcacgaaaagaccaaaggtcacaagcgtcgcctgcgcgcactgcgagaaaagccgtacacgcaaagagaggcggaattggccggcggattgggcgtggaagagcaaatcaaattggaaagcctggcggatttgacattttagcacccatttcttatagggtgaatttatgtttttttttgttgttgtttttgagttctttatcatacaaacagaaaataataaataacattttcgcaaaa

SEQ ID NO: 50282 - DNA, 553 bp, Heterodera glycines
ccaaagctggagctccccgcggtggcggccgctctccaactagtggatcccccgggctgcaggtattcggcacgaggttcctttttattttctggtccaaatgtcttctaagccggcatacaaagttgctgacatttctttggccgactttgggcggagggaaattacaattgcggagaatgaaatgcccggactgatggccatgcgggcaaagttcggtgcgcaaaagccattgaaaggtgcgcggattgccggctgtttgcacatgactgtccaaacggcggtgcttatcgaaacgctgttggaactcggcgccgaagtccaatggtcgtcctgcaacattttctccacccaagaccacgccgccgctgcgattgccaagcgtggcgtgcccgtctacgcgtggaagggcgagacggacgaggagtacgaatggtgcattgagcagacgctgattttcccggacggaaagccgctgaatatgattttggacgacggaggcgacctgaccaaccttgtgcaccaccaacacgccgaacttctgcccggcatc

SEQ ID NO: 50283 - DNA, 777 bp, Heterodera glycines
atttcgtcctcctcccccttttttcttccctttgtctctttgccgatcgtttgtcgtcctttgaagacgaatgagtaagcgttgatgagctttgattccccacaataattaccaattttgctgctcctactgctgaatattttcaaaaaactgaacggagaaatgcattctaaggacataaaggaaaagggtggacaacaaattgggggacaaggcgaagttggcgagggagggacggcggagaatgggcagcagcggcagaacagagggcaaagcgctgatgccggggcactgccgcaaaggacaatgggagcattgtacgagatgactcccgagctggagaacaaccaagatgagatacgaaaattggactcccaattggaccacctcaatgattacatggaccgggtggaagagaggctgaagacgcacaatgacaaattgatggaaacacttcgacaacagagagaggaccgagagaaacggcgacggagttttcacgagcgtctcgaacaaagccggcaagaagacgatgacttccagcaacagctgagttcggtgctcagccgagtagattctgtgaggagcaaaaaaacggaaccgaaagtgaaattggagggcgatcagctttcatcgaattgagtgatacgccttaaaaatgaatgcattccaatgccaaaatgtcacttttcttagcacacatcggtcacttctatctgcttattgtacctttttaatcgttttcgtggttctgattaaaaattcaagttttcgaaa

SEQ ID NO: 50284 - DNA, 796 bp, Heterodera glycines
atttgcttagatggatttgttaaaatcttacgacggctcttcatcatcggacaatgaacaagaattggcagatataccttcttcgtccaatcacaacaaattgctcgctttgaaaatcccatccatcaacttaacacccaacgtgattgaacaacgcgccattcaacaggttgcggttgtggatccaaaaaccaaagagttgtatcacaatccgcgcttcgacgaattgtttaaaccagagagcggcccacaaaatccgtttaaaagtgaacatcaacgagcagaaaagaacacactgaccggctatgtggagccagcgcatttcaacgccttccattttgagcgttcacttcgctcctacgatacgcttggctatgcggataatccaacggcagacacaaccagcgcaaagttcgttggtgacgttggacaagcgcaagaaaaggccggcgagtcgctttttgaatcagtaaaaactggcggacagaagcgaaagagagtgataaattacgacgcatcaaacgttgacggatatacgggaccgtgggcaaggtttgaggacgagaagacaattgctcgaccggacccagaattgcagaaggaaatggacgaaattgtgcggaaacggaaactgaaaagtcgtgctggccgaaaagcggccatcgcggaattgcatttggcagaagagagcaccaaattgcacataaaagatgacactgactatttgggccgttcctttatggaaccgccgaaatacacgggcaccaatctgcgcgaggactttgtgcccgaccgc

SEQ ID NO: 50285 - DNA, 579 bp, Heterodera glycines
ttttcttttccctttcattttttattcgttcaatcccttctttctttttgcaatgcttctccgtttctccctcactgttcaacttttgctgcttttcttcgcttttgaagtttttggcgctgaaccgccagaaggtgcacaaaatgaagaaggccaacgagacagcaaaagattggaaatggccaggaaagggctgaacgttcacatgttttcctcccccaatttcgccccaatgtttggcattatcgccggcctttccgttgttcttatcattgccattgttttcattgtcgtcggattgctcagcatggaacccgcgaaggattcgattatctatcggatgacaacaactcgcctaaagaaggactgattgtgagcaaagtgtgggagagagtgccgtgccgaaaaggaaaagtccgtcccccattaaatgatttgtttcatttgatagtgaatggtcacccaccctttgtcggtgttgcaatccgcaacgaatcatcaaaacatttaattttatagaatgtctatttcttcccattcattgtaatcatgtagagaataaattttttattttcacaa

SEQ ID NO: 50286 - DNA, 667 bp, Heterodera glycines
ccaagtttgagagttactattcatctaatcacttttccaatttcttaaaatggcagctcatagccctggcagttccggcgacacttcaacgccgtcgctgcgcaaatttctcaccgacgccctcgtcggtggcacagcggcgggcattgccaagacgggaatggcgcccattgaaagggtcaaattgatattacagtcccaagatgcttcttcacaaatcactgcggacaaacgctacaaaggcatcgtcgacgtcctcgtccgtgtgcccaaagagcaaggctttttggcgttgtggcgtggcaatttgccaaacgttcttcgctactttcccacccaagcgctgaacttcgccttcaaagacacttaccagagaatgttcatggagggagtggacaaggacaagcaattctggaagtccttcgtcatgagtttggcctcgggcggtgccgctggcgccacttcgctgtgttttgtgtaccctttggactttgcgcgaacacgattggctgtcgatgtcggaaaggccgatacccgtgagttcaaaggtttggcggactgcatcatgaaaatcctcaagtcggacggtcccatcggtctctaccgcggcttcttcgtctccgtccagggcatcatcatttaccgcggccgctacttcggctgcttc

SEQ ID NO: 50287 - DNA, 788 bp, Heterodera glycines
gatgggtgtttgtgctgagaaaacggttgctgaatttggcttcacgcgtgagcagcaggacgcgtatgcactcgcctcctatgctcgtgcgactcgcgcgtgggcgggcggcgcatttggtgcggaaattgtgccggtgaaagtcaaacagcggaagggcaccgagttaatggtggcagaggacgaagagtatcggcgactaatgcccgacaaagtgacttcgctgcagccggcgtttgtcaaggacggcactggtaccatcacgggcggctaacgccagctcattgaatgacggagcggcatcgcttgtgatcgcatcaggccaagttgaaggggcaaaaccgttggctaaagttatcgcctacgccgaggctggcagagcgcccgtcgacttctcagtggcgcccgttgacgcggtcaaaacgttgttacaatcggtgaacatttcgatcgatcaaattgcgcgttgggaggtcaatgaggcgttctccgtcactgccttggctttcattcgtcagctcgacttggacccggcacgggtaaacgcactcggcggagcggtggcgctgggccatcccattggatgttcgggagcacggattgtggtcactttggtgcatcaactcgagtcaggggaatttggtatcgctgcaatttgcaacggaggcggagaagcgactgccattcttgtgcaaagaatttgattcagaaaactgttcgccgattgttagaatttcttaatttcgaatttgtcctttttaaattataaataatcaattcggtttttc

SEQ ID NO: 50288 - DNA, 662 bp, Heterodera glycines
ctttcttttattgctttacacctaaactcatcaaaatgttcaccaaattaatgccatttttatctcttagacaaccgctggcagtggcctcctattctctcatacaacaggctcggaaattttcaacggcagttatgaccaattacgaaatgatcaaagtggagagagtgggcgccgacgacgtcgtcgcactgatcactctgaaccgaccgaaggcactgaacgcattgtgcagccaattgatggacgagctcgcccattccctcacttatttggacaaagacgacggagtccatgccatcgttctcaccggcagtgaaagggctttcgcagccggcgccgacattaaggaaatggtgccgaagaaatttgccgaggttttcggtggcggctttttggagaattggtcccaagttgcgactgtacgaaagccgacaattgcggcggtcaacggacacgctctcgggggtggatgtgagttggctatgatgtgcgatatcatttacgcgggagagaaggccatgtttggacagccggaaatcaaaatcgggacaatccctggagccggtgggactcaacgtcttgcgagaattgttggcaagtcgctggccatgaaaatgtgtttgactggcgaaccgatcaacgcgagcaaagcactcgaa

SEQ ID NO: 50289 - DNA, 479 bp, Heterodera glycines
attaagatgaaattattgagattgcgctcttatcttcatttttcatgtaatttgcatgttcgcaatttgacgaatttatccaaatttggtacctacaatgagaaagccattcagcttatccagcagcactatgatgaagcgacgtcatcttcacatcaatttgtcgattctccatcccaagaagtcttccgaatggttttgccacctccgaatgtgacaggcaacttgcacattggccatgccatcactgtcgccctcgaagacgcaatatgtcgctaccagcgattactcgggaaaaaagttcgttggaccccaggctttgaccacgccggcatggccactgaacaagtggtgcaaaggcaactcgcgcaacgctttggaaaacaaacggacgaaatgtcgcaatcggagtttgtcgcacactgtgaagaatggaaagaggcaagaattcgggacatttctggtcaactccgctccat

SEQ ID NO: 50290 - DNA, 510 bp, Heterodera glycines
tatggattttcaaaaccgagctggtggcaaaactggaggtggtggcgttgcatcggcgaccgatgcaaacgtcgatcgccgagaacgacttcgtcagcttgcattggagacgatcgatttacaaaaagacccttattttatgcgcaatcacttgggcggctatgaatgcaaactttgccttacattacataacaatgaaggatcatatttggcacacacccaaggcaagaaacaccaagccaacctcgccagacgtgctgctaaggaagcttctgatgtgccgtatatgccgttgccgcagcaagcaaaaattgagccgaaaaaatttgttaaaattggtcgtcccggttacaaggtgacgaaagaacgtgaccatgcgtccggtcaacaagcactgctctttcaaatagactatcctgaaattgctgatggcgttgtgccgcgtcaccgatttatgtcttcatacgaacaaaagatccaaccaccggacaagcgttggcaatatctttt

SEQ ID NO: 50291 - DNA, 699 bp, Heterodera glycines
gtccatttaagattacctaattagttaattatcttcaaaatggacatgagtgaattgtgtgcaaaagttaatgcaatttataagaaggaaacggaccacaaagtgcaatcggaaggacttcagaaactgcttgagggggtgctcacctccgtgccgtcggataatttgaagcaaattaccgaggccgtgagcaatttggtcgagactgtggtgaacaatgagagtacctccatggtcgtgtcccgtcaattcatcgccgacatcgcttcctatttgagtcagccttcgctgaacaccgcactgatcaaaggcattggcgaggccgtgctcactcagcttcatgcacgtgcacttgcctacgaggagcagagcacccaaatccgcatgattctggccaatgcgcttgagcgtgaccgccaatttgagcaatccgcgcggactcttatgggcataccaattgaaactggtcaaaggggctatcgccacgaattcaaaatggaactgtacttgcgaatcactgagctgtttttggaggccgacaatgtcgaggaagcggaccgacacgtgaaaagggcctcacttttgcagcaggacgtgaaggaggaggccctggtcatcaaatacaaggcactttacgctcgcgtgttggaccgtcagggcaatttcacggaggcggcgcaccgttaccccagctatcgc

SEQ ID NO: 50292 - DNA, 439 bp, Heterodera glycines
ggcatttctccgaatacttcgctttttcaaatccatcaattaattcacgccaaactgtgcaatgtccggacgccaaggaggaaaattgaaaccgctgaaacaggcgaaaaaggacgacaaagtgctcactgaggaggacgtcgaattcaaaaagaagcaaatggaagagcaaaagaaactgaaagaggcggcacagaaagcggcggaaaagggcggcaaacttggcggtggcatcaaaaaatcgggcaaaaaatgagtcggtggagaaaaacgccggagggaatgaatttttggacgcaaaaatggctcagaacaaaaagagaatttatatgaacggagtgattgcgactgttctgttttgattcccatccaattttgttgttccatttttgctgtgtatttttatgacggatattttcgccagttattcggcactttt

SEQ ID NO: 50293 - DNA, 645 bp, Heterodera glycines
  unsure (1)..(645): unsure at all n locations
ctaaaaccaacccccttgaatttgatgcgttttcttaatgggctgttcgtaaattaaggaggtcttatccataaagcactgctttcattgttagcgttgaatgattgagaacatagttcccattttcaggtgtacatgttcaactacgactccacccatggccgtttcaagggcaaaatttccacaaacgccggcaatttggtggtggagaaggaggggaagagcgcgcacaccatcaaagtgttcaacctcaaagacccggccgaaatcaaatggggcgaagcgggcgcggaatatgtgatcgaatccaccggagtgtttaccaccattgagaaggttgtgggtagaggacccgggatggctaattataagcaaatttaacatttaatgatgagttttttaaggcctctgctcatcttaaaggcggtgccaagaaggtaaagctttaattgctgtcttttggtgcattttttacgtctcaaaatcaatcccataaatttactacgtcatcaaatttttgcatttgtcacactgattgtaaaaatacgaataaacccaaaaggtggtcatctccgctccgtctgcggatgcgccgatgtacgtgatgggcgtcaacgaggacnagtacgacccggctaaggacga

SEQ ID NO: 50294 - DNA, 1466 bp, Heterodera glycines
ctttgctttgttgaatttctttcactcaaaaatgtccagcgatattgtcgagaaaaaggagacaaaccccaatgagacggatgacaaaaccaaagaaataaaatcgcttgacgaggatgaaattgccgcacttagtaattacaacatgggaccgtacgcggatcagttgaagcaggcggagaaggacattgatgaaattcagaagcgcataaacactctttgcggagtgaaagagagcgacacggggctggcgccgcccattctttgggacattgcggccgacaaaatggccatgtcccatgagcagccgctgcaggtggctcgctgcacaaaaatcatcaaagaagagggcaaagaaacgcgttacatgatcaatgtgaagcagttcgccaagttcgtcgtggacttgcacgaaaatgtggcgcccactgacattgaggagggaatgcgagtgggggtggaccgcaacaaataccagattcatttgcctttgccggcaaagattgacgcgtccgttacgatgatgcaagtggaggacaagccggacgttacctacgcggacattggcgggtgcgaagaacagatcaaaaagttgcgtgaagtggtcgagtttccgttgcttcagcctgagcgtttcacgagtttgggcattgagcctccgaagggcgttttgttttttggtccgccgggcaccggcaaaactttgtgtgcccgcgcggtcgccaatcggacggacgcgtgtttcatccgcgtcatcggttccgaattagtcaaaaaatacgttggcgaaggcgcgcgcatggtgcgcgagctgttttcgctggctaaaacgaaaaaggcgtgcattctcttcttcgacgaagtcgacgccatcggcggagcgcgatttgacgacggaaaagggggcgacaacgaagtgcaacggacgatgctcgagttggtcaaccaactggacggattcgactcacgcggggccatcaaggttttgatggccaccaacagaccggacacactcgacccggcgctcattcgtcccggtcgcattgaccgacgcattgaattttcactgcctgacgtaaaggcgcgtaaaaacattctccaaattcacaccaaacggatgagcatcgagcgaaacattcgatacgaattgattgctcggctctgtccgaacacgacaggtgccgatttgcgcagtgtttgcactgaggcggggatgttcgctttgcgtgcacggcgtaaggttatcacggagcaagactttctcaaagctgttcagaaagttgtgaaaggctatgcaaaattcagttcgacgccgtcctatttgacgcacaattaattaaaggaattgaaagagggacattatagaaaggaaaattctgaattcatctaattaatgcgtcgatttgtttgttatatttattgtacaatgataggttttattttattttaaatttatttaactaaaa

SEQ ID NO: 50295 - DNA, 599 bp, Heterodera glycines
ctctgttgccgaattcggcacgaggatttaagcattttctaatttaattaacggtttgccaacctctgcacattcttcgttacaacttccgagattaatggcgtcgcacaccgccggcatccaacaacttcttgcagccgaaaaacgagctgctgaaaagattaatgacgctcggaagcgaaaagcacagcggctcaaacaagccaaacaagaagcacaggcggagatcgaccaataccgacatgaaagggagcagcgttttcgcgagtttgagcaaaactatttgggcacacgcgacgacattgaggcgcagataaagcaggagacggaagcgaatctgaaagccatggacagtaatgttgcaaaaaacaaacagcaggtcattgtgcgtctgctgcaattggtgtgcgacatcaatccggaactgcacacgaaccttcaactccaagtcaaactgttcggcaaagcggcataaactgaacggacggaggagcggagttgggaaagaatgttttttgatgtgatcgtttatttaaaagacaacaattagttttatattccatcaaatataagaggttattaaaagtatcgtaaaatgc

SEQ ID NO: 50296 - DNA, 638 bp, Heterodera glycines
gtccaattaagcaattacaatgcttcaacgtctatttgttggcaagaatttcacctgtctgccgttgttcacttctcatcgcaattatccgggctcaaatttcactttccccatagattggtatgaaaataagtatgtgttactgcaccaacgcgcccgtgaaaaagtttcgcccgattttcacaagcagaccaccggccttaacggcctttacgtgaatgaaaatccgcacaaagaccttcgcttgctttaccaccgcattttgcgcgtgattggaatgatcccggacagcagtcagtaccggatggccgtcgaagaaattgtcaagcatcgcctttcgcttgttgaagcggaacccgacattcaacaattggagcagaaaatcggcatgggtcagattgaagaagtagttcaacaggccgagtatgaattggagtgtattcgtctgtttgttgcacataaatgttgggaaccgctggtggaaaaagcggatgaggcgcaatggcggtggccaattggaccaggcccataagggaatcaaatgaccgtgaaaatttgacgccttagaacgctgtattttttctcgttacaattattttaacgaattcacgtggagaatataaacagtataattgcga

SEQ ID NO: 50297 - DNA, 605 bp, Heterodera glycines
gcgaaataaaaaaaagaaattatccaatatttaaaaacagcgaacaaaaaggtcaggaggcaaagaagaaaaagatgtttgaagggccaatcaaaatttggtcatggaatgtcgccggtctgagggcgtgtgttaaaaaaggagggcacaaacatattcgagagtcgggtgctgacattgtgtcactgcaagaaacgaaatgttccgaatttccagctgaaatcaacgcattggacgaatatccatacaaaaaactgctgatgactaatgagaaaaaagggtatgcgggcgtggcactcctttccaaggagaaaccaattaaggttgaggaaggcatgggcgacgtggactttgacgaccacgcgcgttacatccaagcggaattcgctgcctttttcttaatcgctgtctatgtgccaaatgctggtcaaaaattggtgaacctacagaagagaggacgctttgatgaacttctgctcaacaaactctccgccctgaatgagagaaaggcggtgataattgctggggatatgaacgtggcgcatcaggagattgatcttcgaaatcccgaaacgaacagaaacaaaaccgccggattcacagac

SEQ ID NO: 50298 - DNA, 639 bp, Heterodera glycines
ccaagtttgagtgatcttttgcttctgatcaccgactgatcgatcaatcgatcacttcgttattttctcggcaataaaatgccgagtacagccattcaaaaacttttgttggccgtttccatttttctgatcgtcgccggcatcgttttgacagtcgccggtgttttttcgcccgcttggcaagttgttgacattcgcgaattccgagctgaacatcagcacggcctttggtgggattgcattcgtgccgaaaagcatgtggtggcggtgggcgacttttacgaggaagcgccgctccattgcatgtacaaattcgacgagtccgcggcattagtcatcgaaagagcgctgaaccatgtcgacgaggacggggcagctggagaagctgagcaccaccgattctggggatggcataaggtcgtcctttcgctgatccttctctcccaattggctgcgtttgtcgccgtttgcaccggcgtttgtgcgccttattttgccccgtccaccttctgtttcgccatttctctgttcatcgccatgcttttgtcggtgctcgccgatggcattttcttcttctccgctaatcgcgtcgacattcgcttcgtcaccggaatggtcggcacttatgagcaagtgatc

SEQ ID NO: 50299 - DNA, 526 bp, Heterodera glycines
ccccgcggtggcggccgctttcgaactagtggatcccccgggctgctttactcggcacgagggccgtgtcaccaacattccttccgggatgctcaatgatctattcgccatggacggccttctgacctttttgcggaccattgaaagtgcgccgtccatcgtcggacttgcgctgggccacgacttgaccaatttgggtctcaatttgaattcttcgaagcgaaatctcttccaaacgtttggtggtccctgggccgactttccgtgcagaattcaagatttggacgcgaaagtgccggacgaatatttgaccaatgcgaccattcgagacaaattgccgaacatcaaaatgaacaaattgcacgaggacgtccttttctatttgttctacaactgtccgggcgaagtttaccaagtggcggcggcgaccgaactgtattcgcgggattggcgcttccataaagtggaacgcgtttggctcatgcgggcgcccttttcggcgcctccgcgagaaattggcggcact

SEQ ID NO: 50300 - DNA, 476 bp, Heterodera glycines
aaacatattcatatcaaacaattataataaacgaaaaagcaaaaacaacagcaaacccctgaaatatgttgaatgacgacgattttccggctttgccaaattcagtgctccaaagcaaccaatcccagcaaatatcggcgcaacagaggttaccatcacagcacacacaccaaaacaattcattgctcgtgaacgatgacgctaccaacgcaaggctaagtcggatgaagcagcaaatggcactggaaaactcggacaaagtcggcattcagacgcatccagacggccgtgtcaccaacattccttccgggatgctcaatgatcagtgtgtaacgaatgagacaaacattcgtcttcagataaacagttttcctctcagattcggcatggccggccttctgacctttttgcggaccattgaaagtgcgccgtccatcgtcggacttgcgctgggccacgacttgaccaatttgggt

SEQ ID NO: 50301 - DNA, 481 bp, Heterodera glycines
ctttcaacggttttgtgacagagaaagcgattatggcgaacccttttgatgacgacagtgacgaattcattcgcaaaatccgggccggccgtggaattgaaccgacaaaaagtttcacaacgcccgcagcttcgcaaaacattgaggaccaaattgccgctgatgagaaggccattgagcgttacttgcaggcgtcgttggacagcacacagcgctcccgacaacagctgagctcatccgaggggttggccgagtccaccgcacgggaattgttggagcaacgggaaaagttggaacgggccgaacagaatttggacaccattcaccacaccactcagcacacacagcgcagcctgaacagcttgaaatcgtggtttggtgggctggtcagaaacaaactttcacgagcgccaaaagggttgggcacggcaaatgtcaatgccaacaatcagcagcaacaacaggaacagaccgtgcagca

SEQ ID NO: 50302 - DNA, 482 bp, Heterodera glycines
cattaattcttaaaatgaacaaaactgacgatcaattagctgaatgtcgcgaaatcttttgctacttcgattccaaaggcgacgagaaaatcaatgtgaaacaggttggcgatgttttgcgggcactcggccaaagtccgacggagtccgaagtgcgaaaatgttgtgagcactggaccgaaccagatacgcgcatttcatttgaggaatttgtgccaattttccaaacggttagcaaatcgcgcgctcagtacacaaaggaccaatttgtggagggattgtctcatttcgaccgcgagggcaatggcacaattgccgttgcggaactcaaacatttgctgaccaatttgggtgaacgtctctccgaggaagaggtggagcaactgctcgccggccacgacgtggccaatggttttgtcagcatcgattcgttcattgaaacagtgcttcgttttcctttgacccctccggacaatgagaaa

SEQ ID NO: 50303 - DNA, 730 bp, Heterodera glycines
attccggccccatcaacggtctctctgttgatgcatctgacggtttgcactttgtcacggttggccaagacgcgcagttcaaagtgtggccgttgccaattgaatttgatggaaatgctcagccaacgcagcccgtccattcgttgtcccttgacggggtccctcacggctgttcccacgtggcgatgtccagcgatttcgtcacctgtggtgagggcatttcggtgtggcggttgcacagatcttcgcccattcgccattacgctgttgggcccaacactgtgcagcatattaactgcaaccccatagaggaaggcattatggccggatgtgccgcagatcgctccatttttctgttcgacacccgccagaaagtgccgctgagccgcgtagtgctcaaactgaggacgaacagcattgcctggcatccgcttgagccgttcacttttgttgctgcaaatgaagactacaatttgtacaccttcgacatgcgcaggttggactccgctcgccacgtccaccaagggcacacctccgctgtgatggacgtcgactttgcgccatctggtcacgaatttgtcagtgggagttttgacagatccttgcgcattttccctgttgaacaatggcgaagtcgggaagtgtaccacaccccgcggatgcaatatgtgctgtccgtcttgtggtcttccgacaacaaatttgtgttgtccggcagtgatgacatgaa

SEQ ID NO: 50304 - DNA, 374 bp, Heterodera glycines
tctctcgtcgaccgccgccaaaacgccggtccaggagttcggctttgagtatctgaagcggcagatgaacctgggcaggccgttgtcgccgcacttgcaaatttacaagccccagttgacctgggtgatgtccggcgtgcatcggatcctcgcctgcatcatgtccggagcgcttttggtcggcgttttcgtttttggcatttgttcggtcgatttcacttcgttcgcggaacggcttaactcgtggaatttgtggcgaccggcttttgacatggccaaaggcaccgaattggcgtccgtttaccgctccggctatttggtgatcggcttgtccacgctcatttccctgctcattgtggccaattcgaagcatt

SEQ ID NO: 50305 - DNA, 1405 bp, Heterodera glycines
gtcctattaagcgacaaaagaaaatggtcaaagacaaaaaatattactacatcctcgaagtaaacaccagtgcaacagaccatgacttgaaaaaggcctatcgaaaattagcgcttaaatatcatcctgacaaaaatccgaatgaaggcgaacgttttaaactcatttctcaggcttacgaagtgttgagcaaccccgaaaagcgtaaagtatacgacgaatatggagaagaagggcttaagggtggcggagaaggcggcggaatgcacaatccaatggacatattcgaaatgtttttcggcggtggtggttttcgtggcggtggtgaaaaaccgaccaaggtcagagatactgttcatcagcttaccgtttcgttagacaaactgtacaacggatgcaccaaacacttgcgcatcacaaggcatatcctttgtccgaaatgtaatggtgtcggcggcgctaaggaaggggtcaaacaatgcgaaaattgtcgtggacgcggactggagattcacaacatgcaaattggtccgggaatgattcagcgaattcaaagagcttgttctgaatgtggcggtgagggggaaataaatcgcaacccgtgcaaacactgtggcggcaaaaaacggatcaaatcagaagagacaatcgaagtgcatattgagaaagggatgcgcgacgggcagcgactgatgttctacggaaagggcgaccaacagccggggctggagcctggcaacgtgatcattgtgctggacgaggaggagcatcccgtgttcacgcgaagaggcaccaacctcaccctgaacatgaaactgacgttgacagaggcattgtgtggctgcactaaacatgtggtgacgttggacaaacgcattctcagctttactcagttgcctggcgaggttatcaatcaccgcgacttctatgtaatccaaggcgaagggatgccgacccatcgtcacccggaccaaaaaggcgacctgattatccaattcttcgtggatttcccagacaaacttcctcttcaaatgaaaaacatggacttgctgcgagaattgctgaaagatcacgagattgagcctgagccggaaacaatcggagcgaacgcgcagaacgctatcaaattggtgcccatctctgaagaaatgttacgccggcgagcgcacgacgaagaggcaagcaacggagaaccgcaagcggtgcgatgtgccactcagtgaacgtgaccgtgaccaatgaaaggatgattttgatggtcaattacggcgtctgacttttacatattaattgctgaagagaatattataaaccgctgtttgtttgttctttctgtattccaatcgcattgtttgatcttttacttggattcttcatgtatttgattagacctggaacagcaaaa

SEQ ID NO: 50306 - DNA, 684 bp, Heterodera glycines
gtccaattaagtttttgtttaagcaatggcggacgacgacgctgaaacattcaaactttggcgcgtacgtaagactgttatgcagatgtgccacgaccgagggtatttggttacgcaagacgagttggaccaaacgctggaccaattcaaggaccaattcggcgatagacccagcgaacggaggcccggcaggggcgagctgaccattttggtggcacataatgacgaccctactgaccaaatgtacgtgttcttcccagatgacccgaaaataggcatcaaaactatcaaacagatctgtcaacaaatgcaagaacagaacatcactcgagcgatcattgtggttcaaagtgggatgacaccgagcgcaaaacaggcgattgtggacatggcgcccaaatacattctcgagcactttttggaggcggaactgatgataaacatcactgaacatgagcttgttccggaacacgtggtgatgagcagcgaagaaaaagcggaactgttggcgcgatacaagctcagagataatcaactgcccgcgcattcaagtcagtgacccagttgctcgttacttcgggttgaaacgcgggcaagtggtcaaaatcattcgtgcatcagaaacggcggggccgttacattacttaccgactttgcaattgatgtttaattcagaggatttgt

SEQ ID NO: 50307 - DNA, 1142 bp, Heterodera glycines
gcgtgaaatcttccatattcaagctggccaatgcggaaaccaaattgggtcaaagttctgggaggttatttctgacgaacatggaattcaaccagacggaacttacaaaggcgaatccgaccttcaactcgagcgaatcaatgtctattacaatgaagcacatggtggcaaatacgtgccccgtgctgttcttgtcgatcttgagcctggcactatggattcaatccgagctggagcgtacggacaactctttcggccggacaatttcgtttttggacagagtggcgcgggaaacaattgggcaaaaggccattacacggagggtgctgagttggtggacaatgtgctggatgttgtgcggaaagaagcggaaggctgtgactgtctgcagggctttcaactcactcattcactcggaggaggcaccggctcaggaatgggcactctactgatttcgaagatccgcgaggaatatccggaccgaattatgtcctctttctcagtggttccatctcctaaggtctctgacaccgttgttgagccatacaatgccactctttccgtccaccaacttgtagaaaacaccgatgagaccttttgcattgacaatgaggccctctacgacatttgcttccgcacattgaaacttcagaatccgacttatggcgatctcaaccatctcgtgtctgtgacaatgtctggcgttacaacttgcctccgtttcccggggcaactcaatgccgacctccgaaagttggccgtcaacatggttccgttcccgcggctccactttttcatgccaggatttgcgccgctttctgccaagggggcagctgcgtaccaagccttgtctgtgtcagaacttaccaagcaaatgttcgatgctaaaaatatgatggcagcgtgtgacccgcgtcatggccgttatttaacagtcgcggcgatgttccgcgggcgaatgtcaatgcgcgaagtggacgatcaaatgatgtcggtgcagaacaaaaattcgtcttacttcgtcgaatggataccaaataatgtgaagactgccgtatgtgacattccgccgcgcggtctcaaaatgtctgcaacttttgtcggaaattccaccgccatccaagaattattcaaacgaattt

SEQ ID NO: 50308 - DNA, 484 bp, Heterodera glycines
ttaagatcaaaaaattttcccaatctttatatattatttttttcaaaatgcggcagtcgcccaaccaaacgccggtcactcgcacaacgacgacgacaatcactgaacaacagagggaaggcggaggagaccaacagaccaattctgaacaatttgtgcttaggctggaagcaccgcccgacacgcggccgagggtccaatggagcaccggaacagtggacaatgaaaacatgggcaaaaagaagtcgaaatgttgttgtatttacaagaaaaagcgcagttgggacgacccaaacgcatcgagcgaagacgacgacggagaatgtgaaagttcgcattgccgtggccacgtggagaaacagcgaaagccgccgccgtcggacgatggaaatggcggcggtgggcccggcccttcgtccatttcaacctgatcaattttgccaatcatttgcctatccatttactattatttatcgatttcctt

SEQ ID NO: 50309 - DNA, 477 bp, Heterodera glycines
caccatgtcgtccgcttcgcgcttcaacgaataccaggtggtgggccgtcaccagccctctgagaccaaccctcagcccacgctctaccgcatgcgcatctttgcgcccaacgcggtggttgccaagtcccgcttctggtacttcctcaagaagttccgcaaggtcaagaaggccactggccagattgttgccgtcaaccaagtgcttgagaagaaccccactcaagtcaagaccttcggcatctggcttcgttacgactcgcgctcgggtacccacaacatgtacaaggagtaccgtgagttgacccgcgtgaacgccgtccaggcttgctaccaggacatggctgcccgccaccgtgctcgcttcaggtcggtgcagatcatccgcgtcgccgaggttgccaccaaggacgtgcgccgcccctacattcagcagattctcgagaagaacctcaagttcccgctcccccaccgcgt

SEQ ID NO: 50310 - DNA, 1074 bp, Heterodera glycines
gtttgagagaacatgtcccaaactgaaaaggaactactggcagaaaaggtggacaggcagcccaatgcaggaggcgaagccgacagcttctctaaatttgttcgacctcagtgtaatgcccgactcagaaacgagcattgaactcaaccaaatgcgagtggacgctgtgccggacttggcaaggttcacccaattacagtttcttggtctccgccaaaacttgttgacatcgttgaatgcgaaccttggccggttgaccacgcttaccgagttggagctgtacgataaccaactgactgaaattgccggcctcgaccagttggtcaaccttgtgatgttggacatgagttacaacagaataaccaaaattcaagggctttccacaatgacgaagttacgccgtctgttcctcgttcacaacaaaattaaacggatcgaaggcctggaaggtttggacgcgttggaactgctcgaattgggggacaaccgaattaaggtcatcgaaaatttgtgccatttggtcaatttgaatgaactgtttgtggggcacaacgacattcagcgaattgagggaatccaaacgctgataaagttgcgagttctcagtctgccggctaatcgcttgaccaaattggaaggattggacacactgacggagttggagcagttgcacctcagtgaccagggcattgaaagcctcgacggacttggcaatcagtcgaaactgatcattttggatgccgcgaacaacagaatcgtcaatttggatggcttgggacatttacagaaattggaggacctttggctgaacaacaacaaaatcgttgtttggtccgaggtggataagttggcccagcttcgcgccctcgacacggtgtacctggagcacaacccgttgtacaccacggacaccaaccagtacaggcgcaaggcgatgctggcactgccgcacattcgccagttggacagcaccgtgtgccgtcagcaaaaaaatgtggtggaggaagacacaaaacaaaacagcgaagacaacaacaacgcgaagccaaacagccaaagaagtgccgtggcgac

SEQ ID NO: 50311 - DNA, 448 bp, Heterodera glycines
  unsure (1)..(448): unsure at all n locations
ctcataaattgtcttgcagaagtatttaattaaaatgattgaaacactcgagacgagcgaagtgttgaagcgggtccttaagtctgcgctgattgtcgacggagtggcacggggtttaaacgaagcggcacagactttggacaagcgtgaagcgcacttttgtgtgctggccaaaagctgtgacgaggcgtcctttgagaaattggacaaagccgaactcggtcaaatggttggccagtgcaaatacgacaaagacggaaaagcgcgcaaaatcgtcggctgttcggtggcggtggtcaaagactacggacgggacgaagaggcgaagaatgacttgcaggaagtgctgaagaaaatcagcgactgatgaggttcctatgtcatcatattgttgtttttgtttggttgttaccgcggctataaaagactcttctgtttaaaaaanann

SEQ ID NO: 50312 - DNA, 459 bp, Heterodera glycines
atggtcgaagccgccgaacagtcgcaacaacagcccatccgtcgccgtgccggaccgaagtcggcacgtcgcctttatgtgaaggcggtgtttaccgggtacaaacgcggacaccgttctcagcacgagaacacgtccctgctgaagcttgacggggtcaatgacaagtcggatgccagtttctatcttgggaagcgtgctgtctacatgtacaaggggcacaaaacaatcgcacgcggtggtgggccgaagacgcgtgttcgtgcaatttggggacgtattacgcgcgtgcatgggaattcgggagtggtgcgtgccaagtttcgtcacaatttgccgccgaccgccatgggcaagcgaatccgtgtgatgttgtacccgtcaaacatttgaggaaatacagaatgttttttgttacaccgtttttttttttgttgatcgtttataaatgttgatgac

SEQ ID NO: 50313 - DNA, 336 bp, Heterodera glycines
caagtttgagcaatttttttcctaattggtactcaactgagagtaaattaaatggttcacgaaaacatccattggtcccggccacgcaaatttgggcctggctcgcgctcgtgtcgcgtatgtttcagtcatcatggactcattcgaaaatattcactgaacatttgccgtcgctgcttccgcgaatacgcctccgacattggattcaagaaactcgattgaattgatggagaaagcccgagtatttttcattgttttcccggaagcattgttatcaatcacaaattattgttgaattttttgttttgataaatcaaaaagttaaaaaaaaaaaaa

SEQ ID NO: 50314 - DNA, 652 bp, Heterodera glycines
attaagaagaaaactgaaaaatgtcgagacctaaagtcttttttgatataaccattggtggaaaagcagctgggcgtatcgtgatggagctttattcggacattgttccaaaaacggcagaaaattttcgttcgctttgtaccggcgaaaaggggatgggaaagagtggcaaacctctccattacaaagggtctaaattccaccgtgtgattccaaatttcatgttgcagggtggcgacttcactcgcggtaatggtaccggagggggaatcgatctatggcgagaagttcgtggatgagaatttcaaagagaaacacacccagcccgggattctctcgatggccaacgccgggcccaacacaaacgggtcacaattctttgttacgactgtgaagaccgaatggttggacggtaaacacgtcgtattcggtcgcgtcactgatggaatggatgtggtgaaagctgttgaagctcaggggtctcagtccgggcgcgcttcgaaagacattatgatcgctgactgtggacaattgtcgtgagaatagggccaagaaaaaccggattttccaatgttatgaatggtattgaaacaagttaaggcaatctctaattttaattattgagggcgatgataaatttgtgatttaaaaa

SEQ ID NO: 50315 - DNA, 127 bp, Heterodera glycines
  unsure (1)..(127): unsure at all n locations
cggcggcgtgggacgcaaagcgcaggcgcaagcgtggggcacaacacagggacgttggccgaaaaagtccgccgagttccttctcccacttctcagaaatgcngagagtatggccgaggttgagggg

SEQ ID NO: 50316 - DNA, 716 bp, Heterodera glycines
ttatttaaatctgagaaatgccgtcgcgaaatttgtcagcaaagaaaaaacaacagaattcgttagttcgggatgagtcgacctcttcacccagcagaacgcccaaatcggtgtcgaaagcgagtaacagcaacagtagccaacagaaacttcagaagaagcataattcatcagaactgtccacgattagcagtgaaagtgtcgaaaaggatctcagctcttcaatgtctaccaatccgcacggacatccgacggacaaaaaatggaccattggggagaaagtgttatgccgttatctgaactcggagcacatttattatgaggctaaagtgatgtttctgaaagacttgtctggcggagatgtcggctatggcattcattatccgggttggagcaaccgtcacgacgaagttgtaccacaacatgaagcactaattcgcttcaagaattactccgatgaagaggcaaccaaggcaaaggaagacgtgaaaagggctcagcagatgctaaatgccaaaaaaagaaagcgatcggaactgaagaaccgctcgcaagcgcatgatgaaagtagtcgctccagcacaccaggaagcgccgacaacgcatcaaaacgtaagatcgcccgtcggacgacaattgaaactagcgcagtggccaaaaaggacatgccccaagtcacattgaccgaccctttgcgacgcattctgatagacgac

SEQ ID NO: 50317 - DNA, 452 bp, Heterodera glycines
aacattatgactttgcttatcaccggaatccttcgcaaatttgcacttacaaaattcccatttactgcatcaaattcttctttgtcgtcatggtgtaaagctcgagagtccccatttcccatctcaatggcgaacaattggaaagcctttttgttgatgaacgcgtccaacgcttgctgctttcgctgaccggccatgacaccgacaaaattttgcgccatcgtcgcatcaaccaaacggagcgcaagcattacgcgttgatgacggacggcatggtgaaggagttcatgtcacgactggaccaacgggcgggcaaatttctgcgaattgtgccgttcaaagagccgcgctcaaaccgaaccgaagtgttggcacgggacgcggaaattgacggatttgacaccgccaaattcgttttcaccgacatttcattcgacgccacagatatggat

SEQ ID NO: 50318 - DNA, 602 bp, Heterodera glycines
cgcagattcgcatttgattggattctcggtacgcagcataaattggacgtggacgtgcatgtttcggacgaattggacattaacgcgttcttttcaactggagaattacagccgaacgaaaagagtttgcctgttgacgacacttcagccgtcataaaggagcgcttatggcaagagccgaaccatgaaattgtggccaagttgctttcgatgggtttcactgaaaacgcagctaaaaaagcggcgcttttcacaaagaacgaatcagcggaatcggccattaattggattcttcagcattctgacgacactgatgtaaacgatccgcatccgatgttaacgaaacaaagcactccgccactgacatccaaccaaggccagaacgcgtctcagaaagttcgtcacggcaaaggtcattaccgactgcgcgccttcatttcgcacattgggtcgacgccaaattctggccattatgtcgcacacgtaaaggcagacaatggccagtggcacatttttaatgacgaaaaagtggccaaatctcaacatcctccgaagactcttggctatctttacctgttccaacgggccacctgaacagtcaa

SEQ ID NO: 50319 - DNA, 521 bp, Heterodera glycines
ccaagtttgagctgttaataaaagcatagaaaatgccggaacgtttgacttatcgtagaaggctttgctacaacacaaagtccaataaaacgaaagtggtgaagacgcccgggggacggaatgtgttccactaccgcaataagcttggttcaatcccaaaatgtggcgacaccggtgtgccgttgaaggggattaaagccgcgcgtccgcgtcaattggccaaaatgacaaagcgaaagaagacggtcacgcgcgcttacggcggttgtctcagcgctgcggctgtccgtcaacggatcatccgcgcctttttggtggaggaacaacagctggccaacaaaatactgaaggcgaaaagtggcggtgggaagaaataatgcgggagacggacggacgaagacgggcggacagttcggtcattttaaggacggaattatttttgttgcttttttgttacctttgtgagtaaaagcattgctctgttcacaattcttcaaattacataaagggaggctaacttt

SEQ ID NO: 50320 - DNA, 1550 bp, Heterodera glycines
gagatttacaatctcttagggatgctcagttctttccccttattattgtccttggtcggcctcatcgccgtccacgccgaagtcttcttcaaggaggagttttctgatgacagttggactgatcgatgggtcacgtcgaagagcaaggatgactacgggaagttcgagctgtccgccgggaagttcttcggggacaaagtgcgggaccagggcctgaagaccagccaggacgcccggttctacgccatctcggccaagttcccgaagaagttcagcaacaagggaaagccattggttgtgcagtttaccgtcaaacatgagcagaacatcgactgtggcggcggctatatgaagctcatggcttctgacatcagccaagagaacttccacggggagacgccgtaccatctgatgttcggcccggacatttgcgggcccggcactaaaaaagtgcacgtgatcctcggctacaaaggcaaaaaccagctaatcaaaaaggacattcgctgcaaggacgacgaactcagccacctgtacacactgatcttgagcccggacaacacttacgaagtgcaaattgacggcgaaaaggtcgagagcggcgaattggaggccgattgggaccttttgcccgcaaagaaaatcaaggaccccgacgcgaagaagcccgaggactgggacgacaaggaatacatcgacgacccggacgacaaaaagcccgacgattgggaaaagccggaacacatcccggacccagatgccaagaagcctgatgactgggacgatgaaatggacggcgattgggagccgccgatgatcgacaacccggaatacaaaggcacctggaagccgaagcagatcaagaaccccaactacaagggcaagtggatccaccccgagatcgacaaccccgagtaccagccggacgacgacctctacttgcgagaagattggggcgccatcggaatagacatttggcaggtcaagtcgggcaccatcttcgacaacattttggtagcggactctgtggaggacgcgaagaaacacgcggcggacactttcgaccagctgaaggaggcggagaagaagcagaaggaagcgcatgacgaggaggagcgcaagaagttcgaggaggaagagaagaagcggaaggaagaagaggagaagaagccgaagattgacgaagaggaggttgaagaggacgaggaggagaagaaggaggaggagcacgacgagctttaggacggcgcccgaccattggccttgtcactttccatcctcaatgattgcaccttcccgggttctccctcatctcttcttttcggtatttaatggcaatttgttatttaattggttcaagagggactgttcgatgattccttcgaccgcccacaatggtctctctcaccgcctttttgatatttctttctgaaagtgaataatgaatgaatcgctgactcccatctttcctccgtgcttgttgtttttcttttgttcttttacataaaaatatttattgtcccaatttgaaaataaattgttaatttgtt

SEQ ID NO: 50321 - DNA, 785 bp, Heterodera glycines
ataggcttttgcctaaaaatcgaagccctaatcataatttatttatcttcaaaaaatctgattttttgacgacggttcagtaccgaagccatttggccacttcacgagaccgagaggagtcgaatgatttatcatttgttagatttggtgagaatgggcattttaactgcttcgaaagtgtgcactttgccacggctttcttccgctcgctctatgacttggtggtggggcccggagaaaaacaatgggcgcgaagttgttggccccactttccacggggatgaattttaccaagatcgtcttgaccgttggtacccgtccattcgatttcgcaaaaatgacgaagtgatcacgcccattcgccacaaggaattgggagattggaagaagttgagcattgaggagaagaagcttatctaccgctactccttccgtcaaactttggccgagtttgaggcattgacgccttatggctatctcacagtcactttgttcttttctatgcttgggcttactattctgtacgcttcgtttgttaggacttacgtgacaaaattcaatgaccgattgcctgacactttcgatgatgaatataaagaaagtcaggccgagcgccgtgtggtactggaaaggggcaatccttatggaccggcctactactacgattacgagaaaaatcgttggaaggactgaagtggacggaaaagtcctactcgaaattcgttggagtgttttttaattttaggggatttttaatggacatttcaaatttgcacattttttcg

SEQ ID NO: 50322 - DNA, 500 bp, Heterodera glycines
aatggcaactgttagttcatctagcaataatacatgtaaaccaagtgaaagttattccgcctcaaaaatacctcaatgtgcggaaacaatcaaaaaaatgttccacgaattgggaatcaaagagtacgaaccgcaattagtcttacaattgtgtgatatttcttactcattgaccaaggagattctcgtcgatgctcgttctgtttccgagtttagtggcaagaaacaggtggacagaagcgacgttgaccttgcgatcaaaacatttgatgaaaagcacagtaatgatcgcccaccaaaagcttttgtgtcggaattagccgcagaaaaaaatgcactgcctttacatccgatacgtcaaaattatggactccgtttaccgaatgaccgtttctgtcaactgcagcccaattacatatacatcggagatgatccgaacaacgaagaccaagcagtccatatggaagagcggcccagacaaaatggatcgtcgaaattca

SEQ ID NO: 50323 - DNA, 441 bp, Heterodera glycines
cagcattccaattaaaaatataattattttcgttatttttacacaaataacaaataaatattcatcatggcaacaccaaaattgtacaaattccatgtcgaaatgacctgcgaaggctgctcaaatgcagtgaaacgtgtacttggcaaattggaagacaaggtaaagctgctcagtgtggacctgaacgccaaagaggtgcaggtggagagcagcagtatgggccaagatgagattctcgaggtgctgaagaagacgggcaaagcagtgagtccgatcgaatgaggaacgcattcgatgtgatcagaattattccacctcctttttttttggccgatgcgatcagttccctgttgtaccctttaaacattccattccctcctctccatactgatcagtgatcgatggtcatttattaaaaaaagaatttaatcaaaaaaa

SEQ ID NO: 50324 - DNA, 725 bp, Heterodera glycines
actagtggacccccgggctgcagaatcggcacgagcccctcaaggcagttcattctcctgctgtccattgtctggtccttcaatgtcgcttggaattgcaccattcattgtttgggccgactgaggacggcaccgactgtgcttcttccaccaaatcgtatgctttgcgcagtgacggggcttcctgctcgacaacaacagatgcgaagcccgactttgcttcaacgtatgagcattgcattgacttgacctccactgttggcacgtctcaatctgcaaatttgttggatttagtggccgaatccaccagtccattggaagtgccgatgtgtaagaaatgtgccaatgcagtgactgcggagctgaacaagcaattgggtcatttggagaaggaatgcatccaatacaaaaagtcgttggaccatttgttgcgccggcgtgcggactgtccatttgacatggaggcatcgcgcatcaaattggacgctttaaaatcagaagagcgcgacctattggaacaactgacgctgttggaagacgaggaacggacactgcttcatgaattggatacaaaacaggaggagcgcaagaaaattggtgaacgagacgagcaactttatcgacagttgcgagacaaccacagtatactcattgaacaatcggatgaacagcggtcatttaaattgcaaatcaatcaggccaatgaacaaattcgacgtctgtcc

SEQ ID NO: 50325 - DNA, 632 bp, Heterodera glycines
gagaatttgaagttcaaaagagagagacgagaaaagttcagtcagtcggcggcgattccttcgaatttgcccccttcgacaagcaatggacaaatgggttcgcttcttctgcacgatgaaatggcgtccgcttccagcggttcttcgacctttgcgttggacatggataaattggagcaacagcgggtgcaggaacagaccactctactgctcgacgataccgaacagttccaccaatcccggttctactccatggaaagcattgaaagcagcatctctgagctgggcacgattttccgccagttggccactctcgtctcggaacaaggcgaaatgatcacgagaattgactcaaatgtggaggagagcagcctcaacgtggaggcagcacaccacgagttgctcaagtatttcaacaacatttcccgcaaccgttggctgattatcaaagtgttcggcgttctgatggcattctttgtgttctttgtgattttcctcacctgatcggctgataaactcagttctgcggggattccttcacattgtcatcataatcactcacagaattttattctcttaaacagcagtcaaatcattgaccaaatattcctaacttattacccattctttat

SEQ ID NO: 50326 - DNA, 786 bp, Heterodera glycines
ccaattaagacttattagatatttgcttccgtattccctctttgttgtcctgtccattcattttccatgctgctcaacaatcggtctcaattgccgttgagtgtttacggcggtggcattggcagcggagtttcggcactttccgccggtgccaaagaccattccgccaccgcttcttccgcgtccgttcgtcggcccccggtcagccaatatcagagcacggagtgcgtgctgttcggcagcattttcaacgatcagaaagaccaactgatccaacggctgaagggtctgtgcgacccggacggaccgacgcccttttttgagcacaacatggtgttcaagctgaagacgggcattgagtcgcctgtccaagtgcaaatgcgccgtcgtttcaaagtggacactgtgcattggcactgccgttacgtgtcccaacccgaggcacacattaaggacgtggtcgtgcgcaaggtcatcgactcgttgattcattccaccgacatgatgagctttgtcaaatcgttggggctgaggatggaatacgaatacattgccaacggtttcctgttcaccaagggtgacatccgcattctgctctaccaactccaatgctcggagaccatcggcaactacaacaagttgaagcagttcggcgactcctttctggtggaggcctccgttctgttgccgggccatgggctcgagcacttgcaacaggcggccaaatcggtgaaggaatttgcggaccaactgcacccgttgtgcaagctgagctacgtggactat

SEQ ID NO: 50327 - DNA, 681 bp, Heterodera glycines
cagcatcatcatttgcttctgttcatccatatgattgtgaagcctgttaaaaatttttttcaaaagaatgtgaccaaagtttggctgaagccgccgcctcatgacacttttattgagccttggtttccctatgctttaattctaaagccaattggtcgagcatttcagcgtttgggcgtatacacttacaacaatttcatcgcccgaaccacttttggtctttacccgcgagaatggaacccgcgtgtccacggcccatatgttcattatcgttactacggaacaaacaatgacattccgctaatggaagtcaaagtcaatgacttggccgcgtacatcgcccgtcgtgacaaatctccgcgtgccatttggcgcgaatttatgcgcaacttctacaagcttcagtacttctacttctcggggcccgagttcggcaaccctttgacaatgatttggcgctatctcgtcattttcatcgtcggctttttcttgaccctccgagttgtgaccggcgcggacacgcgtttccgacacgctttgtaccattggtagacggacggacaaagagggccgatgagagaaaaaggaaacagagcgatagagcagaaacaccgtccgaattattgttaggcaatgtctccatattttctgtgctgttattaaagcctattgtagtttaaa

SEQ ID NO: 50328 - DNA, 476 bp, Heterodera glycines
ttaagcatcgtttgctcttcgattgttggccatattttgtttgatgagattcgatttctcgagtgttttcacccattttaacccatagtttcactgtcatgaaaattggacatcggaccccgccgaggcagaaaagagccactgaccctcccccacagttcgattcttccgatttgggctctccgcaaaaggtttggtcactgttatgcgagaaggacgagaaattgcgccgagatccgcacgtattttcgcgccagaagaaaataaacgccaaaatgcgtgccatgctgctcgactggctgatggacgtctgtgccgacaaacagctccaccgcgaaaccttccatctttgcatcgattacatcgaccgtttcatcgcattgagtgaccaccaaatgcagccccagcgattgcaactgttcggctccaccgccctggtaattgcgagcaaagtcgaggaaatttatcctccgaaa

SEQ ID NO: 50329 - DNA, 862 bp, Heterodera glycines
ggtaaatttactggcaaatcaacaaaaattaggccatcgaccgctaccatgacgacgacagaaacgccgacggcaccgcgcttggaccacaccacgggctggacctgtttggcgtgcaaattggtgttctccagcgggcaattgcagcgggaccattaccgcagtgaatggcacctgtacaacatgaagcggcagattgccaacctcccgcccgtgacggaatgtgacttcctggagaagcttcagtattttttgcaacaccagcagaagaatgctttcgatgctgaccatcgtcgtctgtcctccctctctgtttctgctgctgcttcatctcttcccctcggtgcctctgctgttgcttcttctcttcccccattgtcttcctccaatttgtcgtcttcttctccgtcttctttggtttgcactgtgtgccgcaacaaacgctttcggtcgcgcaacgcctttgacaaccatttgcagtcgcgtcggcacaaagaggaagaacaactgcaacagcagcagaagacgacagcgacaattgaggctaatgagtgccaaacggaggggcgagaaaatggcggcatggaagcaaaattgccaaagattgtggcacaaaacattgatggtgaagaagaagcggttttgccaatcgaaagtgataatgatgacgatgaagaagcggagcagaaagaagacaacagttttgccaaaaaagaagacggcatcccgccaaacgaatgcctttactgtgaactcaaatccgacacttgggaggcaaatttggcgcacatgagcaagcagcacggttttctggtcccggactcgccattctgcacggatgtgcccgggttgctcacttatt

SEQ ID NO: 50330 - DNA, 638 bp, Heterodera glycines
gtccaattaagattacactcacaatcttatctacctagttattttttcatttgatcaactacacgattaaaagcgtcaatcatgggcaagggattccaaaattttatgtccaagaaggacttccatccaagtgcatggtggaacttaaaaaggaaatgccgaagctgagcaaaagaatgacttggagaaaagaagacaggatgaattgcgtgtccaatatgagaaggagcaagaaattctcaacaataaggcacttcttggtgacgaaaaagcgaggttgggcctttctttcatgtacgatgcgcccgctggcattaacaaaaagaaggaggaagggccggaaccgaaattcgaatggcaaaggaaatacaatgcaccgcgtgaagaatgggcgaaaggaaatgaactcatccaggaccaacctttcggaattcaggtgcgaaacgttcgctgtgtcaaatgtcgcgcgtggggtcatttgaacacggaccgcgaatgcccactgtatggtatgagtggaaatgctgaagaccatggctatgcaaataatccctccgatatcattcgtgatttaaatgtcgaaaagaaaacaaagactgtctctgatgtcacgaccaatgagcagattgatataaaac

SEQ ID NO: 50331 - DNA, 476 bp, Heterodera glycines
gttcattttgagggtgccgatgttgacgcgtctggttctcgttacggtgcatcaattccatttgaaaaagcaatgcgaccggaagtaattattgcatatgaaatgaacggagatgtcctcacgagggaccatggctttccaatccgtttggttgtgcctggtcatgtcggagcccgacaagtcaaatggctgaacgccattcgccttagtgacgaggagagtcccagcacttggcagcaaagggactacaaagcatttccaagttccgtccaaattggcgatccactgccctttgacacaactccagcaattcaggaatacccagtccaaagtgtcatctgtgaaccaaactcaaacactaaaattgcaccgggtgccaaaactatcacagttcgtggatatgcatggagcggtggtggaagaggaattattcgtgtcgaagtttctccagacaatgggaccacatggaaatgtgc

SEQ ID NO: 50332 - DNA, 487 bp, Heterodera glycines
aacgtggacatgctaatgagtataatcgtccccgaaaggcgtagcattgccagcgccattcagattctcttttcccatttgttcggcgatgcctccggcccctatttggtcggtgccatctccgacttcgtccgcggctcttccgatttgccagccgatcgtttccattcactgatcgtcgctttttatctgcccaatgctttgctttttctcagcggcgcggcatttctcggcgccgcttattcacttcccgcggatttgaaacgaatggaagcggaaaaagctgcggcagagagcccaaaacccacaacttcggccaccattggcccttcgtccgctaacattggtccgcaagggcggcaaaacgaagcttttgaatgagagggaaaagcagctgataatgatcatcatcatctctgcgtttcataatcattctgttatcgaattctcacattttacttttttttaaattctatttattttattt

SEQ ID NO: 50333 - DNA, 628 bp, Heterodera glycines
accattcgatttcaaaacaattcctttcaaaacaaaataaatgggcacaccctccaggcgtggcaggaaaagaaagtctgaagtagtgcccgataaaagaacatcgacatcttcagcaagatcaaaacctttgatgccgcgcaaatcatttgtgccgttgtccattgaacagtttcggccaaccgcagttggcacacgcgtgctgagctgtggcgagggcgaacaattgggccatccaaatcggaacacaacgaaaaagccgcgtgccgttggcacattcccaaccgacatgacatttgttcaggtcgccgcgggcggtgttcactcgctggtgttgaccactgatggacgtgtgttcagttgtggcatcaacgagaagggcactgtgccggtccaaggcctggaggcggaaggcaccaccgacacattcagcgaaattgtgttcaccacggacatccaacggcttggcaaaattgtgcagataactgccggcgcgtcattttccgcagcgctcaccgaaaagggcagtgtcatcgcgtggggaaatttgagggatacccaaggggaagtcaatgtgcacgagacgctcacggacatacagaagaaaccgatggtggtgatgcggcac

SEQ ID NO: 50334 - DNA, 487 bp, Heterodera glycines
ttcattactagtttttattttttgaataatggacgatgatgacgcaatcggtggtgctgaggcattcaaatgggaacaagcttacacggaagggctgaacattcgttcggtgctccaagaggacgaacatggctccgtcgaggagtccatccgtcggttggtcatggacgagaagcgacagcgacggatggaccgactgccggccaaaatccgactcggaatgatgcgttatgtccatttggctgtcgattgttcctccgccattctctccgccgatttctttccctcgcgtctctccgtcgcgttggaatgtcttcgtaaattcgtcgacaaattcttcctgcttaatcccctctcccaaatgggactcatcgctgtgcgtgacaaacgcgccgagcgcatcagcggatttaccagttctgtccaatttctgctcgaatctctgcaggacatcagttccaccaattgtggtggtgaattctctctc

SEQ ID NO: 50335 - DNA, 716 bp, Heterodera glycines
gtgaaatatttaatggcacaacctgctaagcgtgttgctgtcagctcagttaactgggctaagttggccgaacggctgacgccacaacaggaggaggagcttaatcgtttgaaagcacaaaactcttcatatcatgcagaggttgtacaacaccaggctgatctgcctaaagttgactgggctacactgaagaagcaaatgccggaaaattcgactgttcttgactcattgcagaagcaatgggaagcgttgtgcattccatacggaacgatacctgacaatctgaagaaacaaattgaccagtgggtgaaattcaatgaggcccgagtcaagtttcacgagcttaagacggcggatggacttgtggaaatgaagaagattgaagacaaatgggcgaaaatgccgccagtcgagcagctttggcgtgaccaactcgtccagtatttcccacataagtatcaggaccttcgctatctcaacgagtattatgacccatggggcattggtgttaatgacaccaattggcgcgagcgtttcaaggacttccagagtcgtcctcgagagggtgcaacgcttcactgatcgcatgattttacaatttaggaaattcaacgtgattttatttggaagaagttattcgatagagatgttattaaatggacattctcttttgcacaaattggtttagatgataaaaatttgttgctctcaaaaaa

SEQ ID NO: 50336 - DNA, 667 bp, Heterodera glycines
agccctttaaatgtgcatatcatcatcctttgtatcacttcattttttactaatttctgaacgaatttaattcccaaaaatggcctccggtttttgggcatttgttggcagagcttgggaatggctgaaaacgttgattctgccacagagtatcaatgggacttgtctcaaccaaacgttcatcaacgacacgccatcggcgggagaatttttggccgatttggagccctttcaaattgtgcttctctctgttggcagtgtgctcactttcaccgtttttctgctcgcctttctccagtggtggtacattttcaattacgtctcctcggagcagcggcgcaacaaactttacttgctcatctcattgttccccgtttgcactttttgctgtctcgtcggaatgttctgtcctcgcaccgctctgctcgtctcttccttcggccttctctatttcctcctctgtctttttgttcttgtttcactgatgcgccatttgtccggtggtcgtgccactttggccctttctctcaccgacaaaggcaaattgatcgatttccgtggtcctccattttgctgtcttctttactgtcttccaagggcaaatccgacagaggtcaatttgacacgacttgaatggatcgtcctccaggcgcccatcatccgagtt

SEQ ID NO: 50337 - DNA, 1439 bp, Heterodera glycines
tttgagataatgccaatcatactgaaccaaggcatattatcaaccacatgtgatgagcagcaaagagagacgctcaagcttcaacttgagccagcagcagaatacaatgaaacaaattttaaacgaacggtgttaaatgcgtccggtacaccaatcaatggagcgttcactttttggtcagccccttccactgctgctccggcagcgacagcatctgtctccaatttatcggccacaacaacagttatctcatctgaaccggatctcactccactcacaccgtccacttcggacgtgacagttaatggccacagcagcaatgtgaaggtgcttaagccggtgccgttggtgatccgaacccaaagtgcggacgaaattgcgggtgccgttgcgcacccgaccaaaccgtcggagatccggaaactgatccggtcaaagatggtccgatgtcgcatttgcaggaaccgttttctggacaagcacatttatgagcgacatttgcgcgacaggcatcccaaggaacacgcggcttatctgagccaacaggaggacgaagttcgacagcaaagaaaggaagaatttgaagcgaaccgattagacgaactcgtcagtggcggtttcattccgcctcaggaggatttggatgcatcgaaatacgaagtgaacatcaaagagattccattgcccggcgaattgaccggcggcgtgcccgcccggtttgaccgcttcggtgtgctctttcaaccgaagcgggtgtacaagaagaaggtgtcaccgcagtgcccattctgtgacaagcgctaccgcaacgaatattcggtgaagaaacacatcgccaaaaagcatactgaatgcgcggaatgggcccaatgtttgaagtgcttcaaggcggtgccgagcaaggccgagatggtggaccatctgggtgaaatgatttacctctgttttgaatgtgtgccgccgcgcaatctgtgcaacgacgtgcgcctgtacaaccaccggacaaaattccatcgtggccaaaattcggggttcaaatgcaacctgtgcaatcagaagtttttgacgccgcgcaagttgcgcaagcacaagaaaatgtcgcatgtgttcaccaagacttaccagtgccatttctgcgaggaactgttcatcaacgaaacggcggtgaccacccacgagcgcatccacacgggcatcatcaaatttgagtgcaaaatttgtgactacaaatgcaatcgtttcctgaacatggaggaccatgtgaaggaggaccatggctatctgtgctccatttgtcagagcaaactcagcgaatggggtgacctcaaaaatcacatgctcatggaccacggcggctatctgtcgtcagagttcaactcagggtacatcgaaagcccgcgcgtttggctgatgttcaagggggactgattgatttgacg

SEQ ID NO: 50338 - DNA, 343 bp, Heterodera glycines
gaagctgaaccctttcgtctcctcctcagcgcgcaaatcgcgcaaacgccatttcaacgcgccctcgcacatccgtcgtcgcattatgtccgcgccgctgtcgaaggatttgcgcaataaacgcggagtgcgttctacgcccattcgcattgatgacgaagtgactgtcacccggagccactacaaaggcaatgcccggcggataatgcgtgtgtatccggaaaatttttttattgcaccgttgacaaaaatcctcccggaaaagggccaagggaccaacgggcccaggttgggaattttccctttcaatggtggattcccaaagtttgaaaatgggaaaagg

SEQ ID NO: 50339 - DNA, 519 bp, Heterodera glycines
ctcaagacaatacgaacacaattcaaagtaaatccaagtcaggatatcctacgaaaatggttattgtctatcgaccttacgtcagtcgttggcgccgagcatggacagttatcaaggcaaagcctcgtttctggctcaaatattatccagaattttctgcgggctggtatatgctggttccatcggtcattatttgtctcggaacaaggttctattttggcgggtatccaaacaacttcggcatgggctggaacgaaaaacccttctatcgtcagtttttcgaggtgcgtcgtcccgatgatccattggttctcaaatggcgtcttcctgaggaatatcccgctcgtttccaaaccaaccgtcagtccgactactaccctactaccgctcacaacaaacactacgcctgggacgtgaaataactgcgtgtcgagcgaacagcgaacgacaagaaaaaaacatgcacatttattttatgttacgtttaggaatgacactgtaaaatgttctgccaaaaaa

SEQ ID NO: 50340 - DNA, 399 bp, Heterodera glycines
ggcaccgattcgattaattacttgggtgttcgccttttgtgggtgacgggtcaatcgggcgcaacgctgcaggccaaactctctaaggatttgatgttggtgcatatgtcggtgcctcgtacaatgtctcccgttgccatctccgttctcggcgagttcgttcagccggcactgaagtcctgggacgttttgagcgttcaggaagaaatggcgtacgacctgagccaacagagtccatacgatttgaccatcgaagggttgtaccgggcggcgttcaggaacgggtcattgtccaacgcgctgttgtctccccattatcaaattgggaacatcaccaacaagcgcactcaacaatttgtcaactcgcgctggttgaccaaggagacggcactgatcggg

SEQ ID NO: 50341 - DNA, 500 bp, Heterodera glycines
aattaaccgcatatttgccactgacatcaccatggcggacattcaaactgaaaaggctttccaaaagcaagccatcttcttgaacgccaagcaggttggcgccaagaagcgcggtcagcgctggtacaaggatgttggtcttggcttcaagacgcccaaggaggcgatcgagggtcactacgtcgacaagaagtgccccttcaccggcgacgtttctatccgcggccgtatcctcaccggcaccatcgtgtccaacaagatgaagcgtaccgtcatcttgcgtcgcgagtacctccactacgtcaagaagtacaaccgttacgagaagcgccatcgcaaccttgccgctcacttgtcgcccgctttcgttggtgtcgagtccggtgatgttgccaccgttggccagtgccgccctctctccaagactgtgcgcttcaacgtcctcaaggtccagaaggccattgctggctccaagcagttcaagaagttctaaaatcttg

SEQ ID NO: 50342 - DNA, 477 bp, Heterodera glycines
  unsure (1)..(477): unsure at all n locations
tgtaagacaaattttacaaccaaaaaaaaaatggttcgtcttattcaaaaccaattttggcggggaacgttgacgcagccgtggggtgtcaagatgttcaagtacatttggcgcaagcacagtcgttttttggtgaaaacggttatggtccaagaaaacgacatcgacagcgcatttcatctgctgaacagactcatggaacgtgaagggcttttgaagatcatccgcaacacccagcgctatcagaaaccgtttatgcagcgttcccaactgtccatcgaggcgtcgaaggcaattctggaggaggaccgggaccgcaaactcaaatttttgggagcgcaaacaccgcgcggacgcgtacccggggcaactgacgatgtgacgggggcgggcggaagatttgtcattgtttttttcactcaaatttttttttattggtaaatattcatgtcttccaaanngggaccaaanngagaa

SEQ ID NO: 50343 - DNA, 868 bp, Heterodera glycines
gcccatttgaatgcggcggaaagggggcgcccttacctttttattgttgcgcattacgacacttacggaataatcccgtcccttggcattgggtccgactcaaacggcagcggaactgcggttctgctcgaactactcgccattctaagccaaatttattcattaccgtcacacaaagcacgctacaatttggtttttgttctttcggcaggagggaaattcagttaccagggaagtcgcagtttcatcgacgacttcaatgaacgccattcggatgagcgtattgcccttgcaatttgtttggacagtttggctcgcggcgattctctttttgtccacgcctcaaaaattccatcggatgagacgaaggcttttcgcttcattcaaactttgaggcattttgccaatcgaccagtcgagcttatctcgaaaaaaatcagtttggcttctgataggttggcttgggaaacacgaaatttacaacatccgacgtattcacgccgttaccatttcccacttcagcaaccattccaaccctttcagaaattcgttgctggacattccgacttcgttagatttctccatgttagaggacaatgccaaattaattgccaatgctttggtttcctttgtgttcgacttggactcgcgactttgcaacaacgccaaagagaacaatttggcctgttcactgcttaatgatgcagttgaagttgacccaaaaaggctcaaggcgtgggtgtcgatgttcgggtcaaagtcgcgcccaattgtcgtgtctcagcaccaattggtcgccaatctgttcgaagttgtcaaacgacttgctcacagtgcacacgtttcagagattgtggtcaatgattat

SEQ ID NO: 50344 - DNA, 667 bp, Heterodera glycines
gagtgaagtaaaaaacaatgattgtcaatggttcgttgaaaatttgccggacagcgctcggtccgtttgttcgtcgggcatcggcttccgcgctgggtcttccgcttgaggacggtccgtccgtttctccaccttcggtggaccgcgcgaaggacatttcgccgcgcgtccgttcgctcgtcgaccaaattgccgaactttcattggtcgaagtctccgatttgaattttgctctgaaaaagcgtctgaacattcccgacactcccgcgatggcaatgagtccggaaatgtttgcagctgccggaatgtttggagcacaagcgggcggagcagcgggagcacaaacatcacaagccaacgcggacgacgattcggcgtccacaaagacttcgtacgcggtcagattggccaaatttgacgatgctaaaaaaatcgcactgatcaaagaggtgcgaagtgtgatccccggcatgaatttggtacagaccaaaaaaactgatcgaatcggcgccggtggaaatcaaaggggacatgggcaaaacggaggcggacgaactgaaggcgttgttggagaagcacggggcggaatgcgaagtgatctgatgaacatttgaggggcgaagggacatttttgtttttgtttggactattattttctatatttgtt

SEQ ID NO: 50345 - DNA, 306 bp, Heterodera glycines
gaaacatcaaccgatggagggaatttcgacgatggaggaccgtgcgtttcaaaagaaatgcggcgaaaaataaattacgagattcggaagaacaaaggcattcgaaaggacaaagggcgaaggaaagctaaacagcggcattcgcgggtgatgaagcgaacgcaatacgaaaaagcactgatcaagcgcaaatcgcaggtcccaaacatgcgtcgggaaatggagagatatgatggtgaaaagcgtggaattcgtatttctacaatccgttccacaaaattttaattttgattaaattctttcttg

SEQ ID NO: 50346 - DNA, 604 bp, Heterodera glycines
ctgtcattcgctttaaatgatttccggtcaccgttcggttggcagatgtttgctgtctctgccacaatttgcaagtcggttgattcccatttacggccatgtccaggcacaatgtttccacttcatgaaaaaacaagtcaccgtcgacccagaaattgcaaaactgagagagggcagaaaacggcgtaaattgacaaaagcaatcaaaaagctggcggagtacagcaaaaagccggtaccggttgaggagattgaggtcgacctacgccaccaggcaacgaagggacagagggaacggacggacaacggagtacaaggacgagacgagaagaaagaggcatatggcagaaagaagttgctcaagcagtacgcccagtcgagagccaggctggccagaacggacatcatgtggattaaacgttcaattgatgcccaagagaatgcgttggaagtgttgaagcaactctctcccacactttacgaagcggcggtacaactcgacgagcgcttattctacacacaaattcaaggtccaccaatcagtccgccgattgacaattacaattgcccagacggggagtaccaagacgtaaccaagaaatgg

SEQ ID NO: 50347 - DNA, 462 bp, Heterodera glycines
ttgtcaaatgaacgccattcgccaaaaaaagtgaagagcaaagagaagcagaggaaaagaaacgcgctgaaaagctgcaacaatttgttgattcaagaaatttggtctttcagaagagaaaatccggtgaatacgacgacgaagtgttgacggtttgcggagaacttctgaagaataacccggacatttacacactttggaatgtgcgacgggaggccattgaaaagcgagcgacgaaatgtgaggacgaaagtgacgaggaattggccaaacgaatctccgagctgatcaatggcgagttgaagttgacgcaaagttgtttgttgcgaaacccaaagtcatattcaacgtggcaccaccgctattggtcctgtcttcgccaccccacgccaccgttgcgacaagaattggcactttgcgaaaaggcgttgggccaagactgtcgcaattttcactgctggg

SEQ ID NO: 50348 - DNA, 573 bp, Heterodera glycines
ccacctttgagtttcattgctttttctattgaaaatgaccgaacaaactgagcgcgcataccaaagacagccgaccgtgttcttgaacgacaagttcagaactcaaggaattggaaagaaggcggccaacaaagaccgttattggaagaatgttgggcttggctttaaaactccccgtgaggctattgagggcatatacattgacaagaaatgccctttcactggaaatgtttcaatccgaggccgaattctcaccggagtagtcatcaaaaacaaaatgcagcgaacgattgttatccgtcgcgactatctccatttcgtgccaaagtaccgtcgttatgaaaagcgccacaagaacatgtctgtgcattgttctccgtgtttccgcgatgtgtccattggtgacatcgtcacaattggcgaatgtcgtccgctgagtaagacggtccggttcaatgtgctcaaggtgatcaaagcatcgggggcgaagaaggcgttcgacaagttttgagagacccttatttgaccaccctattcattgttgctgtttgttatgacaaaattttggttgaa

SEQ ID NO: 50349 - DNA, 376 bp, Heterodera glycines
ttgagaccaaaattaatttgctccctctctaaatgccgaaggaagaagtgcccgaaggagttgaccagctgacttattttcgtgagcaatgcgagcataaggttgcccatttgaagtccattttggaggaatgcaacgagcgcgtgcggtccaagccgaagaccactgaaatttgtcacatggagatgatcgactacgtggagggcctcgatcattgtgccaaaccgaaggcattcaaagcactgaaatgatgcccttcaccgccggatgattactttaggttttttgtctgttaatgtttttcggatttatgacgacgatatcagcaagcttttcaaatggatattaatcaactggtaaaatatgtaattaaaaa

SEQ ID NO: 50350 - DNA, 705 bp, Heterodera glycines
ctcacgcttacgcttacccgcccccccgacccacccaagcaaatcatctaacatggctgacactgttgaggttgccgccgccgaggtccacgttgcgtcgaccatgactgtggaggaagccctccaggacgtgctcaagcgttccctcatccacgacggccttgcccgtggtatccgcgagtccgtcaaggctcttgaccgccgtgaggcccacctttgcgtgctcgcccaatcgtgcgacgagaaggaatacgttcgcctcatcgaagccctctgcgccgaacacaacatccgcctcatcaaggtcgaggacaacaagaagctcggcgagtgggccggtctctgcaagatcgaccgcgacggcaacccccgcaaggttgtcggcgcctcggtcgttgtcgtcaaggattggggagaggagtccgaggctctcaacatcattctcgagtacttcaagtcccaataagttgggtcctctgcgaggttggtcggcgcacgttgcgcacgcatgattgtcggtttgctcgctcgctggcgttcccgggtttctcgttccaagattgacctcggcgctcgggttttgttggttgcgagtcgagccggtttctttgtctgtgtgtgtttctgcgtgccttcccatcagcccattgtactttttcttgaatgcaacgttgcgtgtccttgtggcacactcattttcgcttt

SEQ ID NO: 50351 - DNA, 489 bp, Heterodera glycines
ctaaagcttcgtttgcatggatttagtttaccacgaaaagcaagttggacgtatgtgtgctcaacatgcactgaacatgcttctgcaaggcgattacttcacgcccgattctctcgcttcaattgctcaagaattggaccaaagagaacgtgcgatgctaagggacgaatctgagtttcaaagtcaaaattacgacgattcgggatacttctcaattcaggtgaaactgaagctttgcgtcgtcaagcgaatttgagtctggagcctatcataagcccaaatgctatgaaggttttgcaaaatccgagtttggcacatgcttacatttgtcacctggaggaccattggttcacaattcgcaaaattgggacgacttggtttatcctcaattcgctgttcaaagcaccgcgcattgtatctgaaacgtttctcgaattgtacgtccatcagcttaataccgaagcgcccaacatttttggccatgacgaa

SEQ ID NO: 50352 - DNA, 687 bp, Heterodera glycines
  unsure (1)..(687): unsure at all n locations
caagtttgagatggcatcaaaaattgttccaattgccgtttcgccctctttcaactttttgcgtcgtccattgccttcgttggtctttcgtcgttctcttttcaaatcgccattggacgcgccgttctgtggcatttacaggacaaatggcgggatttgccggacggatgacattttggtgtgccaacgcaagatggactatcaccttggagcaaatgtccgtcatcaacggggtcggaaccagcacttgttgaaagctaattgtgacgggacggttgtgatcacacgcggcaaaacgttcgaagagttcaagcaggagtatgagcgtgagtcggtttcgaggcgtgcggcatttactcgcggcaccattttcactgttcttttttatccgggcatttttgttggcattttggcggtcatcagtgtcatgtctcatcgctggtacacttatcatggcactggccgtgaacttcgccccgtgtcgaacgccttcgtccgctttgtcgccgctttcttcggttgttacagctattttccctacaacactgaccccgaccctgaaccaatcgctgtcgttgaaaaggaatgagtggtgaagaggaaatacgatttaggcaagcaaccacaacactttggtctttttattgttatttccctggcacataaacacagaccaaatgcaantaa

SEQ ID NO: 50353 - DNA, 358 bp, Heterodera glycines
  unsure (1)..(358): unsure at all n locations
aagggggccccgggctgttttccccaaagagggcttattgtagtaaaaatgtccgaaaataagtccgaaggtggtttctgccaagaagaagagcggtggattcaacacgaagaagtnatatttggacctcgcatccggcggaactgctgctgcagtctcaaaaaccgctgttgcacccatcgagcgtgtcaagctgttgttgcaggtgcaagatgcttccattcacatcaccgcggacaaacgctacaaaggcatcatcgacgtcctcgtccgggtntctttttttttttggctttctgtcgttgtggcgtggtaacctgttcaactccatcccgttcctttccgactcaggcgctga

SEQ ID NO: 50354 - DNA, 846 bp, Heterodera glycines
gaaagaacaaaacagcggcgacgaggaggcggaagaagcggacgaacaccggacaaagaaaaggggcatcctcagcttggaagacggcatcatcgtcgatgccgaaccgcttgccaagcgggagaagaagcagttggtcatccccgtcctccaagtgtccagcagagcacaaatttctcgcattcagaagctggtggacgagggaacagccacagaaacagacttagcacgactgtcgctgttaatcgacagtttggacgacgagcaaaggaaaactaccacattgccattggacgcgcgccaccaaaccgtgccgaccgttgcggtggcggacgacgacgacccggactacgcgagtgtgccggtgggcgagttcggactggcttttttgcgaggctgtggctggaaggacgagaagtcgtgcatcggcaagtcaaatccgcaggtggtgccactgcgcgtcatcgaaccaaggccaaagggactcggacttggcgctgtccttccgacaacggcaccgccgacggccaacgcgctaaaggcggcagaaaacggtgacgaagaagcgacaacacttggcaaacactcctacgtcagatgcttatccggtctgaacaaaggctcttatggccaagtgatgtcaatggacgaggagaatgccagcattttcgtcgagttggcatggccccccgccaacgttggcaaaacggtgcgtgtcagccaatgggcggtggaagtggtgagacggaaagagtatcgcgagtgcgtaaagggcggcagcggaggaggaggaacagcggagaacggacggaggctcgaaagggtccgagtctgatggaattggca

SEQ ID NO: 50355 - DNA, 671 bp, Heterodera glycines
gttttcatagtgacttttttccgtgctcctcagctgctcatgtttgaatacatcgaccaacttgacagtgagaacaaacacgaggaggcctattgcctgttggccaagcagagcctgaacaccggcttaaatcagcaggaaattctgtggcgacttgctcggtcatgtgttcagatggcgtacccgctcgacatgaaaaacccgaagaagaagaaactgcttgacgaaggccataagtacgcctgctccgcctacgagctgtgcagcgacgacttcaacgtgttgaaatggactgctgccgcggttggctcacggacggactttctcggcacgaaggagcgcatcgaacagggcaatttcttcagggatgttctcgacaaggcattggccatcaacccggaggagtacactctgcttcacatgcgcggcaggctcgtcctctcggtggcttctctgtcgtggattgaacggaaggcggccaccgtccttttcggcccgccgcccgaagtttcactcaacgaggcgatcagagacttcacggcggtgttggagttggcgccggattggctggagaacactctcttcctggccaaggcgtatttggccaacagcgacagggaaagtgcggtgcaccatttgaaacagctgatcgattcctaccagcagaacga

SEQ ID NO: 50356 - DNA, 799 bp, Heterodera glycines
ccaagtttgagtttttttaatggccaacaattttctctccgttcgtcgctttttgcattgctgccctccactacgaaatgttgtcaatggcagatggacgacaacgcattacacacagaggccgagagaaaaggacggaaggtggaaatgcgtggacatggcttgtgtggaggacgagttcgacgtggtcattgtgggcggtggccccgctggactgtccgccgccattcgcctcaaacaattggcggcggagaaggcaaaagaattgcgcgtttgcttggttgaaaaagcacccgaaatcggtgcccatacgctctccggtgccatcattgagaccggcggattggaccgtctttttcccaattggcgagaactcgactcgcccatcaaacaggcggtgaagaaagacgcattcgcaattctcaccaaaaatggacgaattccggtcccattggtccccggcgtcctgctgaacaaccatggcaattacattgtccgccttggtcatttggtgcggtggttgggcgaacgtgcggaggagcacggggtcgagctgtactcgggcattgctgcgcaggaagtgctttttgacgaggctgggaaaacggtgtgcggagttgcgacgggcgatgttggaattcacaaggacggaagcccaaaggagagctttgaacgcggcatggaactcaaagcaaaatgcacaatttttgctgagggctgtcctggccatctgacaaagtcagtcattggaaaattcgggctcagggagggcagagacccgatgacttttggaaatggg

SEQ ID NO: 50357 - DNA, 733 bp, Heterodera glycines
gctcgccgtatcgccttcacccttttctgtgctcgatggggaccgtgtgccgactgtggacattagccaaaacaccgccgaataccgcgaattgatccccgaggaggtgacctagttctaccacgagctgaccgaggatgacaaaaacgcacttaatgaagtggcagaacgccacgaggaattccggacggaagagcaagcaatggaagcgctgaaggaaaagagtgagaagctgtacaacaaagcggtcgaactgcgcacccttgtcaagggaaaaattgaccaattggtgcccgacgcgaaggcattcgtcatcgggatgatcgaaaaggcaaagggaatgcgcccgaaggccggcgagaagccgaagcttgaggagctgcgcacggcggccaacgagctgatcgagaagtacaaagcattgaatgacgaagccaaagagtcgctgaagtccaacttccccaagattacgagcgtcatccaaaacgagaaattccaaaccttggccaagagtttgctgaaacaggaggcaccggccgcctaaacggcggcacttaggaaggaacggactgatcactgattaattgatggaccattgcgcttaatcttttgccattattttgtaccaaaaaaacagacagaacagaatttgtgcatattcacatacactgataatataatattataataacttttctcagtcttttgtaaatggctaataaattgaattgcc

SEQ ID NO: 50358 - DNA, 533 bp, Heterodera glycines
gcatggaagactctgagcagaatattaccgaacaatcggtatcggctcccaccactgatcacgacgaatatgaagaactttgcaaattggtcaacccaatctcaaaaccgcttgcaaacagaaaattggcaaagaaagtctacaaattggtgaaaaaagcggcaaaagagaagggctttttgagacatggattggctgatgtgatgaaagccttccgaaagaatgaaaaaggaattatcgtcttggcaggaaacgtttcaccgattgacgtgtacagtcatattcctgccatttgtgaagaaaagggtcttccttatgttttcactccgtcccgtgaacaccttggtctttgtgctggctataaacgtcctgcaattgtccttttggtgaagcgacacgattcgttcgcggagcttttcgatcaaacgcacgagtcaacttatgcgctggtggtggaaccggaataagcttttaattccaaaattgttgtttgttcgttttgtttcactcaataaacaaattgtcttaaaaaa

SEQ ID NO: 50359 - DNA, 653 bp, Heterodera glycines
  unsure (1)..(653): unsure at all n locations
attcatacaatgtctaccttttattcgttaaatgtttcttcgaattggctgaaatatttatctcttgggacggctttggtcgttggctatgcagtttacattgaccgtaaacgtcgccttgacccggaatacaaacaaaaaattcgtcaaaacaggaaacagaaacaagccaactttttctacgcaaaaatgagcggaggagttgattttcccgacccaagtgatccacaggcgaatgagatcttcttcttcagtcagatcactcttggagaggagaaaatgcagactggccacattgaggaggggattacgcatctgtcgaatgcaattgtgacttgctcgaagcctgacgaattgctcagaattttccaacagaccatcccaccggagtgtttcagtttgcttgtgcaggcaattcctggcgccaaaatgcgtcggaatgcctcttcatcgtatcgccatgggcgagagccgattgatttagactgtgcaaagattgacgatattggtgacaatgcggtcgacaagaaaatgtttgttttgcaagatgacgagcttgaatgaaatggaatacgacaggaaagcaggccactccaaattatattttgatttgtttcgaataaatttgaaattttcaaaaaanaaaaaaaaaa

SEQ ID NO: 50360 - DNA, 811 bp, Heterodera glycines
tcatcaaagggcctttgctcactttccgactcttcgcacaatgaatcgcagtgtcttctctcctcccaattgttctttgtttcgtttggcttttttcctcgtcttttgtttgcttagtgccaatgccatgaaatttgctgtcaaaggcgatgacaacaaatattgcatccttctcgactctccacaaatcactggcgcaattcgttacgaagaaaaaaatggttccttcaacacgaccactttttcgctttcaaacagctcggcttcggttgacaaaaatgccagcagttgtgatgcttccattcagcgaatttccatccaatttgcgcctctcattgagggaattgccaccgaaatgagcaaaaaatggaacatcactttggaattcaccaaaaaggacgggaaaaactacgctttgtccgactattcgctgggtgtcgttttctttccggcacaaaaggcatcgcaaaaatcccatgtctacgagaagaacggaaccgcggaatgggtcgcacagctcgaaagtgaccagtccaaacaccccaacgggttcacctgctccgagaacaaattggcgctgtccgacgcgtccacgattaattttgaatttctgaagttggttgcctttgacgacaatgaaaaggacgaattcagagacgggcaaatcttcgagaactgtcctttggatgcgcgtacttcggatttggtgccgattgtcgtcggtgctctgttggccggccttgttgtcattgttctgatcgcttatttgatcggccgcgctcgtgcaaagcgacagggatacacttcggtt

SEQ ID NO: 50361 - DNA, 468 bp, Heterodera glycines
atgggtcagaaattagctgttagtcttgacgattattttcatcctgagacggcacctcgaattgacagaccaccgacgtttgatcctttgtatggttttccaaagggtcgcaagccaagagaaatgcaggcttcgtgggaagaattggagaaaatgaaaatgccgattagtgagcgagattattgtgcccataaaatggttgctttgcgcaaatgcgtttgggatagggcgccatttgcctcgcattattgccatggacgtcgacacgatttgggactgtgtctttatgatgatcatttgatgcgtatgaaagaatttgagcgggagaaaaggctccttatgagaaaggcaagaaaggaaagggcaaaggctgcttaagaaactaatgttgatttgctagacaattgtatctttgtggcctctgattaggaatatttccatgtttatgtgtaaaatcattgcttaatt

SEQ ID NO: 50362 - DNA, 816 bp, Heterodera glycines
attaaggcttgcgcaatggagcagctttttcagcaggcgaatatggaccttcatcagatccatctcgaaatgagacatttggagctttgtaaaaatgagagtgaagcgcagcctctttttcagaagctccaccaacaaataaggcaatctgccgctcagctcgacggcctcgaacgtttggtgaataaagagccttctgggaagcgtcacacttcgaaatatcggtttgaacagctgcgacatgattataatgcccttgaaatggcaattaattcactgcaaaatcgactcacaacgaaatggagaacggctgcggaaagggaggagttgctgaccatgagatttaaaccaaacgaaacgcatttggactttgaggggacggaattgctcgtcaacgaccgactgaaacagtcgcacaacgccgtggacgatctgattgcgcatgggaattcagtgctcacttcgcttcgtcatcaacatttggggctaaaggacgttaaacggaaaatgcacgatattggtcaagtgcttggggttgtcaacgacaacactgcaaatgattgaaaagcgattggaggacgattggctgcttttcctcgtcctttgtgttttgtgcgttgtgttcatgtactgcttctacagattttggaaaggctaagctctttgtcctctctgctcacaatcagaataactcttgaaaaacgttatgatacttcctgaaaaggcattcccttttttcgggtcttttgctgattgtttttttctttcactgaattcttatattattttttcttgtgataataaattagttcgttt

SEQ ID NO: 50363 - DNA, 708 bp, Heterodera glycines
tacagtgcactggacatgcacgagcaggcgcaagaatttttgaagcgggcgattaaattgtgcccgacaaatgcgtccatttgggtgcttttgggacacgaatatttggagacgaaaaaccaccaattggcctcaacggcgtacaaaaaggcaacagagatcgattccgtttgttaccgcggatggtacggactcggccaactttacgaaatactgaagcaatcggagaccgccctttactattaccaaaaggcgcacaaatgtcggccagcggactcgagaattttgatcgcattaggtgtgattttctccaaaatcgaccggaaatcggatgcagaaaaatgctttaaaaaggcatttcaaattggcgacgtggagggaaatgcgctgacgcatttggccaaactttacgaagaacaggaaaaccagcaaaacgccgccaaagcatatgaagcttatttgacgctttacacggaggaattggtcggcgacctcagtctaatcgctgaagcgtgtcgctttttggctcgtcacaatttggaccttggcgatttggacacgtcctacgcctatgcccagcggtgtttgaattatgacctgtccaaagaggagggccaacgcatcctccgactgataatgagcaaacggaaggaggagcaggagcgcaagctggcactccctgtcggaacgcctcagcagcaaaacatt

SEQ ID NO: 50364 - DNA, 633 bp, Heterodera glycines
acccgccgtacgtccactacattaacacgcacacaacctcggaaccccagcggggatttgcctttatgccgaaacggggaatgaattcgttggaaaacgaaatcaatcgcatttacaaagtgaccacaaaaggagtcgttgacatccttcaattctttgtgcctcggaaatccgatctgtggcaagccgacctttacccggacacgcgcagcttaatacccgctttgacagcagaagaattcgttggcggcaaaaacgcaccgccgaatttaattccggtgaaccccgaggcagcaaaggcggggccaaaagtgcaagtggcaaaaaaggcaaacattttggcacaaatgccaccccaacaagaacatccgcccgaaccgccgatgcaaaggccggcgccccctcagcagcagcgagccgcgccggtacgccacgacgaggaaatgggcatcgtacgaagccaacgaagagagccatcgccgccggaacagcaaacgccggccccgagacagcaagtccaattgcggtcgagggaggccagggacgaaacgggcggctctcaaacggcaggtcaacgccgcgccgccgcggaattggacagaattcgaagggaacagaacagaagcggggccg

SEQ ID NO: 50365 - DNA, 667 bp, Heterodera glycines
ctgaaatataaaccacaaataaaccgacaaaaacgaaatggctccacgaggaaacaacatgcttcccaatgcccacttccacaagcattggcagcgtcgtatcaaaacttggttcaaccaaccggcacgcaaggaacgtcgccgcgctgcacgttccgccaaggcggcccgattggcaccgcgtccggccggcggtctgctgcgccctgttgtgcgttgcccaagcgttcgctacaacaagaaatgccgggtgggccgcggcttcacactggaggagttgaagcggtccggcatgggcaaataccaggccagatcgttgggcattgcggtcgacacacgccgtgttaaccgatccgttgaatccaccgagcgaaacgttgcgcgtctcaaggaatatcggtctcgtttgatcattttcccgaagaagatgaacaagccgaagaagggcgacagcagtccggaggagttgaagctggccgcacaaatgcccggctctgtggtgatgccgccggtggtcaaacagcgccggttgaaggccgagccgatcaccgaggcgatgaacaaattctccgcctattgtcaccagcgtcgcgtgcgggcggacaaacggttgaagggcaagcgagaaaagaaagcaagaaacggcggacgaagggctgggcaaaag

SEQ ID NO: 50366 - DNA, 1141 bp, Heterodera glycines
tgatgacctattataatgattcgaatagcccctttctgatcactctgttgggaaggatttgtctgagtttgctgctggccaaagtgtgtcgctctctgtacaacattctctacccttatgtgatcgcaaaaccgcgcgacctgcacgaacttgcgggaggggatgccaattgggccgttgtaacgggtgccaccgatggcattggcaaagcctatgccgcgggagttggccctgcgcggcttcaacctggtgctgatctcgcgctcggcccacaaattggaggcggtggccaccgagctgaagcagtattcggccaccagcggacagcggggcgaagtgcagctgcggacggtccaattcgacttcaccaacgccaacccggcggactacgaacgacacatttttggtgccatcagtgacttgaacattggcattttggtgaacaatgtcggcatgggcaacccaaatgattacccggaacgatttgacgaaatgtcgaccaaattgttgtccgacatgacgattgtcaacactttgcccgttaccgttttgtcctcttttgtcctccgacaaatggtcaaacgccgtcgcggtgctgtcataaacatttcgtccgcatcggcgtatatgaaatggtaccagtacgccgtctattcctctacaaagagcttcattgtccatttgtccgaaatcttgcgcaaggaattcgcctccgattgtccgggcattgccatccaaacggtgtgtccaatggtcgtggccaccaaactgacgcagcgttcgtcccgtgacggcctttcttcccttttggccgccagcccaacggaatttgcgcgtcaagccatccaaacggttggcctcgtgccggagacgagcggatgtttgtcccaccaaattcaggttgagctgttgttctcccttttgctcactttcgtcccaaattcgctgttcgactttttcgtccgtttggaggcgcatttgcacaaaagtgtgctgaacacggcatccaaacagcacgactaaatacataaaatggcaacatcattaacgatgccaccaatttaaaaattgagcgatcttttcaatttccaatttcaaattattaattttgcttatcccaataaattctcaatttttaaaa

SEQ ID NO: 50367 - DNA, 419 bp, Heterodera glycines
gtccaattaagcttaaattatatttgctacttacaaaaatggctccaccgacaaacaaagtgcaaaaggtgatggtccagccgatcaacctcatctttcgctgtctccaaagtcgttcgcgcattcaaatttggctttatgaaaacgcttcttcgcgcattgagggttatattatcgggtttgacgagtatatgaacgtggtcattgacgaggcggaggaggtccaactcaaatcgttgaaccgtcacaagttgggccgcattttactcaagggcgataacattacgctgatccaaacaatccaatgacgaggacgggcgaagatctctctgttgttgtgtgctggagcatgaaattaattcgttttcatttgcattttattaaaacgatggtcagaataattaaagcgattttcaacg

SEQ ID NO: 50368 - DNA, 539 bp, Heterodera glycines
tttggaaaaagtaaatttaaaaatggtcgcactccgtgcccaatttgaggcgagcaatgatgtcggagttttctgtaaactcaccaatgcttattgtctggtgggcattgcttcttccgaaaatttttacagtattgtggaggctgagttggccgacgtcatcccggtcatccattgcacagttgcgggctgtcggattgttggccgtgtgacggccggtaatcggcacggactgttggtgccgaacgcgaccacggaccaggaattgcagcacatccgcaacagtttgcctgactcggtccaaattcgaagggttgacgaacggttgtcagcgctgggcaatgtaattgcatgcaatgaccacatcgctgttgtccacgcggacataagcaaggaaacggaggcggcgctggccgaagtgctcaaagtggaagtgttccggctcagtctcggcgaaaatgcattggtgggctcttacgcggcgatgacctcaaacggtgcgttggtggcggcaaagacaccgccggaggtgcagcgcg

SEQ ID NO: 50369 - DNA, 277 bp, Heterodera glycines
tagcaaagaacagaaaaaatggctgcgcacaaaaccttcatcatcaaacggaagttggcaaaagctgctaaacaaaatcgtccgcttccccactgggttcgaatgaagacgggcaatcgaattcgttacaacgcaaaacgtcgtcattggcgcagaaccaaactgaagctgtaagcgcaaaggaacaggcggaagacggcgggcgatgatttgacttgttgctgttgattcatacatttttatggactgttgataaaggaaattgtcatcggaaaaa

SEQ ID NO: 50370 - DNA, 475 bp, Heterodera glycines
ggaacgcgtgtctcaggccgatggaccatcctaaagaagcttggcgccggagcatttggagccgtctatttgtgcaaagatggcaagggaacagtggcagcactgaaaacggagccaatcgacacacgtcaaccgcttcttgttatggaggccaccgttttggacaccctgggcaaaaaacttaagaatgctgatggtcaacacttctgccgtctgttggaccttggacgtagtgaacaacggaatgctacgtctggagatacggtgttcaactacgttgtcatgactgtggttggcactccgttggacaaacttattcgaaacgcgggcgatcgcttcagtccgggaaccgcaatcggcatgtcaatccaattgctgagtgccatcaaggctcttcacaatgtcggttttcttcatcgcgacatcaaaccagcaaacacagcgattggacgggcggagaccaacgaacatcgac

SEQ ID NO: 50371 - DNA, 843 bp, Heterodera glycines
acttgatttattccccactttaaattgaaggattagttaaattatattggcagtaaaatgggaattaagtttctcgagtttgtcaagcccttttgtgggttcgttcccgaggtttcaaagccagaacgaaaaatacagtttcgggaaaagatgctgtggacagcgattacgttgtttgtttttcttgtgtgctgccaaattcctctctttgggataatgtccacggacagtgctgaccccctctattggctccgtgtgatcatggcttccaacagaggcacactgatggagttgggcatttcgcccattgtcacttccggtctcataatgcaacttctcgctggtgcgaagattatcgaagtgggcgacacgccaaaggaacgggcattgttcaacggggcgcaaaaactgttcggaatggtcatcactattggacaggcaattgtctacgtggcttccggaatgtacggaaacccacacgaaatcggcgccggaatttgcttgcttatcgtaattcaactcgtcgtggctggtctcattgtccttctgctggacgaattgcttcagaaagggtatggacttggctcgggaatttcgctgtttatcgccacaaacatttgcgagaccatcgtttggaaggccttttcaccggcgacgatgaacacgggccgtggcacggaatttgagggggcgatcatcgcacttttccatctgttggccactcggaatgacaaagtccgtgcacttcgtgaagctttctaccgacagaatttgccaaatttgatgaatctgctggccactgttctagtttttgccgtcgtcatttatttccaaggttttcgt

SEQ ID NO: 50372 - DNA, 471 bp, Heterodera glycines
attaagctcgctttggtcggccaagaaccgattctttttgcccgatcggtggcggaaaacatcgcttacggattggagaggtgcacaattgtggacgtggtcgaagcggccaaaatggccaacgcacacacatttattcaacagactcgggaccaatacgagacaaatgtgggcgagaagggcagtcaaatgagcggcggccaaaaacagagaattgcgattgctcgtgccttggtgcgtcggcctgcaattttgctgttagatgaagcgacttctgctctcgacacggaatctgaacatcttgttcaagaagccatctataagaatctgaaggggcgttctgtcattttgatagctcatcgtttgtcgacggtggaaaaggccgataaaattgtggtgatcagccgaggacgacttgaacagatcggcacacatgagcaactgttggctcaggaaggaatgtatcgctct

SEQ ID NO: 50373 - DNA, 954 bp, Heterodera glycines
caaagatcggttttctctctttcgaggcgtttttacgtgtcctacgcgcaacctcagcagaaagtgcaaacatataaacgggagaagccgcatttgaacgtcggtacaattggccacgtcgaccatgggaagacgacacttagtgcggccattacgaaagtgctctcacggcagaaaaaagcgcgctttgtcagttacgaggacatcgacaagggcgcggaggaaagggcacgcggagtcaccataaacatagcgcacattgaatacgaatccgacaatcgtcattatgcgcacacggactgtcccgggcacatcgatttcataaagaatatgatcaccggcactgcccaaatggactccgccgttttggtcatcgcagcggacgacggagtgatgccgcagacgcgggaacatttgctgttggccaaacaaatcggactgcgcgagatcatcgtgttcgtcaacaaaaccgacttggtggacacggatgtaatggaattagttgaaatcgaagctcgcgaactgctcaccgcctacggcttcgatggagagaatgccaaaattgtgtttggttctgcccttcgggcactcgctgatgacgacgacaagtgcattttggagttgatcaatgcgctggacggactggaggagcccgtgcgtacagagaacggtccatttctgatgccgattagcagcaaatgcaaaatcaccggccgtggcagtgttttgattggcaccatcgaatcgggcacagtcaaaaagggcgacacgttggaactgttggggcaggaatatgcgcagaagacactcattgcggacattcacgtgttcggcaaaagcacagcgcagagttcggccggtgaacacgtcggtctgctgtgtaagaatctttactatgatccaatttcgcgtggtttttggttgacaaagccgggaacagtgacgccaacgaac

SEQ ID NO: 50374 - DNA, 546 bp, Heterodera glycines
tctgcttatcagttcatttcttcacattctcccatctcaattacgtggaatgcgtcattcagcttattttgtggaaagaaaattccgactcatttcctttcattttttacgtcgttttctgtcaacttcggcaatgccaactaaacccagcagacattcgccatcaaaaatcgtccatggagcgggaaaaagcatttgggttgaatttactgctttggctgtcgaatgcaatgcggtcaatttgggacagggttttactgattctccaatgccggattttctcacgcgacatttggccgatatcggaaaaagtcccgaaaggaccgatttccaccagtacactcgtggctatggccacccgcgtttggtctcagtgttggcaaaactttattcacgtctcctcagcgtttccgtggatgcccagtcagaagtgttgatcaccgtcggtgcctatttgtccctctattacgcttttatgggttggctcaacgcgggcgacgaggcaatcatttttgaacctgcttatgacagttacgtctctcagat

SEQ ID NO: 50375 - DNA, 504 bp, Heterodera glycines
aaaaaagatgcgagatctgttcatcgaagacaacagcccgatcactccggcccggcttgccgaactgatcagacatttctacgcgttgggatggatgcgcgataacggcggaggaatggcggtcctttgcaacggcgccgtgttcggttcgcccacttcggtgcagaaggagaaagtgtccgaaaatgatctgtttgtaattgatgctacgaccggcacagtactgaaacggccgcaaaacgcggcgagtgttccgagtgccacctgcggactgttaatgaacacaggtctgaactgcgtaattcacacccactccaaatacgcaaatcttgtctctcagttggtcacgggcaacgaattcgccatccaaaaccaggagatgattcagggggtcgagaatcgtagcagcggactccgtctcgacaacgtcgaccgcctcgttgtgcctatcgttgattctgagttaaacgaacaaatgctcagtcctgttttgctccgaacttt

SEQ ID NO: 50376 - DNA, 914 bp, Heterodera glycines
cctcgtgccgctgtcattaaacctaaattgtaatggcttcgaaaagtaaacgaacgactcgatcacagcgcgaagctgccattcacattgatgcaagtgcggatgagaccatcgaaagcagcagtaatggctcaacaattaacagttcatcaggtcatctgtcgtcgcgtcaggacgagaagaaccacctgtgcaatcttaacgaccgtcttgctggctacattgagcgcgtgcgcagtctcgagacggagaatgcgcgtctacagatccaagtgcgcgaggttgaggttgtggagcgcaaggagaaggaaaatttgtcggcccgctacgagatcaaaatcgacgaactgcgcaagcagttggagttcttcacgcgtgaaaaggccaaattgcaaattgagagtgacaaggcgcagagcggctttgaggagttgaaggcgcgggtcggcaaattggagaaggatttgcgcaaggcggagaaggagcgcaccgcggcgcaggcggacgttcaggaactcacggcacgcttcaacaacacggacaccgcacttggcaacgcggagcgcgagatcgagcaacttcgaaacgagttcaacaactcggaaaatatggtggacatgttgcgtcgtcagttggaggacgaggtgctgctgcgcactgagctggagaatcgtctgcacaccgccaaagacgacttggattttgcgcgtcgcagtcacagcaaccaaattgaggagatacggcgcaagcgccaagtggaaatgacatcgttcagcgacgaagtggagcaccgttaccaggccaagctgcaggaacagctgcaggccatgcgggacgactttgacaatcgcattgcgcagaaccgtgccgaggtcgatgagctgtaccgcaacaagctgggcgaggcggttgaa

SEQ ID NO: 50377 - DNA, 420 bp, Heterodera glycines
cgaaccgccgatgaggcgatcgttgccactgtgagtaaagttggcgagaatattcaactcgcccgagcatctgtcatttcttcttcaccagcgaacaaactttttggccaaacccatccaaaagaggaatttaacggcgttcaattggggcgttttatttcgttggtgtctttgggtcacaaatcggatgagagtgtttctgactttccaacagcacaacttggccaagtgatttgtcagcacatcattggaatggcgccggaaagtttgggtgaaccaaggaaaaagggagctaaacgggcaactcaaatggaaatcgttgacaatggggagggaacggagaaggaacgctcagctaatgcggaaaatgaaagtgacaccggagaagaggaggatttgaacgcttcacaagttgaccaa

SEQ ID NO: 50378 - DNA, 854 bp, Heterodera glycines
gtttgagcttcaataacctttcaattggaagccatttgtctgcttacctgttaaatggcttccatcgcatgtttgaacccaaaagcggagttggcccggcacgcggccgcactggagatgaacatcagcggtgctaaagggttgcaggaagtgatgaagaccaacctcgggccgaagggcacgctgaaaatgcttgtctccggttcgggtgaccttaaagtgactaaggacggcaatgttttactccatgaaatgcaaatccaacatccgactgcttcactgatcgccaaggcgtgcaccgcgcaaaacgacgtcaccggcgacgggaccacgtcgaccgttctgctgattggcgaactgctcaaacaggccgagaattacgtcagcgagggtgtccacccccatttggtcaccgagggtttccaattggcccatgaccatttgctccaactgttggccgtctccaaaaaggcgttgctcatcgaccggccgctgctcatcgaagtggccaggacgactttgcgcacaaaattggaccaaaagttggccgaccacgtcacggaatgtgttgtggacgccgttttggcaattcgtcgggatgaaaacgacacggagcccgacttgcacatgattgaaattcagcaaatggaacacgagatggagacggacacgcagctgatccgtggcctcgtgcttgaccacggcggccgacacccggacatgccgaagagtgtgcgaaacgtgcacattttgacatgcaatgtttcgttggagtttgagaaaactgaggtcaattcaggccttttctacgagactgcggctgagcgtgaacgtttgctgcaagcggagcgtga

SEQ ID NO: 50379 - DNA, 481 bp, Heterodera glycines
ttacgtccgaaatatgtgtacacacttggagctgagcaacaaagaccaagattaccaatgggggttggacttcatcaacaagcaaagtcaactcataaccaaccaactgtcagtcagttcgacggagctgatcagcgaaagcggcaaagcgtccacgcaattctttttcatgccgggccagggccaccatttcatgagttacgggggtcgattagtgcgcgtggagcgcgagcgtacagagcaaatgctgcaaagggcggacaaacgacggacaccgctggaaaccgttcgactgaccacaattggcgtcaagcccgaattttggcgacaaatgctagagaaagcggccaaagatgcactgtccgaggtagagacgggccttgctgtgtatactccgttcggtccggaatggcaccattttgggaagccactgaagaagcagccgctggacacaattgtgttggacaacggcatccgcgaa

SEQ ID NO: 50380 - DNA, 539 bp, Heterodera glycines
atttttaaagtaataattgatttaaaatgtctaagcgaggtcgtggaggcgcttctggggcgaaattccgggtttctcttgctcttcctgttggcgcagtaattaattgtgccgataacactggagcaaagaatctgttcgttattgctgtttatggcattcgcggtcgactgaatcggatgcccagtgccgccgttggagacatgttcgtctgttcagttaagaaagggaagcctgaactgcgtaaaaaagttttgcaagctgtcgtcgtccgtcaacggaaacaatatcgacgcaaagatgggaccttcatctatttcgaggacaacgccggagttatcgtcaataacaaaggcgagatgaaggggtccgccatcactgggcctgttgccaaagaatgtgccgacctttggccgagaattgcttctaacgccagttcgatcgcctaatttgtttgcgttattctgttgatttttgttacttggatgcaaaaattgttatttgtctaattttttcaattagtaaaaattctacagtta

SEQ ID NO: 50381 - DNA, 802 bp, Heterodera glycines
gagtaccttcaaggctttttcaaaatgccatctaaagctatgcacctttattgacctcggcacgacgtattcgtgtgttggagtcttccagcacggaaaggtggagatcatcgcgaacgaccaaggcaaccgcaccacgccgtcctatgtcgcgttcaccgacaccgaacgtttgatcggcgatgcggccaagaaccaggtggcgatgaacccatccaacaccgtgttcgacgccaaacgtctcatcggacgcaagttcgacgacccggcggtgcagtcggacatgaagcactggccgttcaaagtggtgcagggagagggtgctcgtccgaaagtgatggtggaagtcaaaggcgaggacaaagcgttcttccctgaggaggtttcgtccatggtgcttatcaagatgaaggagacggccgaggccttccttggccagactgtcacggatgcggtggtcacagtgcccgcttacttcaacgactcgcagcgtcaggccaccaaggacgcggggaccatcgccgggctgaacgtgttgcgcatcatcaacgagccgacagccgccgcgattgcctacggcttggacaagaaggggcagggtgagcgccatgtgctcattttcgacttgggcggtggcactttcgacgtgtccatccttaccatcgaggacggcatcttcgaggtgaaatcgaccgccggtgacactcatctcggtggcgaggacttcgacaatcgaatggtcaaccactttgtcgcggagttcaagcgcaagcacaagaaggacctcagttcgaaccctcgt

SEQ ID NO: 50382 - DNA, 829 bp, Heterodera glycines
  unsure (1)..(829): unsure at all n locations
cctcgtgccgaattcggcacgaggcaagtttgagggtatccaattttttgcattgttttgcaactgatacaacatgatcatctacaaggacgcgttcacagacgatgagctcgcctctgactcgttcccgatgaagttggtcgacgacctgatctacgagttcaagggtcgccatgtcgtgcgaaaggagggcgaaattacgatgagcggggcaaatccgtcagcggaggaaattgacgagggcactgaagaggcggtggaacgcggcattgactttgtgctcaaccatcgactacaggagatgaattgttacgagaaccaggcaacatttaaaggctacgtcaaggacttcatgaaaaagatcattgagtacatggagaaggagcagaagtcggctgacgaaattgctgcgttcaagaagaagatccaggcctgggttgtctcattgctggccaaagaccgtttcaagaatctcgcattctttatcggcgaaaacatggcccgagggcaagggcgaaggacaggtggccattgttgagtaccgtcagggagaatggtgaggaagtgcccactctgatgctgatcaaggaggcgctcattgtggagaagtgctgacgacgacgacaagcgatatacgagaaatgcgcgcgatattattattataacttttttgttttaatatgatatggtgacacaatgtccagttactctattacatattgttgttgttgttgttgttttgttggctggccttcgtttgacacggaactctcaattggttgattatattgatggtagataagatcgcggttcgcaactgttanaaaag

SEQ ID NO: 50383 - DNA, 896 bp, Heterodera glycines
gagatttgaaaattttgaattcgcttttctcattccaaggcaaataattgtaaaatgagtagcccacgaaagaaaatccttctcaaagtcatcattctcggtgactcgggcgtcggaaagacatcgctgatgaaccaatatgtgaacaaacggttcagcaatcagtacaaagccacgattggtgctgattttcttacaaaagacgtgatgatcgatgaccgacttgtcaccatgcagatttgggacactgccggccaagagcgtttccaatcgctcggcgtcgccttttaccgtggtgctgactgttgtgtgctggtttacgatgtcactcacgcgccgtccttcaaatcgttggagagttggcgcgacgaattccttgtgcaggcgagtcctcgtgatcccgaacactttccgttcgttttgctcggcaacaaaattgacaatgacgcggcgcgtgcagtgaatgcgaagagagcgcagagttggtgccagtccaagaatgggatgccgtactttgaggtctctgcccgggacggagtgaacgtcgaagaggctttccaagcgattgcccgtgctgcgcttgcacgagactcgcaggaaacgcacgacttcccggaatttccggaccaaattcgacttgatcagagccgcaatggcagacagcagaattcctcctgttgctgaccgtccgggggcatttcgcgatgagtgaaatggaagaaatggtcgatcactctgtcgagatcaaatgatttgtaatttcaaaaagaaagaattcggatttcaaattcacatcttctaacacagacaagctcattccctcactttgactacccttttaaccaattcaaatagaaacgatgtttagcacttttattatgaggccatttgccccc

SEQ ID NO: 50384 - DNA, 296 bp, Heterodera glycines
  unsure (1)..(296): unsure at all n locations
acaaaggcatccgacgactttgtcctccaaatggactcgcaccacatttgggacatccttggtcgaatgttcagcgcggtaataaattttgggcgggcagcaagcatttccctctccaggccccacgtctgttcggttgggtccgggaaatagccgtaatgttccgggtccgcctcggaggcggcgaggcgattgctgtgtgaaaaatttcgcatgattttggggagcagagaacggccggacaaaagtcggttcattgtcattgaaagtgaaatgaataaattgttgaaataaan

SEQ ID NO: 50385 - DNA, 1046 bp, Heterodera glycines
gataaacttaaaaattgggaggcattttctgaaaaaaaattcgaaaaattgaattataactttttgtacaagttcggtttcaatgttcagattggtcattaggcaaagggtccctccaaataacacgccctcaatcaacttataaagttgtatttagagacaaaaattatcgtaaatggctgtcggaaagaacaagaagatggggaaaaagggagcaaagaagaaggccgtcgacccatttacgcgcaaggaatggtacgacatcaaagcgcccgcaatgttcacacaccgaaacgttggcaaaactttagtgaaccgcacccagggaacacgcatttcaagtgactttctgaaaggtcgggtctacgaagtttcgttgggcgatctcaacagcacggacgccgactttaggaagttccgattgatctgcgaagaagtgcaaggcaaaatttgtttgaccaatttccacgggatgacattcaccagggacaaactgtgctccattgtcaaaaagtggcatacactcattgaggccaatgtggcagtgaagaccaccgacggtttcttactccgactcttttgcattggctttaccaaacgaaatgccaatcaaatcaagaagacgagctatgcaaagacatctcaagtacggatgattcgtgccaaaatggtggaaataatgcaaaaagaggtctcttccggcgacttgaaagaggtggtcaataagctgatcccggactccatcggcaaggacattgagaaggcgtgctccttctactacccgttgcaggacgtttacatccgtaaagtgaaggtgttgaagaagccgaagttcgagctgggcaaattgctggagatgcacggcgagggtgccggaacggtcgccactattacgacggccaccggagagaaaatcgaaagtcggccggacgcatacgaaccgcccgttcaacaaagcgtttaaatggtcagattgacaaaatggagatttatttgactgtttgcatccgaattgttttgctgttgttgttaaactgactttgttg

SEQ ID NO: 50386 - DNA, 396 bp, Heterodera glycines
agaaagtgtttcgaatttgcatttgattcaatgacgaaaggaacttcatcgtttggcaagcgccacaacaaaacccacacgctgtgccgccgctgtggtcggtcctcataccacattcagaagcacacctgctcgtcctgtggctatccggcgaagcgaaagcgcactttccaatggtctgtcaagtccatccgccgacgcaccaccggcaccggccgaatgcgtcatctgaagcttgtgcaccgccgcttccgcaacggattccgcgagggagtgaccgcgccgcgcaaaggcggagtgaaagcgtgagaagagtgaagaaaaaaggcatcaaaaaatgatggaaaatgttttgttgttgactgattgttacaagaaaaaaatggtcatttaaaa

SEQ ID NO: 50387 - DNA, 516 bp, Heterodera glycines
gcatattttaatcaattaaacatattcttgcgagtaataatggtgggacgagtgcgaaccaaaacggtgaagaaagcatcccgtgtaatcattgagaaatattacacaaaattgacaaacgacttccacaccaacaagcgcatttgtgaggaggtggccatcgtcccgagcaaaaagatgcgcaatcgaattgccgggtttatcacccatttgatgaagcggattgagcgaggccctgtccgcggcatttccatcaaattgcaggaggaggagcgggaacgtcgggacaattacatgccggaaatttcctaccttgacgcacagaatcaccagacgatcagcacagaccaagagacgaaggacatgatcgagtatttgggacttggtctcaacttggaggtgaaggggcctgtgccgactggcgcaggacgtcgttgaatcacgaaaaaccattaagcgatttggtggtgttattgttatctttttaagcgctgataaaacaattttgttgaaaaa

SEQ ID NO: 50388 - DNA, 476 bp, Heterodera glycines
atatgcttccattcgaagtccaacatttttccactggaactgcggacacagcgccgtccttccacgccgacactatccatcatgttgagttcgacttttacggccaacgcgttgcaacagtgtccagtgacaaaacggtttgcatttgggacaaggacacacagaacggcgcgtggaggaaaagcgcgtcatggaaaaaacacggtggtgccgtttggaaagtgcgttttgcgcatcccgagtatggccaagtgttggccacctgttccttcgacaacaccattcaaatcttcgacaaagacgctgccgatctgtccgaaatccgaccgatcaccggcgccgactcgtccaatgggtgggcatgtcggaccgttttacgacaaagcaatgccagcgccagcatcactgacattcaattcgcgccgcattatttgggccttcaattggccgcttgcacttcctctggtcgactgatc

SEQ ID NO: 50389 - DNA, 632 bp, Heterodera glycines
attcaataccccttcaatttggctatcatgcaaatcttcgtcaaaactctcaccgggaagaccatcactcttgaagtcgaggcgagtgacaccatcgagaacgtgaaagcgaagatccaggacaaggagggcatcccgccggaccagcagcgcctcatcttcgctgggaaacaactcgaggacggacgcaccttggccgactacaacatccagaaggagtccactcttcacctcgtcctgcgccttcgtggagggatgcagatcttcgtcaagacgctcaccgggaagaccatcactcttgaagtcgaggcgagtgacaccatcgagaacgtgaaagcgaagatccaggacaaggagggcatcccgccggaccagcagcgcctcatcttcgctgggaaacagctcgaggacggacgcactctggccgactacaacatccagaaggaatcaactcttcatctcgtcttgcgccttcgtggtggaaagaactagaacgacgaacggaagaaatgagtgatctgtatcgatccatatccgtatcttgagactgtcctgtattattgtgttccgttttattcatcatcatgaaatgtatttcaatgaccacggaacgataaatccatcaaaactca

SEQ ID NO: 50390 - DNA, 933 bp, Heterodera glycines
atttggtagaggagttggcctttttcaatgaggtcgaagatggttccgttctgagaaaagaagaaattccgcaagaataccgcgaagaggcaaagatactccgccaagaacttctcgaaaacctcgcaaattgtgacgatgttattgccgagtgttaccttaacgaagtgacgccgtccgtcaaagagataaaagaggcaattcggagggcaaccatcaaacggtcctttgtccccgtgctcgtgggcagtgctctgaagaacaagggggtccaacaaatgatcgatgctattgtacattatttgccaaacccttctgaagttgacaattttgtgaatttatatgacaaaaatgacaatgcagaacgcgtgctgatggaccctttgaggaccgcaaactccgaaaaacaaaagccatttataggacttgcgtttaaattggaagcaggaaattttggacaattgacgtattttcggatttatcaaggacgactggtcaaaggcgacactatttatgcgacaagggacggacgcaaagtaagaattcagcgtttggtccgaatgcatgcgaatacaatggaagacgttgacgttgcctatgcgggagacatttgcgcgacctttggcgtcgattgtttcagtggggagaccttttgttcggatgagcaattacgagtccattgcgaatcaatgcacattcccgaccctgtcatttcaatgtccataaaaccgatcggaaaaagggacatggaaaactatctcagggcattgaagcgatttgcaaaggaggacccgacgtttaaacttttttacagcaaagagcacaaagaaacggtggtgagcggaatgggcgaattgcatttggaaatttatgcgcagcgaatgggaaatgaatacaattgtccggttgagttgggaaggcccaccgtttcgt

SEQ ID NO: 50391 - DNA, 1107 bp, Heterodera glycines
ggcgaattacaccaacaaaaacttctatacaaaattgaccttggcgctgtgtacaatcgtccgccgtgtgaccgcaagaatattggtgaattttttcccgtggaacgggaactcgtctttgacatcgatttgaatgactacgacacaatacgacaatgttgcaaggacaaaagtgtgtgcaaaaagtgttggcgttggatcataattgcggttgatgtgctggagcatcttttacgaactcattttggcttccaacatttgctctgggtcttttccggacggcgtggcattcactgttgggtggcggacaaaaaggcacgcgcattgagcagtcgcgggcgtgaggcgatcaccaaatatttgacatttaacaaagatggctctgcgatcaacaaatatcgggtgcacccatttgttacggaatcgtaccgaaaaatcatggaatccgacgattttgagcagttgatcatggaacagggatggttggactcggccgaccaatggaactctacaatccttgcccattgggccgacaaaaatttggctgaactgctcgacaaaagcttttcaaggcttcaaacgccaaaattgcgttgggaatcgatgaaactccgatttgatgatgcaacgcgaatcaatgcgcgagggatcaaattgccaccgacaccttccgatgaagcgagacgttttttcatttcattggtcatgaaatttgcttatccgcaactcgacgcaaaagtcactgctgggctcaaccatttgctgaaatcgcccttctctgttcatccagaaaatggaaatattgccgttccgttgagtgccaaagaaatccgtgcctttgatccgaatgtggtgccacgaattgataaattgttagcacaacttgcctcattgcgagaatccagccaagaaaacaaggagaatcaacgttcaattgtctatcgtcaaacttcattggctccacacattgctgtgtttgaacaatggaccgcacaaattctcaattctgaagcgcaaaaatgacagagcaataacaacaactcattccttcatcattgctatttttgaacactttttaactgtttaatttaacattttgattttgcc

SEQ ID NO: 50392 - DNA, 481 bp, Heterodera glycines
ggaacttccgccaagcgccaaagacggcgatccaacgcggaacggttcccccctgacaatcaatggaaatcccttcgttcctctaaacgaacgcgcgtatggacgtaaaaaggaagctgttgaggcggatggaatccgctggcaattggccaaaaaggacgaggaattgctcaatttgcagaaagcgctcaaagagcgcgacagtgaaattggcacaatgaaacttcgggtggaaatggcaaagactcagttggcagaaacgacggggaaaggcggcatttccgtggagatggaattgcttcggcagcgatgcaccggcttagagaacgacttgaagagacagaaggatgaatacgaacaacagttggaccaactgcgacaacaattggccgaagaacacaacagaacccgcgagttctccaagaaggcgctttttgcgaatatgcaaaatcaacagcagcaggcggctgcgtcagcactg

SEQ ID NO: 50393 - DNA, 821 bp, Heterodera glycines
gaaagcatgcaacgaaaaaccagaattttgaaaaacgactgttaactttcttccatccctgatccgcagtcgtggatttaagtcgctgatcgcggttgcgcgccacccctgatttcctccaacgccacaaccacactttggcacaaatgttgtcgtcacaaccgacgctgatcatggacaacggcgcgtacagcataaaggcgggctatgccaccgaccaaagtgccagaattttccccaacactgtgtttaaatcgaagggcgagcggaagcgcattttcgtcgccgacgaattggaccagtgcaccgaccgatcggcactgtttttcgtcttgccattcgaacggggatatcttgtgaactgggacacgcagctgcagatttggaaccgcgtgttcggcacggagggcgccggcctcggcgtggactgccaacagtgccgcctggtgctcactgaccctaacgaagtggcatttgcatttgcggacaacacggatgagattgtgttcgagaattaccgcttcaacgctttcctccgaacgtccgcgtccgcctgcaccgcccaggcgcactgctcggccaacaatccgtgctgtgttgtcgtcgactcggggcactcgttcactcacattgtgccatttgttgggggacaaattgtgcgcgagggcattgtccgaattgacatcggtggcaaagcattgaccaatcagttgaaggattggatctcctaccgccaactgcacatgatggacgagacgtatttggtcaattgttgcaaggaggactgctgcttcgtctccaccgactttcagcgggacatg

SEQ ID NO: 50394 - DNA, 1023 bp, Heterodera glycines
atgctttcaaaaatcacggtggttttggcatttctctgcctgctgttggcattattggtgggcatcgatgctcagcaaagtcaatgggagcagaagcagaaccgtgcagcaccgcgagggttggcaagtgtgacattgcgccggatggacaccgtccgctcgcggctggcagccgccggttcactcgtccaattccgtaagcatttgcgccaggcgctgcgccaacgcttggaccgtctgtacagtgacaaaatggcacgcgcagacgtggcatttgacaccgatgccgcggcaagggaaggcattgacgaagtgttgcgcaattacatggatgctcaatattatggtgacatttctattggctctccaccgcaaaacttcaccgtgattttcgacaccggttcctcaaatctttgggtgccgtccaaaaaatgctcatttttcgacctcgcatgccgctaccatagtaaatatgaccacaaaaaatcgtccacctatcagccggacggacgcgaagtggcaattgaatacggtaccggatcaatgaaaggcttcgtctccaaggacacggtttgcattatggacggtatgtgtgtggaaggtcaggagttcgcggaggcgacaagtgaaccaggcgacacttttgtaaacacaaaagctgacggaattctcggaatggcttacccgggaatttctgtgcagaaattgtcaactgttttcaacaatttggttgagcagaaagaagtggaggagccggtgtttgcattttggcttaatcgagacccttcgtacgaatttggtggccaaatgaccgtcggtggcatggacaaacgccggtttgtggaaccaattaattatgtgccggtcactcgccaaacttattggcagttcaaaatggactcggtcactggcggacaaaatggcaaaagcaaaattgcatgccgaaacgggtgccaagcaatcgctgacacgggcacttctctgatcactggacctcagaaggacgtggaagccatccacaaa

SEQ ID NO: 50395 - DNA, 253 bp, Heterodera glycines
aaaactggagctccccgcggtggcggccgctttcgaactagtggatcccccgggctgcagtgaccttcacacgaggattattttctcaacaaacttccgcttaatcttcagaccttcactattttcttgtttaaaaaagttgcaacgatggtgaaaccaaaggttggcatcaacggttttggacgtattggacgcttggcattgcgtgcagcgattgaaaaggacactgtccaagtggtggcggtcaacgacc

SEQ ID NO: 50396 - DNA, 548 bp, Heterodera glycines
gcaagatcagaggtctcgcttacgtatgcaaagtgacgccatcaatcgcatctcgaatgattgacggagctaaaaagatgcttcacggaaacatttctgacatttacattacgattgaccagaggaagggcccccagggcggactatctcccggctttggaatcttcttgacggctgaaaccaccgaaggcgtatttttccatggagaagcgatgtcgcgccctaagggccaaaacgaagaccaaacagtgccggaagaaattggggaacaggcggcaagacgtttgctggatgaaattcatatgggaggctgtgcagattcgtcctgtcaatctttggccgccactttcatgactctctgcgacagagatgtttcgaaatttctccttggtccactcacaattaacagcgtacacacccttcggaatttgcaaatgtttttcgagcaaatgtttaaattggaggaatggtggaaggttatgaaagaaatcgtcggaaaaggcggaaatgcgatgaaaaacggaagtgaggacaaatgtttgatgacc

SEQ ID NO: 50397 - DNA, 585 bp, Heterodera glycines
ctttttctctccaaatttttccatgcgttttcaaaaagccaaattcgccatttttcgactgaattcccaccaaattttcattcttttacttttgcttatcaaattggcaatgactgatcagcagaattcaattgtcgggggatggacagagcaaaatgtgaacgacgaaaaaatcaagtctctcgcttctcgctcagtggccaaaataaactccgagtcaaacgatcgcttcagtcttttccccttggaggttctcagtgccaagtcacaagtcgtggcgggcattcagtaccaattgcgcattaaggtcggaaggtcgaactgttcgaagaatcagtcaaacttggctgaccacgcaaactgtgcaacggaggatgatcagacagcgcgaaagacttttttggtaacgatttgggagaaaccgtgggaacaattcgagcagatcacttacaaactcgaataagaggaaacccgaagaaagaaagcgagcaaacagaagggggcggggaagtgattgatcacatcgcaatcatcctgttcaaacatttaattatttccaatcggtaaaaaatggcgaaattaaaa

SEQ ID NO: 50398 - DNA, 1596 bp, Heterodera glycines
tgaagataaaagtaattaatggacccttttcaccggaacgaggctaaagttgaggtcgccgttgagccaccaacggcgatagaccaacgggtggacgacataatgcaaacgggcagatttggagacggccgattggtgaagatggaagtggactatagcgctcaagtggacagtcagttgatagtggcagacaatttggccaaggaggggaagactgccgaggcaattgagtccttggaaaagctggaaaaggacagacgcataaattgcgacatgcgttccaaccagcgcctgttgtgccacatggtcaaattggcatttgacgcgaataattggcaattgctctgcgaaactgcgaagacattgtgcaagaagcgtctgctgatcaagtcgagcatcaagaaaatggtccaagaatgctgcgaaatggtgccaaaagcgccagacgcgtcgtccaaatcgacgctcatcgacacactccgcgcagtgactgcgggaaagatttacctagaggtcgaaagagcgcggctgaccaaacaagtggccgaaaagttggaagccgagggaaaattggacgaagcgcgcgaaatgatgatggaactgcaagtggagacgtacggcacgatggaagtggaggaaaaggtcaattatttgctgcatcaaatgcgcctttccattgccaataatcattttacgcgtgcttcaattatttcacgtaaaatcagcacaaaatttttcgaacgcgaaggcactcaagtgcaattgatgaaattggaattttacaaatatatggtgcaaatcggactgagcgaaaacaactatttggatgtgtgcaaacactttctggcaattcttaacactccgcagatccaagaaaacaacgtcaagaaaattgagattctcaagtgtgtcgtgttttacttgctgctttcggctcatgacaacgaaaaatgggaacttttgcatcgagtgaatgcgatgagagaattggaacaaatacccaaacacaaagaactgctggaactgttcatccaccaggaattgatcttttggagcaaaaccattgagtccgaattcgccccaattttattcgctgctcaaccgccggtcgaagtcatttcggattcgtttctcccgtccacccacgtgtttccgatgaccaaagaggatggtcaaaagcgcagagaacgccttcatgactgtgtgggggaacataatgtgctatatggtggccaaatattactcgcggatcactttccaacgaatggccaaacttctcgaattcggaattgagcaaatggaagcctttgtgtgcaaaatgattgtcgacggagtaatccccgaagtgaaaattcaccgcccttcgcaaattatttatttgagcccgaaaaagaacggcgcagaagtgctggacgaatgggtttttaacgttcgcaaattgaccgacacaatgaacaaagtcagtcagctgatcgcaaaggaggaaatggttcacggattgcaaatttctcagcggatttgaccgatgatatcgatacaaagaatcaattgattgttttattattgttttcccaaaaaaataaacgaattaaaaaa

SEQ ID NO: 50399 - DNA, 480 bp, Heterodera glycines
tctatttgttttttattcaatttcgacctgaatgtcagctgcggtttcttcttcgcgtccgatggaagattggaaatctgagttagctatgccagacaaggaccttcgatacaaaacatctgatgtgactgcgactaagggcgttgaatttgaggaatttgggctcactcgcgaccttcttaaaggcatttttgagaagggttgggagcatccaagtccggttcaggaagcgtcgattggaattgcacttacaggccaagacattctcgctcgcgccaaaaatggaactggcaaaactggcgcatattgcattccctgcattgagaaaattgacccatcaaaagaatacatccaagcaatgataatcgttccaactcgggagcttgccttacaaacatctcagatttgcgtagaactcagcaaacacttgaagattaagattatggtgacgactggcggaacagatcttcgtgacgatat

SEQ ID NO: 50400 - DNA, 1271 bp, Heterodera glycines
gtttgtatatcaaattcaactcaaacaaactcgaaaaaaatacttgtttaaactgcagtgaaatggatttagggggattttaacctttaattaggaatttgatcacagttaaagaattaagacactttgttttatatttgaatgcattggcgttttttacgccaacaatttattggcgacttttcgttttttttaccgtccgtggaaaggggcacccattttgggccctttcctggcgaatgggctgggctgggggcgaccccgctattttgtatgttgttacttgaacagatttaagcattatttaattttctttttcaactgtcacagtttaaatgttggaaatgaacggtgttggaaattccaaagactatgacaccaaagtgaaggcaattctcgaacaatgccgaatatcacagaagctcttgaactatactgagcattttaactatccctatgtcagcgaagtgacatattacgagcagttgttgaagattggacaaggaacatttggcgaggttttcaaggcgcgttgcaagcgaactggcaaattggtggcactgaaaaaaattttgatggaaaatgaaaaggaagggtttccaataactgcacttcgcgaaataaaaatgctacaaaggcttcgacatcagcacataactgaactggtggaagtgtgcacaagcaaacaaaagagtgggaaggagaaattctgcttttacttggtgttcaccttttgcgagcacgatcttgccggtctgttgagtaacacccaagtgaaaattcgactggtggacatcaaaacgatgatgcagcacattctgcgcggattgcacaaaattcactccagtcaaatattgcatcgcgacatgaaagcggccaatgtgttgattactggtgacggggtgctcaaattggcagattttggtttggcacggataatgtataagcaaccagaacattgctacacaaatcgagttgtcactttgtggtatcgaccccccgagttgttattgggcacgcggaactacggcccggcgattgacatttggggcgcgggttgcatcatggccgagctttggatccgtgcaccaatccttcagggtaacaccgaacaatctcagctggagctcatttcgaaactgtgtgggtcgattaatccgcacagttggccagggtgtgacaagttgccttattacaacaatttgcaaggatcgttacagcaaaatttaccgagacgcgtgagagagcgtataaatccatttcttcagaac

SEQ ID NO: 50401 - DNA, 605 bp, Heterodera glycines
aaaaaggaaaatgtcgcttattatgcccgaaaaattccaacatattcatcgtgtgatgaatacaaacattgatggcaaccgtaaagttccttatgcccttacagcgatcaagggagttggtcgtcgttatgctttccttgtttgtcgcaaagccgacattgacattcacaagcgtgctggagaactttctgaggaggacatggaaaagctgactactgttatgttgaacccacagcaatacaaaatcccaagttggtttttgaaccgacagaaggatattcgcgatggtaaaaatcaacaggttttgtccaccaatttggagagcaaataccgtgatgactttgagcgcatgaagaagatccgtttacatcgcggtctgcgccattattggggtcttcgtgtgcgtggtcagcatacgaaaacgaccggacgtaaaggacgcactgtgggagtgtctaagaagaagggaggctaaaacaaccgtttggttaccgatcatgaagtcgatcagttggaattgttgttgacgttattttcgttatttgatgaggtctatgtaaaatgttattgttgccaacggacaaaaaacattccaacttggacaa

SEQ ID NO: 50402 - DNA, 678 bp, Heterodera glycines
gtttgagggcctaattctgactacctagttttgcgaaatggttgtgctctcaaaacttggctcgccgcttcgtccgttttccaatgactatctcctttgccgcttccaggccttccgtaattatgcaatcaaaaaagaaaggccgccaccagcgaagattcaagtgccgccacccgcaaacgaaactggccattggaaatatgagcgtgactactcctatgacctgcgttattcaaacccgatcaacaaatactccagttttaccaggttcattacgctcaccgcaacaggccacaaagaattgtgggcacttttcgcccttctgatgctttcgtcatctctggcgataggaattgtgttctatagccttggcaagatcgaagtttgggttgaccgaagcacctcaactccgccgtgggattgggcgcgagtacgtgacaaatattggaaatttccgacggttctctatgacccgaccggcattactcatgttcgactcagcccgatggagaaacttcaggacgaaatgctggaagctgctaaagaacgtggaacccgcgatgctaagggctattgggttggaaagcaataggaaaatggatgtaatttgatgtgttaactgttctttagcttgcgttctcatataatgtatacgtggagcaaataaaagcagatttt

SEQ ID NO: 50403 - DNA, 1061 bp, Heterodera glycines
tttgctactgtcctcggcgcacgcactgacgcgggtaatccgtgcgcaatgactttgccgtccattttcgaatatttggcgcaagaatctctgagcgggtcgatgaagcagggcattcgcagtgttttaaatctgttttcccatttttcgggccgtcgtctctctttcgtcgactctcattttgacgagctgtttttgctgcttcatttgttcctggagaatcgctttctcaaacgattttccgcttcattttccgagaatttctatgggatgaaaagggttccgtggcgaatgaatgcgtcgtccttttctcggctgggccatcgctttcggtcgctttttctaattgttgttttgccttacattcacgacaaattcgaaagattaagtgaacaaattgaaagtgaaagggatgcaattcggcaaaaaggatggcgtcgtcttttccttcgcttttatccgtctctgaaagcccttctcttcctcgtcacgttgctcttacaattggccttcgtcttttccttctcttctgtccccagcctttcccttcttttggccaaatgtcgtcttgagaagttaactctctccgacgtggcgcaattcgacgctgagggccaattgccttttcatttgcggaggacaaatgttttcgcgcgtctttggcgttcgttggtttcgcttccctcgactttgggccgtctctttacttacgctcttttcctggtccaatttctcgagtatttctactcggatgaactcggccgtcgcttcgggcaatttgtggaagggcgtcggaatattcgaattccgacgcatccgttcaacaatttaccgactgaacagcaaactctttgcatggaagtggacaaatgcccaatttgtcgtcggatccgcaaaaatgacaccgttctcaccgtttccggctacgtgttttgccattcctgcattttcaacttcgtccgaattgagcactgttgtccgatcacttcgcttcccgccacttcaagtgaactcgtcaaaatatacaattgaaacatttataattaatggagtttaattga

SEQ ID NO: 50404 - DNA, 531 bp, Heterodera glycines
gccgaaagcgaaggggcgaaaggcgacggaacggaggccgagggaagcgatcggtcgccgctgctcacttcggtggatgtctctcgattccgttttctgaacgagcggttgtgcagccaaacatcggcttcttccgcaaagctctttgaggaggaccccgactcgttcaggctgtaccatcgcgggtaccggcaccaagtgtccaaatggccggtgaatcctctcgagaaaatcgtgctggacctcggctcccttccgcccggaagtgtcgtcgccgacttgggctgtggcgacgcggaaattgctaagcgattgggcgaacggctccgagttcattcctttgacctggtggcttcaaatgagcgggttttggcagcggacatggccgatttgccgttggaggcggagtctgtggacgtttgcgtttactgtctgtcgttgatgggcaccaatttggcccaattcttccgagaagctcatcgagtgctcaaaactcacgggaagatccaaattggccagataacgaagcgt

SEQ ID NO: 50405 - DNA, 512 bp, Heterodera glycines
cgaaataccaacttatctcacaaatggctaaacaaaagggtgaaaagaaaggaaaaagtgcgctcaacaaagtggtcactcgggaatataccatccatttgcacaaacgcatccacggaataggcttcaaaaatcgagctccgcgagcgatcaaagaagtgaaaaagttcgctgagcagcagatgggcacacccgacgtacgcgttgacacgcgtctgaataaatttctctggtctcgaggcgttcgtaatgttccattccgcgttcgcgtccgactttcacgcagacgcaatgacgacgaagactctccgcacaaattatacactttggtgacgcatgtgcctgttacttcgttcaaaaggttgacaacggtcaatgtggagagtgaggactgatagatggagaaaggatccggactgagtaaatggctgttttttgttgcgttatattgttgcggatttttttgaaataaaagaatcgttgacaaaaccgaagaaaaaggaacgccaaaa

SEQ ID NO: 50406 - DNA, 486 bp, Heterodera glycines
aaaacacagaaatggctgatgacaaaagctgtgacggtgcttcttctgcgttgcctccgtgtttaattgtgcttggaatggccggttctggaaaaagctcatttgtccaaaggttggcgagtcatctccactccaagaaggtgttcccctacttggtcaatctcgacccggcggcagcaaccgttccattcccagcaaacattgacatcagagacactgtaaattacaaaaaggtcatgcaggaatacggcctcggtccaaacggtgctattctgaccagtctgaatttgttttgcactcgcttcaaccaagtgttggacttgttggacagacgaaaggggtccatgccatacgccattttcgacaccccgggccaaattgaggtgttcacgtggtccgccagcggcactgtcatcaccgattcattggccgcctcttttccgaccgttgtcgcttatgtgatggatagtgcccgttcgaccaacc

SEQ ID NO: 50407 - DNA, 360 bp, Heterodera glycines
atcgattcaccagctctcttcaacaaaaccttcgcctctccacatttcgacgacaaaatgcctccaaaaccatccggcaaaggagcgaagaaggcggtcaagtcgaccaaggcggtgcgcacgggagacaaaaagcggagaaaggcccgcaaggagtcttactcggtgtacatctaccgtgtgctcaagcaggtccacccggacaccggcatttcctccaaagcgatgtccatcatgaactcgtaaggcccaatttggcgtttttccgtcccaagattctcaattttcccatttttaaggtttgtcaatgacgtgttcgagcgcattgcggcggagcctcgcgattggcccattacaaca

SEQ ID NO: 50408 - DNA, 626 bp, Heterodera glycines
gaatgaagcggttggagtgtgccgtccaacactacgcctggggcaagagcggcaaggacagttttgtcgcccatttgttgccggctgagcgagttgatttggacaagcgatatgccgagctctggatgggcacccatccgaatgggccgtcccgtgtgatcgacggcggcgcagaggcgtcaacgaatttgaaggactttttggcccaaaatccgcaactgttgggccaccacgagaagggcgagctgagctttctgttcattattttgtcggtggacaaagcgttgtccatccaatcgcacccgacaaaagaacaggccaaggtgttgcatgccaaagacccggccaactacccggatgacaaccacaaaccggaaatggcgattgctctcaccgactttgagctgttgtgcggctttcaaaccccgcatggcatcatttccaacgtgaaggcccaccgggaactgctccaactcgtcggcgagccgttactagacgaattggcacaggcggaacaccacgagccggactggggcgagcgtgcactgcgccgcatgttctgccaagtgtggacgagcccggcggagcaaattgcgcacgttgttgcacaaattgtggaccgattg

SEQ ID NO: 50409 - DNA, 480 bp, Heterodera glycines
caactacggcatctttcccaatgagcacatttgctgcatgttcctcgaccattttctcggctccgctcagttgcaatatgcggccaaaattgccatttatgtgatgctgcaggaaatgttcgacttccctttgctcacttttctcgccactcgcgcccttctcgagtggacgcaaggggaacgaaaactcgatgagcaaatccatccgaaaatggcaccttctctggaggacgagactaacttcaatgaggagaacgtgcgcctttttcgctacccttttctgaagaaccctttttgggatggacacttcgatgagaatgactccgaccgaatggcaggcaaagccctcgaatggctttcataccatttgaaattggcaaaaaatgacgaaacgaattacgacgagacactgatcagagtgatcagacttttggggttgagcatacagcggaaatggacggaagcgaagtcattggcgga

SEQ ID NO: 50410 - DNA, 408 bp, Heterodera glycines
tgaaaatcgtctagacctatttaatttttcgaaaaatgtctgacaacaaagaagaactcgttcagcgggctaagttggctgagcaagctgagcgctacgatgacatggctcagtcgatgaaaaaggtgacggaattgggtgcggagttgagtaatgaggagcgcaacctgttgcgtgacaacttgacgctttggacatccgacacggctggcgatgagcaggaggctggtggtgaggcgggcgaagctggtggcaactgatcgggcggacagacgttgaagaccaagaaaatgccccacgaaattttttccaccgaatcatttaatgacaattatgcttttctcaatatggcacttttgattgggtaaatttttttgaaaaatcgttcaattaaaattgttgtttacc

SEQ ID NO: 50411 - DNA, 665 bp, Heterodera glycines
cactcatattattgcaagttttgtgaaaatgtcgcattgaggatgaatatgactatctttttaaagtggttctgatcggcgactcgggcgttggcaaatccaatttgttgtcccgtttcacacgcaatgagttcaacttggagagcaagtcctccgctggtgtcgaattatttttcgaattctcaccttccattaaggtggacggcaaaacaatgaaggcacaaatttgggacacggcgggccaggagcggcaccagcccattgtgtcggcattctatcggcgtgccgtcggcgcactgctcgtctacgacatttccgtgcggctgacatatgaaaatgtggggcgatggctcaaagaactccgtgaccactccgacccgaacattgtgatcatgttggtgggcaacaaaagtgatttaggcaatctccgagcagtgccgaccgacgaggccaatgcgtacgcggagcgcaaccaaatggcattcattgagacgagcgcgttggacggcacaaatgtgggcgcggcgttcaccaacattttgaccacaatttgtcgttcacagtcaacaactgcgggcagcacaccgaaaattgacattaatgatgatctgattgacgaggacgcattgctcgagcccgaggacttacagcgccctgaacaatct

SEQ ID NO: 50412 - DNA, 1152 bp, Heterodera glycines
gaggtttaaggccttaagcctgctaattgacatcttgaacctcaaaccttctcctgtttaaaaaacgacaaattttttgatggctgctgtagtcacaaacaatagcaaggaattcatcgttggtgtgaaatacaagctcaagcgcaaaatcggtagcggatcttttggcgacatttacctcgccatcaatattcagaatggtgaagaagtggcggttaaacttgagtcagtcaaggctcgccacccgcagcttctctacgagagcaaggtgtacaaaattctgcaaggaggggttggcattccgcacattcgttactacggcatcgagcgcgactaccactgcctggtgatggatttgctgggtccttctctcgaagacttgttcaacttttgttgccggcgcttcactatgaagactgttctgatgcttgccgaccaaatgatcggacggattgagtacatgcatgtgaagaactttattcatcgggacatcaaacctgacaattttctgatgggtatcggtcggcattgcaacaaactcttcatcatcgattttggattggcaaaaaaataccgtgactcgcgcacgcgcatacacattccctaccgagacaacaaaaatctgacgggcaccgctcgctatgcgtcaatcaatgctcacatgggtatcgagcagtcgcgaagggacgatatggagtcgctcggctatgtgctcatgtatttcaatcgtggaaatttgccatggcaaggcctgaaagcggctaacaaaaagcagaaatatgagaaaatcagtgaaaagagaatgtcaaccccggtggaaatgctgtgcaagggattcccttccgagttttcaatgtatttgaattactgccgtggtttacgctttgacgaggcacccgactacatgtatttgcgtcaacttttccgcatcctatttcgcacattgaaccatcagtacgattacacatttgactggacactgctgaaacagaaggcaacaatgaataacgcgaacagcacggccacttatccaactgaggcggccgccgggacgtctgctcagcagtgaacattatcgtcgatgatttatcattaccacaccatcatcatcatttattttgtaaacattataaagcaccacattttaaaaaa

SEQ ID NO: 50413 - DNA, 547 bp, Heterodera glycines
agcaattaatgatttgttcttgagtacaaaaaacttaatttattggcttttgacgcccttttcattagtcatcacttctcaaaatgatgaagcatacaacgagcagcagcagcagtaacagtggggatgccaaggacagttcatgccatcgaaaccagcgttccatgtcattgggtggaccagcacatgagtcactgttgtccaagcaacattcctcctcccctccacagacggtggagctgagccgggccgacaacggcgactgtgttgtgttggttgtggaaaacacgcggttcattgtgaacccggctttgctggtcgtcaaaccggacacaatgctgggacgaatgttctcgttgagggcacgcacgggcggcgggacaaacactctgtccgtgccctcgtcgtcgtcgtcggccaatgaccccggcgccgaccgtggctcccccagtgatttggtgcgtcccaacgagcgcaatgagtacgacgtggcggagggactttccgccgcttgtttccgtgttgtcatggacttttaccaccgtgg

SEQ ID NO: 50414 - DNA, 814 bp, Heterodera glycines
gtttgagcacttttgaaaattttataattgaattttgctcatatttttgcataaatgaaccaagaacaagacaatatcccaactttcaagcttgtgttggttggtgacggtggtaccggaaagaccacttttgtgaaacgccatttgactggagaattcgagaagaaatatatcgctacgcttggtgttgaggtccatcccctcacttttcacacttcgcgaggtcaaatccgattcaacgtttgggacacagccggccaggagaagtttggtggacttcgtgatgggtattacatccaaggccaatgtgctattgtcatgttcgacgtgaccgccagagtcacatacaaaaatgtgccgaattggcaccgcgatttggtccgagtttgtgagaacatcccaattgtgctggtggggaacaaagtggatgtcaaagataggaaagtcaaggcgaaaagcatcacttttcaccgcaagaaaaatctccagtattacgacatttccgcaaagagcaactacaatttcgagaagcccttcctttatctggcacgaaagctgatcggcgaccccaacctcgaattcgtggggaaagccggcactcgctccacccgaagtacaaatggatcccgctttggctgccaaatacgagcaagaagtggccgaggcagcaagcgctgaactcccggacgatgatgaggacatttgaagagatggaaggacggctgggacagattcctgggacagcaatttccgagcagacaaagttatgtccattgttttaattgattgtttgatgagtaaaggaaagcgaatg

SEQ ID NO: 50415 - DNA, 540 bp, Heterodera glycines
tagacactacccgtaccctaaaattttttaataacttttaaaaattccattttttcaaaaaagagatcctaccatcggcagtattacaatttttgtctttaatttttctggttcaaatggctgttggcaaacagaaaaaatccgcggagaatatcaatgcgcggctggccatggtgacaaaatcgggcaaatactgcctgggctacaaacaagcgcttaaaacacttcgttcgggcaaagcaaaattggtgatcatctccagcaacacgccgacactcagacgcagtgaagttgaatactacgccatgctgtcaaagacgggcgtgcacgagtaccatggcaacaacatcgagctgggcaccgcttgcggcaaactgttccgagtgtccatgctgtccatcactgacccgggcgactcggacatcattcgcacaatgccaaccgaggcctgacaaatctctgtgagctgttgtgatcacacactgtgctcatcgccgttgttttcttatgttgttgttgttgtttttaacttgaaaattt

SEQ ID NO: 50416 - DNA, 468 bp, Heterodera glycines
gttaaggcggggagacgttcgatatttattgtgtgtgttagaagaggaagagaagaagcaggaagagtggaagatgagcgcgaatacggaatgctatcgttgccacgaattcgggcacatttcgcgtgactgtcccaatgccggtcgtagtggtggtggtggtggtggcggtggcggctcgcgcggcggtggaggcgaaaccaagtgttataactgtggacgttctggacattttgcccgtgaatgccgtgatgccggagaccgcgaccgtgggcgcggtggtggtggcgggggcggcggacgaggtggcgatgaccgcggcagcaaatgttacaactgcggtggttacgggcactttgcacgcgaatgtcgcgatgagagaagcgccagcggcggtggacgtggcggcagagacgacagggatgaccgaggcaacaaatgctacaattgtgggaaaagcggtcattt

SEQ ID NO: 50417 - DNA, 365 bp, Heterodera glycines
cttttctggcgaatattgtgctctttgagtgtcctttcattggcccattgtgcttacagtgccgcacagcatcgttcctaccttcgcctcgttggccaacctttcactcatttgcctgcggaccttactacacaaacgttgctcagtcttttgttcgccattgtttctgccagtttcgttgttggcgacttccaaccgattcgcaccgaccttttgatttcaaaaaagtcgtgggatgtgctcggcaattgtccctccttttacgtgttcaatcatcgtgccaaatgtttgatgccaaaatttgatgacattgattaattttttggcacttttttcaataaatgtttttattattaaatgattag

SEQ ID NO: 50418 - DNA, 420 bp, Heterodera glycines
gcacgagggttacatttaattaatttttggttcggatggtttctatggtcgctgggagagtgcatcttttgccgcgcgccgcctcttttggcaaatcgtttctttcatcggatgcgactaaaaagcctgataagacttcctttggcaatttgaacgactctgatcggattttcactaatctttacggtcgacatgactatcgcctcaaaggcgctttggcgaggggcgattggttcaaaacaaaggatattattctgaagggtcccaaatggattctcggcgaaattagcacttccgggctgcgcgggcgaggcggggccggctttcccagcggaatgaagtggggcttcatgggtaaaccgttcgacggtcggcccaaatatttggtggtaatgcagacgagggcgagcccggcacatg

SEQ ID NO: 50419 - DNA, 853 bp, Heterodera glycines
cctccttccaaattcggcacgaggctttttttaaaaaatggctaacataatgaagaaaaagaagaaaaatgctgttgctactacaactgctggaccccaaaaggatggaggcaaattcaagcagaaagggatcaaattcaacacggaaaagggccaacacattctgaagaatcccggcgtggtccatgccatcgttgagaagtccgctgtcaagggcactgacactgtgctcgaggttggcccaggcaccggtaatttgtccatgaaattgttggaccgtgccggccgtctgattgcctacgaattggaccctaaaatggtggcagagctgcagaaacgtgtggtcggaacacccgtccaatacaaattgcgtatcattgctggcgatgtgatcaaagcagccgagtggcctccgtttgatgtgtgcgtctccaatttgccctaccaaatttcatcaccgtttatttttcgactattgctccaacggccattgcccaggtacgccgtgctgatgctgcagaaggaattcgccgatcgactgttggccaagccgggcagtaaggtgtattgtcgcctgtccgtttctgttcaattattggccaccgttgagcatctgatgcgtgtgaagcgttccgaatttgtgccacctccaaaggtggactcggccgtcattcgcattcagccgcgcaatccgccgccggccatcaattacaaggaatgggatggaatgttgcgcattgcgtttatgcgcaaaaacaaaacactgtcggcgctgttcaagcagaagcaggtggtcgatgtgttgcgcaaaaattacgcagtcgtttgcggcacgaagggaaaggaagtgcca

SEQ ID NO: 50420 - DNA, 929 bp, Heterodera glycines
tgccaatgttgccaatccggctgctttttctgttggccgtgccgtcgtccgcaatgggccgatttgacttgggtggactgctcgtcaacctaccccaatttacaagacacgcatgcgtccatttgagcggcattttcggccggatgggtcaacaacagcctaactcggcacacagctatgatcaaccaccacgacattttcatcgaggcggaccacccccacaccatcatccagacagcggcagtggtggcggactcggcaacatcggcggtgccgtggaaggcatactgagccgtgtgggtgtcaacccgcagttggccaaccaatttggcaaaatccaaattccgcccattccgtcgttggcggtgcacaatgtgctggacggagtgccgggaattttgcgccaatttttgcctgcccaaactgtgggccaaatcaccgcaattgcacgccaagcgattgagtccatttgctcttcggataattgtcttcagcagaggccggaatggcttcatcagcgggcgacagttgcgcagtttgaaactttgatcagaaaaacattttcaccaggccaatcggacagtcaaattggtcgtgacgtggagatcagactttcgcgaacattccaagtgaagaaggcgttgattcgcaaagctggcctggagggacgcgttgagccggcgaacaatggcgttttccagcaagatttgctgctaacggaacagcaggcgaatgtgctaattacggagatcaatcagaatgaggttggcgttggtgccgtgccgccttctgacaaccgccgtttcagtcgtcggcacaatttcaatcgccgtcgtttcactcgcgccggcaattcgctgttctttgaagcttctcccacccaaaaatggccagtcggacaaccaattctgtacatgttcgatcagtcc

SEQ ID NO: 50421 - DNA, 554 bp, Heterodera glycines
gcgatccacgtcacggcaaatacatggccgtgtgccttctctaccgaggtgacgtcgtcccgaaggatgtaaatgcggccattgcttcgatcaaaacgaaccgttcaattcaattcgtggactggtgcccgaccggcttcaaggttggtatcaattatcaacctccgactgttgttcccggcggtgacgttgccaaagtcccacgtgccgtgtgcatgttgtccaatactaccgcaattgctgaggcttggtctcgtttggaccataaatttgatttgatgtacgccaaaagggcatttgtgcattggtacgttggggagggcatggaggagggcgaattctccgaagcacgtgaggatttggctgccctggagaaggactacgaggaagtggccattgacactgtggagggagatggcgctggagacgacgactattgattgaaaacattgttcgattaaattatattttggtttggaaatgttcttattgtattgctttattgagacgtaactgctttgatgctttttatataaatatgcttatcttttaac

SEQ ID NO: 50422 - DNA, 681 bp, Heterodera glycines
ccacgtacggattgacatttgccaacccgtcggtgagtgccaacaattgccagggcactttggttgcgcaaatgttgcggcgtgccaccaaaaatctcgaccttggtgccgaatacatttaccatagggacgaacggtttcctggcaaacagtcgaacactctcagctacgccttgcgctacattcagcccacttggatattttcgggaactcttgcgccaaccgaactccatttgtgttactaccacaaacagagtgaacacttgcagttcggcgttgaatttgaggcgaatttcaagcttcaggaggtgaacacgaccttcgcctatcaaattgaagtgcccgactctctgactctgagggcctgctgcgacacaaattggaaggtcggtgctgtgctggagaagaagctgtccaagcagttgcccttctcgctggcgatcagtggcgtgctcgatcacgtcaaagcgcagggaaagttcggcatcggactgctcattggctgattggcgactgatgaggggagaagcggcgaatgttcgcaattgttagcttctgccaatttacattttacaccatttttttgctggccgaccattttctgttgtgtcgccgttgtttgttatcattttacattagattgattcatgcgattcaaaacggataaaaattgacattttc

SEQ ID NO: 50423 - DNA, 412 bp, Heterodera glycines
cattatcaacaggggtacgattgggaggccaaaaccgctattaaaatttcactcggtgtgcgggacgaacattcaattgctaagggaagggcgagtggcaccacgaaaagagtcgttttgcaagggtcttgcattcatcaaccgacccataagcatcaatgagatcgtatgcattcgattgagtgagatcggcactaattggagcggagttatgagattcggtgtcactaatgttgatccggccagttttcgcgacattgaattgccaaagttcgcgtgtcctgacctcacctctaagggcggctattgggcaaagtctcttgctgaacgatattccgtggaaggctcaattttgcattttttcaccaatgccaatggcgaaatgtattacggcgttaatggggtgcacaaa

SEQ ID NO: 50424 - DNA, 481 bp, Heterodera glycines
gcattttccattaaaaaaataaaatggtgcgcacattgaaattccatgagaaaaagttgctgaagaaagtggacttcatcaattggccggccgagttggacaacagtcttcatgagaacaaaatcatgcgccgttaccatgtggagaagcgcgagcactacacactgtacaacaaactgtccagagagatccgagaaatggccaaacgcatccgcgagttggacgacaaaaacccgaacaagttggtgttggcacggatgctgctcggcaagctgttcgacatgggcgtgattccgaccgcggacacactcgagcgatgtgacaaagtgacggcatcgtccttttgccgccgtcgcctccctgtcgtttgccacaaaatgcaaatggcaccgacggttaggaagtccagccaactggtggagcagggccatgtccgtgttggtgtcgaaatggtcaccgatccggcctttttggtcacgcg

SEQ ID NO: 50425 - DNA, 665 bp, Heterodera glycines
ctttcttttccttccgccctctttttggccacttcctcccccactttttctgccttctcccccactttcttccgccaatgctctcatcgcccccaaaggaatttgttgcgcctgtgggagaggtgcatgcgtttgtggtcaaatgtatgcaaagtgtcggcacttcggcggcgcacgccgcgcaattggcggaccttttgttggatgccgacatcgtcggccattacagtcatggccttaaccgcctttgcatttacattgaggacgtcgcctcgggcgtaaaaggcgacggtgaaccgaaggtgctcaagcagaagggtgccaccgcttgggtggacgggtgcgatttgcttggcgccgtcgtcggtaatttctgcacagaattggccataaagttggccaaagagcacggcatcggctgggtggtgtgcaagcggtcgaatcattacggcatttgccaacattatgccaaaaagatagcaaatgccggcttgttgggactgtcgttcaccaacacttcgcccatcattttccccactcgctcttcccaaattggccttggcaccaacccaatcagttgttgtgccaattcacgcgaaaaaggcgacggattcattttggacatggcggcgtcgacagttgcgcttgggaagggcgaaatcgca

SEQ ID NO: 50426 - DNA, 480 bp, Heterodera glycines
attgaaataattcttcaatgggcaagccgacgagtgtgaaggacgttgaccaacatgagattgtccagtcggtggccacctttctgaagaagagtggcaagatcaagttgcccgactgggtggacttggtgaagttgggcaaaaacaaagagttggcaccgatcaatcccgactggtattacgtgcgcgtggcatccgttcaccggcaggtgtcggctcgttccgcaacgtgtatggtggaaaaaatcgccgtggtgttgcactcagtcacttcaccaatgcgtccggggcagtgattcgtaaggcattgcaatcgttggaggaaatcaaatgggtggagaaagacggaggcactggtggacgcaaactgaccaaacagggccagaaggatctggaccgcattgcgtcacagctgcgttacagaaccgaagaatgaggatttcgacagatagatggggagaacaattatacttttctgtt

SEQ ID NO: 50427 - DNA, 457 bp, Heterodera glycines
ttgagacattgcagcattttctctgatggacgaagaggcgaagcaggaaaacctggcgaaagagcttctaaagctcacttcttctctcaagcaaaattttacgactgccggttcggtgctaaaggaagacaatgcgacattggatgttatgcaaagggtcgccctgtccaacaaagaaaatctgataagggagaggggccgacttggccaccacgcctaccaatcgtgcttcaactgtgtgatggtcatgacagtgattgtggtcatttggtcgttcattgcgatgattattatgatgcgaatgttccccaaaatttaagtgttttatattttccttggataactcaaaacgggcccaaaccaacaaaataagaacgattcacttctgtgattgcttctgagctgtgttattctgttttgtttatttatttttcgtcatttaaatttgtttttcttt

SEQ ID NO: 50428 - DNA, 843 bp, Heterodera glycines
agatattttaagcaaatattttttattttttctaattttaaaatgaccaacgaagcaggaaattggtgtttgattgaaagtgaccctggccttttcacagaattgataagtgggttgggtgtcaaaggaacacaagttgaggagctgtactccattgacgatgagcagcatctgtccagcttaagacccatttacggtctcattttcctcttcaaatggcgtcccggcgaagaattggagggcactccgatgcccgacgcccccgtgtactttgcccagcaggtgatcacaaatgcgtgtgcctcccaagcactgatcaaccttttgctgaacatttcgtcgtccgatgttcaactgggccccatcctcgaccatttcaaaagtttcaccgtcggctttgacccggcaacgcgtggccttacgctgagcaacagcgaagatattcggaagttgcacaactcgttcacccgggaacactttgtggagttggacgtcccaaaagccaaggcggaggacaatttccactttatcacttacgtgccggtggacggaaagatttacgaattggacggaatgcgcgaggcgcccatttgcctggcggacattgagccgggaaaagaaagttgggtggacacgctgcgcccattcatccaacggcgcattcaaaagtacacagagggcgaaattcacttcaatttgatggcgctggtgccgaatttgaagaccaaatacgagcagcgggttgccgagctgagcgcggttgggatggactcggacgaagtgacaaaggaactgaatgaactgcacatgttgatcagtggcgaggaggaaaagttcaggaac

SEQ ID NO: 50429 - DNA, 1314 bp, Heterodera glycines
gactgaatctcaaaaatgaacggttctctgacaaatggcaacaaagtcgaccgcggcgtcaccattcttttgggcgcgcaatggggcgacgaaggcaaaggcaaagtgttggattttctcatcggacatcacatgattgacattgtcgcgcgatgccaaggcggtaacaatgcgggccataccgttctggcaaatggccgcgagtatcatttccaccttttgccttccggattggcctcagaaaaggtgttgaacattgtcgggaacggagtcgtcgtcaatttggacgcccttttcgaggaattggagagcaacaaaattgaggattcggcagaccgactgttcgtcagtgacagtgcccatttggtgttgcctgtgcacatcgcaacggatatcatgcgggaaaatgcgttgggacaaaactcaaaactcggcaccaccaaacgtggcattggtcccgcctattcgagcaaatgcttccgcaatggcatacgactgggcgaactgctccaccaaccagagaaatttgaacaaaactatcgttcgctggtcgcccacttcaaaactcttttccctgacattgaattggacacggaaagtgacgtcaaacagttgaaggcccatgccgcacgtcttctccaaatgggcattgtctgcaacacaaccgttttcctgcacaaaaagcgtttggagggcaaatcgattttggtggaaggagccaacggcactctgttggacatcgactttggtacctatccgttcgtcacttcgtccaattccaccgtcggcggttgcatcaccggccttggcattccgccgacagccgtccgtcgcgtcatcggcgtggtcaaagcctaccaaacgcgtgtcggctccggtccgttcccaactgaactacttgacgccgatggacatcccagcgaagagggcaaacgtttgcaagaagttggtgctgagattggcgtgaccactcgcagaaaacggcgctgtggttggcttgacttggtgctgttgcgttattctgcaatgatcaacggattcacttctttggctgtaacaaaagtggacatcctggaccaatttcatgaaattaaaattgccattggttacgaattgaatggacggcaaattgagtaccctccagcgaccgtcgatgattgggcaaatttgtgcgtccattacaaaacctttgagggttggcagtcgccaacgaccagtgcccgtcagtgggaacagttgccggacaaatgccgtgcctatttggagttcatacaaaatcaactgggcgtacccgtcgaatacatcggagttggg

SEQ ID NO: 50430 - DNA, 478 bp, Heterodera glycines
cacaaacaagcgcattgtttggattgacggaggaatgcatgccagagagtgggcttcaattcacacggcactttggttcatcgatcagctgatctcactgtatggagtggacccgcaagtcacagcttacatggacacgttgaacttttacgttttgccgttggccaacccggacggatttgaatactcgcgctctgacgtcaacccgcagacgcgcttttggcgcaagaaccgaggccagcaagtgtgcaagaaggaccgctggagacgggaacgatgctgcggcggggtggacctcaataggaacttcgacttccactggggagagactggctccagttctgacatgtgctccgacatttaccaaggtgcctacgccttcagtgagcccgagtcgcgcgcaattcgcgacaaaatgatgtcatcggaattgtacggcaaagttgacgcgttcctcacactgcacacatactcacag

SEQ ID NO: 50431 - DNA, 526 bp, Heterodera glycines
cccccgggctgcattttccggcacgaggctattctctgcactattacatctgatttctgctgctcaccgactccatcgacaacgacacgcgatggaagaactcgtggcgctctcccctggaatccgcgtcggccgctggacgatcacaaagaagctgggcgccggagcattcggagccgtctacctgtgcgtgaacgaccaaggagagcaggccgcgctgaagacggagccggtcaacacgccacatccgctgctcgtcatggaggctcacgtgatgaccaagctggacgcccttcgagacggagacgggaagcacttctgccgctgcttggacctcgggcgcgatgagcaaaaggaccaacaatcgggacaaatgaagaagttcaactacatcgtcatgtcactcgtcggtcgtggcctggacggagtcgtcaaggatgccggtggccgcctcagccttggaagcgcagtcggcgtctcgatccagatgctcgccgctctcagaggactccacaccgtcggctac

SEQ ID NO: 50432 - DNA, 550 bp, Heterodera glycines
tggagctccccgcggtggcggccgctctacaactagtggatcccccgggctgcaggaattcggcacgaggagactgtggaacctttggttggccatgtttagcattgccggctgtctggtgaccagctacgcgctgctcagagagattggcacctacgggctggtcagctcgtacacgaactgtcgcgacttcttcgagggattcaccggcttgtggacctggtggttctgcatgtcgaaatttgccgagttgggcgacacttacttcatcgtcctgcgcaagaagcccctgatgttcctgcattggtaccaccacgtggccacgctcaactacggtctgatgtcctacgtggacaacaccgcgttcaacacatggattgtgtggctgaacttcagtgtgcacgccgtcatgtacacctattactttttggccgcctgccgcatccgtctgcccgcttggttcgcccagtgtttgaccacctctcagatcacccagtttctgatcactttggccatccttgcccacgtcggtgtgcgactgttggtcggg

SEQ ID NO: 50433 - DNA, 476 bp, Heterodera glycines
gtggactcctcaaacggttggaagaggattgtattgggtcagccccagcagcaatggacaaggacgacgccaaacaatttgaagaatatcgggcgaggaaagtcgcaatgataactggcatttctggtcaggatgggtcgtaccttgccgaatttctcctcgccaaggggtaccaagtgcacggggtcatccgtcgttcctcctccttcaacactggtcgaattgagcatttgtactccaatccgatgacacacgctgtcggttccagcttcaacttgcactacggcgacatgaccgactcgtcctgtttgatcaaactgatcagcaccattcgtcccaccgaactgtaccatttggccgcacagagtcacgtcaaggtgtctttcgacttgcccgagtacaccgccgaagtggacgccgtcggcactttgcgcctcctcgacgcgatccacgcgtgcggactcacccgattggtc

SEQ ID NO: 50434 - DNA, 849 bp, Heterodera glycines
tcttctcaaaatgccttctgtttcttttgtggatgtccccgttaattcgccgtttacctttgagaatctcccgttcggcgtcttctcaacaaatgaaaatagcaaaaaacgcattggagatagcgataggaacccaaatcttggacctttcggtcgagacacatctcttcaccgggacgctgctttccgagagacaaaatgtttttagtcaagaaacgctgaaccaattcatgggactgagtcggcagtgttggctcgaggcgcgtctcaccctccaatcgttgctgtccaatgccaacccaatgcttcgcgatgacagcgaattgcgcgaaagggcttttgttgcgcagtcggaggccaagatgcatttgcccgccctaattggcgattacactgacttttattcatctatttatcatgccacgaatgttggcacaatgtttcgtggcaaagacaacgcacttatggagaattggaaatggctgcccgcttgcttaccatggcagggcgtcaagcattgttgtctccggcacggcagtcaatcgcccgtggggccaagtcaaggcggaagatgatacccagccgaactttgtgacaagtcggttaatggactttgagttggaaatggcatttttcgtgggagggcccgaaaacgctttgggcacgccaattccaattgagaagacggaggaacacatcttcggaatggttctgatgaatgattggagtgcaagggacatccaaaaatgggagtatgttccgctgggcccattcctcggcaaaagtttcgccaccaccatttccccgtgggtcgtcacaatggaagcactccgtccgttcgtcgtcgac

SEQ ID NO: 50435 - DNA, 994 bp, Heterodera glycines
gtttccattcagtacagactcggcataatcggattttcatcgacgggcgataagcaaatggcaggaaacttcggcctttgggaccaattcgccgcgttggaattcgtttcggaaaacattgcgcaatttggaggaaaccctgcggacattaccctttttggcgaaagtgccggcgccgcgagcgtttctttcctcggactttccccgcacagccaaggtcttttccaaaagtgcgtccaattaagcggctcgcctttgtccgcgtgggcactaaatggacgcgtaattaacgaaactgcccaattagcagcagcgattaattgcgctgagaatggacgggaaggaatcaaagaatgccttaaggggaaaacggtggacgaattgttcgaaggggtcgaaaaagtgggcaaaactcgccaggaatacgacttcaccaaatggggcccccttttggacggcgactttctgccggcggacattccgcaactgatcgaaagagcaccgccgaagcccacagtgatgggaattgccgatttagagacacttttatggacattggccatcggtcacaacgacagcatttcactttatgcaattccatgggacgaaatggccaattttgacagacgacgctttgaaatgtttgtccaaaactttgtgactaaacgcgaattatttggccagcaaatggcgacggaattgcaacgagaaattgtgcaattttacacaagagacaaagcggtggagagaattgaaaatgagggcgaatattatgtgaggaaaatcactttgcttttgtctgacctccaattcgccgtgccggtcatttgggaggcggcgcaaaaggcgcagaaggggtggccgatttacttcttcaaaaacagttacttcaacgaagtggtcttcccaaaagtggtcaaagtcagacaaaatttccacgccaacgattttatttattttttcgaccgaaaagtgtatcgttttgaattcaatg

SEQ ID NO: 50436 - DNA, 420 bp, Heterodera glycines
gttttagctaaaccagccaaacagataaacgacgacaaatgggtgtcgccttcgtcctgtgctgtttctccgtcgcctttacgccttcgctgttcatttttcgccgtttcgttgcccccgacccgttgcgcatcattctcttcgtgctcggtgccttcttttggctctgttctctgctgttgtccgccgtcgttttcgccgtgttcggccaacatctgttgctggtcgccattttcttctccattctgttccaagaagtggcgcgcgcactcttctacctgttgttgtacaaaacgcaaagcaatttggcccgactgatggccgccgatgcgaaccgcaccggcacagtgtccagcatgcgcttgctgtactcgtcccggcacattttggccattgtctgtggcctcggcatgggcaccg

SEQ ID NO: 50437 - DNA, 693 bp, Heterodera glycines
ttctattctaattcattaaaatgacaactgcacatcgtccaacatttgatccggcaaagggtggaactggacgcaatgaaggcgatttagcgaagctttctcaacaatattctagcagggacatgccttcgcatatgacattgaagtacagacaaaaaggacaggcccaccccgaggaagtcgttgcaaagaacctccgccgtgacattgaggaacgtgagcagcattcgcgtgagcgtcgttcacgggattctctggacagttttggcacgggtcccacaaacaaaaaacaacgcgttgaggacacttcatctgcacgtaatcttgacgctgatgaaccatttgatgagctcaacgaggacgacaccgacttggacgaagactctgataacgaggccgaacttatggcggaactcgagcgcattcgcaaagaaagagctgcggaaagggcctcaaaagaggcgaaagaacgcgaagaacaggaacgcattcgagaagagaacattctccatgggaatccgctgctgaaccccgcatcgtcggagtttaaggtcaaacgccgttgggatgacgatgtcgtcttcaagaattgtgcacgaggaattgacgaaaggaagaaaacgccttcattcataaatgacgcaattcgatcggagttccatcgcaaattcatggagaaatacattaaatgag

SEQ ID NO: 50438 - DNA, 690 bp, Heterodera glycines
acctcaaaaggaggcaagtttgagattcagtttctttttattacaaataaatgggacgtcgtatccgagctcaacgcaaaggacggggtgggattttcaaatcgcacagcaaacatcgcaagggcccggctaaattgcgcccagtggattactccgagcgtcatggcttcatccgaggcattgtaaaagacataatccacgatcctggccgaggggcgccattggccattgtacaattccgcgatccatacaaatatcgggtgaagaaagagacgatgattgcggcggagggattgcacactggacagtttatttactgcggcaagaaagcacaagtccaaattggaaatgttatgcctattggagaacttccggaaggtacgaccgtctgcaatttggaggagaaggccggtgaccgtggacgtttggcaaggacttcaggtaattatgccattatcgtcgcacataaccccgacacgaagcgcacgcgaattcgtcttccatctggtgccaagaaggtcgttccatccgccaaccgtgcaatgattggcattgttgctggcggtggtcgcaccggacaaaccgcttttgaaggcaggccgagcctaccacaaatataaggtcaaacgcaactgttggcccaaagttcgtggggtggcaatgaacccggtcgaacatcctcacggagga

SEQ ID NO: 50439 - DNA, 474 bp, Heterodera glycines
agcaaacttccgccggagctcactcagcaagtgatgcgcggtgaaatgcccgacttgaccaagttgccgttggatttgcagcagtggatcaaagataactttgaccggcttgttgcttcgttggagaacaatcccgatctgagcattgacgaaatcatgaagaagttgcccacgttcgagcacccgctcatgtccaccttctccccctacgacatcaacaaggtcgacgccgatttggtggtccaacagcgcaacgaggaggaggccaaccaccgtttctggcgcattttcgccgccagcgccttggctttggctggtgccgtgacgctgggcgttctcagtgccttcttctggtacctgaaacggagcagacgtctggcggacccgccgatggcgccgccgattggcattgacgggggccccgagctgccctcggtgattcgtgagcagtacttccgaccgtctgcctcttca

SEQ ID NO: 50440 - DNA, 574 bp, Heterodera glycines
gttttaattaaatttggatatctgaaagccgacggacggatctcttctcatgcgtcgcttgtcacagctgtttttgcggtgccattggacgccctcggagattgcggcgagttgtcgtcatgccagcagtgccgccaccgcccgtcccttgtacatggacgtgcaggcgaccacaccgatgacctgggacaaaaccgactggcgcaatgcccgtttcgagtatacgccgaagcaagtgaacccgaacattgcggcccatttgatcgccgagctggcgcccgtgcccagcgaggagcgcgtggtgcgctgcgacgggggccaccgcgagttgggccacccgcgcgtttacatcaacttggacaagccgggcacacacgcttgtggttactgtggccaacgcttttacaatgtgcacatgacaaaggccgagggattggacattcatcatattcaagtgtagcggttgaagaacatacagatggtgatcgggaaaaagtgatcgaaatttcgttttgtttattttttcgccaaagctcgtaatttagaaggcaattattaaaaaagctgtggatta

SEQ ID NO: 50441 - DNA, 860 bp, Heterodera glycines
cactttttctttctttcgtccttttcttctccattaatttctctccttccgtcgttgcccaacgcacccaatgggacgcgttcaatttccccaacccaacggcgcccggcgatttccatcgctgcaaaatgcgatcgacggcacttttgtgtgacccggacgaggtattaagcgaacaggagcggtaccgactgaactacgaattgggactgatcgaatcggcaacgagacaggaaaacggaagggaattctgtgagcggaaaggaattaacgcggccgtagcaattgcacgccaagtgaagggcgggcaggagcaggatgtgcggaatatggccaatgaccttttgcgacgctggacgttggacaaacaatgcgaagaggcacttgttattgtgctgtcgctggaggaccgccgcttttgggtggcgcggatgccgcgagtgccggtttatgcgcaggaattcacggaactcttcaaaagagagcaaggcactttcaaaaccggtcgcaattcggagggccttcaaaatgtaatccgcgccatccgcgaccgcgctctctccaagcagtttccctccgcacgccctgacgacgacggccgttctaaaggcactccgtttgtgccgatgccaaaaccaacgcctcacccggagggaaagcacaggcagaggggcggcggaggagtgcttagttggctgttcatccttctggtcatcgtcttcgtggtcatccccttggcatgctgctgctgctgtctttatttctgctttttccgcaaaaaggacagcggcagcaacaaccgcacaccacacaatgcggaaaacggtggctctggcgcggaaagacggggcggcaccgga

SEQ ID NO: 50442 - DNA, 480 bp, Heterodera glycines
cctcgtgccgcgactttgcagaagcaggaattggatttgacttcggcgatgattgcttcgggttcgtggcgtggcaagcagttcaaacagtacaatttctccgcgatgggcgtgccgcccccctccggccatctccaccctttgctcaaagtgcgtgccgaatttcgcgacattttcttccaaatgggtttctctgaaatgccaacaaatcgtttcgtggagagttccttctggaactttgacgctctgttccaaccccaacaacacccggcacgcgactcacatgacaccttttttctttcaagaccggcactttcaacagaattcccggaagattaccttgaaagtgtcagaaaagtgcattctgagggcggtttcggttctattggctatcgctacgattggaagttggaagaagcgcagaagaatttgctgaggacgcacaccaccgccgtttctgcccgtcagctttaccttctc

SEQ ID NO: 50443 - DNA, 495 bp, Heterodera glycines
aagaaggttttgtctgttccaaaagccaaaaaatcaaaaaagcattcgttgacaaaatgggcatttccgacaacgatgtccaaaagcagcttcgccatatgatggcatttattgagcaggaagctaacgaaaaagcagaagaaatcgacgcaaaagcggaggaggagtttaacattgagaaggggaaattggtgcaacagcaaaggcagaaaatcatggaatattacgagaagaaagagaagcaagtggagctgcagcgcaagattcagaggtcgaatatgcaaaatcagagtcggttgaaatgtttgaaggcgcgggacgaccatttgaaaaatgtgttggaggaggcacgcgccaatctcagcaaaatttcggcggacagagagcgctatccggccattctcaaaggacttttgcttcagggccttttccaattgctcgaaagcaaagttgtgttgcgatgccgcaagaaagacgaggaaatggtggcgagga

SEQ ID NO: 50444 - DNA, 493 bp, Heterodera glycines
gtccaattaaggtcaataatttcgctttctttgtttgagcttactatttccgcataatggacgaggaacaacttttggattatgaggaagaacaagaagagactcaggaacaacaatcaaaaaatgatgcagcaacaaacggagatgcaacaaagaaaattaaaggtaattatgcgagcattcacagcagcggattccgagatttgatgctccgtccggagttacttcgtgcgataattgattgtggatttgagcacccttctgaagtgcagcatgagtgtattccacaagctattcttggaatggacattgtctgtcaggcgaaatcgggaatgggtaaaactgcagtgtttgtgcttgccactttgcaacaactgacaccgactgatggcacggtctctgttctcgtcatgtgtcacactcgtgaactcgcctttcaaatttcgaaagaatatgagcggttcagcaagtacatgccaggagtgaaggtttc

SEQ ID NO: 50445 - DNA, 1332 bp, Heterodera glycines
attctctgatcaacaatgctctcaaaaaaacttttccagtctatcttgaacaaatctccaaagactgctttctcaacttcggctcgtttgtctgcgtcaagtgctgaagtttccaggattttggaggagaaaattcttggacaggcgtcacaaatcaatttggaggaaactggaagagttctttcaattggagatggaatcgcacgtgtttatgggcttaagaacattcaggcagaagaaatggttgagtttgactctggaatgaagggaatggcacttaatttggaaactgacaacgttggtgtggtcgtctttggaaatgataaagtgatcaaggaaggtgacgtggtaaagcgaacaggttcaattgtcgatgtgggcgttggcgaggctttgcttggacgtgtcgttgacgcgttgggcaatcccatcgacggaaaaggtccaatcaatgtcagcaaacgctctcgtgttgaagtcaaagcgccgggaatcattccgcgtgttggtgtgcgagagccaatgttgacgggggtaaaggcggtagactcattagtgcccattggccgtggacagcgtgaattgatcatcggagaccgtcagactgggaaaactgccattgccatcgacaccataatcaatcaaaagcgtttcaactcaagcacagaagaaaagaagaaattgtactgcatttacgttgccattggccagaagcgatcgacggtggcacaaattgtgaaacgactcactgacacggacgcaatgaagtacacaatcatcgtttccgccactgcttcggatgctgcgccgctgcagtttttggccccctattctggcgccgccatgggcgagttttttcgcgataacggcaaacacgcgttgattatctacgacgatctctccaaacaagcggtcgcttaccgtcaaatgtctctgctgttgcgccgtccacccggtcgtgaagcttacccaggtgatgtcttctacctccactcgcgtctgctcgaacgtgcggccaaaatgaatgagactcatggcggcggctcaatgaccgctctgccgatcattgagacacaggcaggggatgtgtccgcctacattcctacaaacgttatctccatcaccgatggccaaatcttccttgaaaccgagttgttctacaagggagttcgtcctgcgattaacgttgggctttccgtgtcacgtgtgggttccgcagcacagacaaagtcgatgaagcaggtcgccggttcgatgaagctcgagcttgctcaataccgcgaagtggcagcctttgcccagttcggatccgacttggatgcctccacgcac

SEQ ID NO: 50446 - DNA, 410 bp, Heterodera glycines
tggaatggcttggctttgtcgaaaaatatgcaaatgtcccttctgtgtgcactttgaatgtatcttcgcttacggataattcctacaacaattggctccaacgcattttggtctccgctacgctttccatggacgtccattccctccacaaatggaacctccgatgtccaattctgttccaagctgagaaagagataaaagtcaaccaacaaactgagaattcggcggaacctgccgttcttctgccaaattcactcactcataaactcattgtttgtaagcaaaacttcaaaccattgcttctcttcagagagatcgacttaaattttgacaaatggaatagaatcattgtttttgtcaacaagaaacaaaccagtcgaaggctctcctctctcatggaaaccttgagc

SEQ ID NO: 50447 - DNA, 480 bp, Heterodera glycines
atagccctacaatttaaagagttgcaaaatgaccgcctctttgcaacctttacgagcccaacccggctggacggcggacaaatgcaaagagcaaattgaggtggccaagagcgagaatcggacattccaacgccaaacgctgcaggcgcatctggtccatttgctgaacaaagagcacaaattcaacgaggccatccaattggctgctcaacttgtgcgcgagctgaagaaggtggacgacaaggatttgctggtcgatgtgcaattggaggagagcattggcttttaccatctgtccaactacacaaaggcacgtgccgagttggtcagcgcacggactatcgccaacaccaaatacactccgcccgccatgcaggcccgtctcgacctccaatcgggcattttgcacgcggccgacgaccgcgacttcaagacggcctactcctacttcttcgaggcgttccaggcgttcgactcggt

SEQ ID NO: 50448 - DNA, 669 bp, Heterodera glycines
ccaattaaggggtattcattttttgtgcaatgtctcatagtcagtccgagaaatcgctcgaccagcagttcgattgttgtgagtgcgtcgtcgatgatttgctgaagggccgtcttggcgattctcaatttgcgcaaaggaataacgtcttgagagattgtatccaatctctccaatccgtggccaaaacaatcgatggcctttcgttgttcagtgccaatgattccgtcgaagaacttccgacgaactctctccgttttttgctcgtcccagcttatttggccaccgcactgcaagaaatcggcgtggagatggacaaacggggcgcatatttgagagcttcgaagacatattatcgcgaattcctgcagaacatgtcaatttttgggctggtaaacttccgacttccttggcttaatgaagatgagcgcaattccgacgaccagcaaaaagagaatgggcgcaaccgatcgaaactgatcagcagttttgacgatgcaaaagcacgtcgacagcacaccatttcccgtcttcaacaattggaacagctcgaaaagactgtcgaacagctgaaaaacgaaaaacgacgcaatgatgacgaggcggcgcagcgtgaactgattttcgcacttttgcgtttttggtccattcgatctgtgaaggaactgg

SEQ ID NO: 50449 - DNA, 726 bp, Heterodera glycines
gctcctttaactcattttcttgatccaccaccgttttgtcctcctacccatttcctaaatcaaataacaatccacagatcgctgagaaatggccgagaacatcgaagaaatccttgccgaaatcgacggctcccaaattgaggagtaccaacgctttttcgatatgttcgaccgcggaaagaacggttacataatggccactcaaattgggcaaattatgaacgcgatggagcaggactttgacgagaagaccctcagaaaattgatccgaaaattcgacgcggacggctcgggcaaattggaattcgacgaattctgcgcgttggtgtacactgtggccaacactgtggacaaagacacgttgcgaaaagagctgagagaggcattccgactgtttgacaaggagggcaatggttacatttcgcgccccacgctgaaaggactgctgcatgaaattgcacccgatctcagcgacaaggatttggaggcggcggtggacgaaattgacgaggacggcagcggaaagatcgaatttgaggaattttgggaactgatggcgggcgaaacggactaaacgaacgatcagaaagaggaaagaaagaacgaaagaaagtgatctattggcggaaacggcggaacgtacaaaaaacgtcctcaaaacaaaaataaaaaaataattcgccaattattatttttgcagcggaatttcccattaaaattcagtgg

SEQ ID NO: 50450 - DNA, 480 bp, Heterodera glycines
gaaaagggaggcgatcctgaacaaattcgcaaatctcaagtgggccgtttcgcagatgtttcattagtggacaaagtgatttcggcggactccgaatggcgaaaagagcgtttctttttggacggtttgaatcgtgcgataaaagtgtgcagtactgcgattggtgacaaaatgaagaagaaagagtcggctggtgactccgatgccattccggaaggacaaatcaaatcacttgcagaactgaaaatggatgacatcaaagaaatgaaaatttcgcaaattaaaacagtcaagggaatggtggacgaagaagtcagacggaccaaactcagaatggaaacgcttgagggggacagaaatgagcatttggccaaaattgggaatttgctgcataattcggtgcccatcagtgacaatgaagacgaaaatcgagtcgaacggacatttggcgactgcgcaagcagaaaaagttattctcat

SEQ ID NO: 50451 - DNA, 1170 bp, Heterodera glycines
gtccaattaagcttttccttcgcttttctcctccgtcccaccaaaatggcctccggtcattacgaagtttggcactcgcaaagcgtcggctttcccattttctatttgccctatgaatacgacgacaagtgggcgttggagaagcgcgtgtggaacccggcccaggccaaatggctccacccggtgttcatccgccattggcacatttccttctttttggtgttcctttatatcgccggcatccattatctcaagtggtggatgcgcgacagaaagccgttcgaactgcgcaactttttggtcttttggaatgccggattggccattttcagcaccttcggggcgttgaggttcagcgaggagtttctctacgttatgaagaacagatcattccaagattcggtgtgcctttccatttcgcccactcagccggccgctctttgggcctttcttttttcgctttccaaagtggccgagtttggggacaccgttctgctggtgctgaggaaacgcccgctcatcttcctccattggttccaccattcggttgtgctgatttacagttggcattccgcgactgaactcaccgcagccggccgttggttcatccaattgaattactcagtccacgccatcatgtacacttactacacattcgccagcctcggaatccgattccccaaatgggtgtcgatgactgtgaccacgctgcagaccacccaaatgcttatcggcgtgttcatctctctgtacgtcgcccgcctgaagcttttctcctcccgtccgacggtgtgccaacagtccgttgaaaatatgtgcatttgcttctccatttacaccgcgttcgccttccttttcatccgcttcttcgtcaattcgtatttactcggcaaaaaaccgacggcagcgaaagccgtggcgaagaaagcgcaatgagtgaagcagcataagcccgggatgctcagaacattccatccgcgcactttcgttgatgggagcagcccaaaagccgggaacacattctatgccccaaatcctccaacttttttaattgttgctggcgggaaaatcatttggcatccctccccttttatttattatatttttatttatgtatagtacagtacacactcaaattatttcctatgctttgataaatttaaagtttct

SEQ ID NO: 50452 - DNA, 659 bp, Heterodera glycines
ctcacgaacggacgtgccctggtgcaacaatggcaaaggaggaatactgtttcgatgcaaaggcggcggcagcggcggggcaatctcgtcgtccttcgacaacggcatcagtacttgtgcaaggagatggccagtcaagcagatttgtggatgcgatcatcagaaaagtcacgcagccgcctcttcaacgcttcacggatgagatcaccgacgaggaactcaaacaactctgcaaggcggccacggacttcttccggatgcagccgacgctcgtcaggatccgcccgccggtcgtcgtcgtcggagacatccacggacaattctcggatctgcagaggatcttcacaacgcatggccccccgccggagcagcagtacatgttcttgggcgactacgtcgacagaggagcacactcgatggagacaatcatccttctcttctgctacaagatcaagtacccatcgaacttcatgctgctgcgcgggaaccacgaatgctccaacatcaacaaagcttatggcttctacgaagagatcgaccgccgttacccgcgaacgggcgctcgtcgactcttcgacctcttcaatcaagtcttcgcctggatgccattcgtcggactgatcggcgagaagatcctctgcatggacggcggcatctcc

SEQ ID NO: 50453 - DNA, 658 bp, Heterodera glycines
ggaaggtcaggcattcgcctgtccaacgcttcacggatgagatcaccgacgaggagctcaaacaactctgcatggcggccacggacatcttcagaatgcagccgacgctcgtcaggattcagccgccggtcgtcgtcgtgggcgacatccatggacaattcacggacctgcagaggatcttccacacgcacggcaaccctccagagcagcagtacgtcttcctgggcgactacgccgaccgaggttcccagtcactggaaacaattgttcttctcttctgctacaaggtcaaatacccagcgaacttcatgctgctgcgcgggaaccacgagtgcgccaacatcaacagagtgtatggcttcttcgatgaggtcaaccgccgctaccagcgtccgggtccccgccgcctctacgacctcttcaatcagacgttcgcctggatgccctacgtcggcctgatcggcgacaaaatcctgtgtatgcacggcgggcctctccgacccgatccacagcctggagcaactcagccagctgaatcctcccgcaaatacaaccccccggcttcggacgctggagaaacggatccttttgtggggagaaaccctgccgaacaggaaatatcgatggcaggcatacccccgaacaaccatggagaaag

SEQ ID NO: 50454 - DNA, 735 bp, Heterodera glycines
gtttgaggtatttaactaaaaatcgcatccctattaatcactttaaagccgttctctttgaattttcactttcctgctcattttttgataatgggtcgacacaggcgttatccgatgaaaaaaacagcaaagaatacaaaccaagcccaaaaaatagaacgattgtcctttgacactgatcagacgcctcttcaaacaccaaaggacagcaggaaaaacaagaatatgaacaaaaagccatccaattcgatgttggaggaacagccaacaacatggaaagagcaaatgttgaagaaactgacagacgaagttgcacaacaaaaaaataaaatacagaaaaggaacaaaaaaccaaagaatcgacttttggaagaaacgcagaaattgggttatcatcacatgccctgggaaagtgcaaaaacactgatttaccgaattcagcaagaccaaaacaaggctataaatgaagaacttttaaaggctcgatttgcaaaagcaggaagagatgttaaggaaatagcggaggaatacaaaataatggacgaaaaaaacaaaatgaaaaaggagcggagaaaagtattgcacgagaaacagagcaaattaagagccaaagaaaaagacattgacgaaggaatcggagcgaattcggaagaagaaatggaccaaaacgaaatggaagaagggaagagagaagacggaagaggcggagaagcgcaagagaaaagagcaggtcca

SEQ ID NO: 50455 - DNA, 628 bp, Heterodera glycines
gtttcgcctccagcggatgctccgccgatcgaaattttgcggcattttcaaattcgttgccaatgggtggtcaaagtgagcagcagcattttggagaattggaagtgaaaacggcggagaagacgagcagagacggagaggaaggcaagcggaggacggaggacagacaacaaaaagtgcagagagagcacagggaaaacagagagcagagagagtacagagagcacgcgcttccctttaagggaatggtgggcaacgacccgagctttgagcagatgcgtcaaattgtgtgcgttcagaaactccgtccaccgatggaaacccaatggaatgacggcgccaatcccataatgcattcgctttacgttctgatgacggagtgttggagcgaacattcgctgagcagacacacggcactgaaagtgaaaaaggaattgggggcactgagcgaacaaggcggggacggacgggggaaagagacaaattagcaccgaataaaagtgacaaggaacagcagcagaaagaagaagaaagaagcagaaacagaagagacttttgaaaaaggaaatacccatctttggccttcgagatggcttattcatatgcttctgataaagatttgcgattt

SEQ ID NO: 50456 - DNA, 534 bp, Heterodera glycines
cactacacgcccaacgccggtgatgagacagtgcttggaccctccgacgttgtgaagattgactatggaacgcacgtgaacggtcgcatcatcgactgtgccttcactttgacattcgacccaaagttcgacactctcttaaacgccgtgagagaggccaccgaaacgggcattcgcgaggcgggcatcgatgttcgtctttgtgacattggcgaggcaattgaagaggtgatgacttcatacgaacttgaactcgacggaaaaaccttcccaataaaaccaatacggaatttgaacggacattccattgggccttatcgaatccatgcaggaaaaacggttccaattgtgaagaatggcgagcaagtgaaaatggaggagaatgaattctttgcaattgagacattcggaagtacgggtaaaggacatgtgcacgacgacatggaaaccagtcattacatgaagaactacgacctccatgaggagcacattcctctcagactcacgcgtagcaaaaaacttcttgccacaatc

SEQ ID NO: 50457 - DNA, 650 bp, Heterodera glycines
ctttttacgccattttggccaattctttgcctccatccgccaattcaccaactcatccatcaataatcttcgccacggctcaccacttctttacatgtcggccgtaagagaatggtgtgctcccattgagccgtgtaacagcctttctgtagaaaagtgaaacatgtgaaaaaggcgttaatttgccatgggctttggacctgatcacagagcggaggataaggcgcaacaatgtccttctctgaaaagtttttgttgccaaagtgtgcaatagaagctattacaaaccgcaaaggtctctgagtgacatcaaatatttggtttcgcccagtcggtccaaccaccggcgacaaaatgccaaagtcccgaagttcttgttgattgtggcaagaagttttttgctacgcgtgagtctgaaacgatttagcttatacaaataaaaaccctttttttacgcattggattaacacttcacctgagaggaatgtgctcctcatggaggtcgtagttcttcatgtaatgactggtttccatgtcgtcgtgcacatgtcctttacccgtacttccgaatgtctcaattgcaaagctaaaaaggaaacagtaaattaaattagttatttattaactgacaattcattctcctccatttt

SEQ ID NO: 50458 - DNA, 586 bp, Heterodera glycines
tgacaaagacgacagaacggcgatcaatcggatgaccagcgaagagaaaaaggctttggacagcagttacgaagagatttacaacgattttcgacgtgctgcagaatcgcacagacaaacgcgaaagtacgtgaagtcatggattaagcccgggatgaagctgatcgacatttgtgagcgacttgaagcgcacagtcgtcgaatgatcaacgagtcgggactggaggctggcctggccttcccgaccgggtgctccattaatcattgcgccgctcactacacgcccaacgccggtgatgagacagtgcttggaccctccgacgttgtgaagattgactatggaacgcacgtgaacggtcgcatcatcgactgtgccttcactttgacattcgacccaaagttcgacactctcttaaacgccgtgagagaggccaccgaaacgggcattcgcgaggcgggcatcgatgttcgtctttgtgacattggcgaggcaattgaagaggtgatgacttcatacgaacttgaactcgacggaaaaaccttcccaataaaaccaatacggaatttgaacggacattccattggg

SEQ ID NO: 50459 - DNA, 552 bp, Heterodera glycines
aaagctggagctccccgcggtggcggccgctctttcactagtggatcccccgggctgcaggatttcggcacgagggtatacaatacatataagctaaacaaagaaaaagctttcaatggaccaaaacaacgaccaacgccgtgctgttaacgaatatcggcttaatgaggacaatgaactgcgtttagaagtgggcaaagaagaagtcattctcgaattgctggagggttctgccgaaatattcggctcccaaatatccatgcacaaacgctactctctccccccagggtttcgcgccgccgttttcacatataaaggtgcccttattgaagtggtcggtcgaacagatagtgcttacattgcacaacaaacacctatgattatctatttgaatactcatgccgctctcgagagtatgcgaaaaagtgccgagacacaattggtggccgaccgaacatcttccgcccgtggtccacgtcttttggttgccggaccaactgatgttggaaaatcgactctttgtcgaatattatgcaattacgccgtccggga

SEQ ID NO: 50460 - DNA, 793 bp, Heterodera glycines
gctccaccaagcctttttggaaagcggcaggcagcactggatcggggttacagaagatatgaacgggtacagacaggagggactcgggaagatggacatgacgattaaagacgggagacggtggagcgcatccagcgcatatctgactaatattttggaccggccaaatctgttcactaccgccggtgtcacttgcacctctgttttgttcaacaatcatagagcaatcggaatcgaatttatacgatatcatcgtttcatgctcaccgaagaagtggatgcctactcacgggagaaaatttactgcgaagactctgtgattctttgtgccggtgccattaatacgcctcaattgctaatgctcagtggggtcggaccggcatctcacttgaaagttcatcaaatccctgtcgtgcaggacatgccgggcgtgggccaaaaatctacaggaccatcttgaactttatgtacaacagaaatgcaccaagccgatcacattgtacaacaaatccacgtggcgacacccccaccgcatggtcatcaacggtcttcagtggttcctcaccaaaaagggcttggctgcgacaagtcatctcgagtctggcggctttgcccggtccagcacagaaattgatcaccccgacttgcaattccatttccttccgtcgacggttcacgaggacggcaggcaaagtccgaattgccatgcctttcaagttcacgtgggcccaatgcggacgaagtcggcaggggaaatcactttacagagcaaggacccgcgcacatcgccgct

SEQ ID NO: 50461 - DNA, 476 bp, Heterodera glycines
ctaattcgtcgcttggccgtgcttacacgcccgggggaggaggtattgaaggagtggtcgagagtttgaacggtgccaaccacaacaacggaggaacgtccggacaatcggccgcacggcacgctgaccattcaggcattggccagccgtgctccagccacgtgcgcgaactgcccacgctgaacacccatttgacttctcccgcagcagccgtcgctctcggcctcatttatctgcgaacgggcgattgttggatcagagaaacgctggcaattgctgacacattttacgagattgaccaaattcgtcctgacatgctaatgattcgcactttttcgcgttgccttgtcgatttcgaagacattaaatgcacgagagaatgggtcgatgcccaaattccgcagataattcgtaaatatgtcaaacgctttttggaagtcaagtccaaggaggacatgtggtggtccgatttcatt

SEQ ID NO: 50462 - DNA, 629 bp, Heterodera glycines
ttaattcttaaatatgagtagtcagcaacaacagttggatgtgcttattgtcatagatggtaccaacattgataagccttgtgttgatattttttcgagttctggctttgttgcttcttgtctcaattgggtttcaaagcttcattctcctaatgtaattgttgcgttacccaatcaaccgaatgatgtagcagccgaacttttaaaaaaatgggcttctaaattcaagcagcttcaggcatttggtgtttcaaattgccaatctttaaacgatgttcttcgtgaagttgattttcgacaaattcttagaaatgatttcatgctcatacaaaatttagccactttttgtttttcctatctgacgcgacaaatcgaaaaatttcgaaacgataggcggcaaaacaacaaaaatgtgctcacattgctttattactcaaaacgaaattatggaaggaaattcgaggaagatcggtctctgattggatacattgaacaaactcaaaaattaacacattatgagaacattggcaaacatagaacttttactgttccaaagagtgaatttttacatgacacggttttccgggttgacctgttctcctgtgggattgcgctttgtggaatcgaat

SEQ ID NO: 50463 - DNA, 705 bp, Heterodera glycines
aaaatggcatcgaatttgacggttaaagttcaccccatcgtttacatgtccatcgtcgacgcctatgagcgtaagtcatcttcgaacatcaacagtcgcgtgggcaccgttcgttccgtggaaacaacggaaaaccgagcgttgggcacgttgttgggattttacgagaagaatgtcgtccaggtgacaagctgttacgccgtgccgttccgcgagacctccgacgacattcccgaaataaatgatgcattgaacagacaaatgtggcacatgtccaaaaggacttcgccgtccgaacaaatcgtcggatggttcttcactgtgcccgacctttctgaaatgtgtccgcattatcacggctattacacggggttagtcaatgaaacgccgcgaaaagagccgccgcccattattctgatcaccatggatttcaccttttcgggagagagcgccgaccgacttccgatcaaagcatacgcggcacgcgaggcgggggtcccggggaaaggagcgactcaagcgacgattttctacccgttaaaagttgaaatggacgtgttccctggcgaatccgttgcactttcatttataatgaggggtttggactcggaacggcgcgagattaaaattgccaacagtcaggagcaatttttggagaatgggaaacagatggtccactggttggagaagatgctcggctacctg

SEQ ID NO: 50464 - DNA, 1032 bp, Heterodera glycines
acaacccatacccaaaaactctttaatgagccgggtggcaaagatgtttatgaaggcgtaaaaatcgactacagcggaaccgaggttaaccctgaaaatttcgaagcggtccttttgggcgatgagcagcgatcggagggaaagccggtgctgaaaagcactgaaaaggacaaagtgttcgtgtacttctcggaccatggcgcggtcggagttatcggattcccagcagccgacttaacggttaaacaattgactcaaacactgaaggaaatgcatgccaaaaaaatgtacggcgaattgacattttatctcgaagcatgcgaatcgggctcaatgtttgaccacacattggcgcagagtttgaaaatttacgcagtcaccgcggccaatggcgacgaatcgagctggggctgtttttgcgacaccaaatttttgcccggaaattgtttgggcgatcttttttcagtgaattggatgcaagactcggaccaggaaaatttacgcaccgaaactctgcggaaacaatttggcattgtgcgcgaagaaacgaacaaaagccacgtgatgcactacggcgacttgcaaattcaggacgaacacgtttctgagtttatgggcaaagagcaggcgcacaagcgcaacgaacgcccaccatcaccgcacaaatttccaatgtttccttctcgagacattcccatgttcatgatggcacgacgtcagaatgagtctaagcagattcagcgaaatctccgcgtggcgtggaaaaaaagaagctttctcgagcaatcgattaaacaaattgtgcaccaacttgtgcacgacatgaacaaccggcgacagatgttgacgacttatccgcaacaaattcgcgacttggactgtcaccatgaggtgatgcacacgttcagcaatctctgcttcagatttagcgagaatccgtacgcactgaaatatgcctatgttttggccaatttatgcgagcgacccgagttggacgccgaacgtatcagaatggcactgattgaacactgt

SEQ ID NO: 50465 - DNA, 597 bp, Heterodera glycines
cctccccaagttcagctgagtgcgcttgtccttcccccttcgtcacaatcctttaacatcgaaagtcccaactccgatttaaactctccacaaatttcgaaccgtcaaacaaataaaacttcggcactatcaatgccccggggcacgaccaaaacggtggcacagcgaaggggcgggcggagaccgcgagaagcggaagatcaccagctaacggatgaggacaaagaccgacgggcgaagcgacgcgagcgcaacaaacaagcagcggcacggtgccgacggaggcgggaggagaaaatgcaaagtttgcaggaacaggtggacgaattgcggaagcaaaatgaacgccgggagaatgaaatccgaaaaatgcgagaaaaagagcagcgacttttggaaatgttgcgactgagaaacggcggaattgtgcagcagcagttgcaccaccatttgcaagcagttcacgtccaacaacagcaccaatccgtcgctgatcatccgactgtcagtcggcccacttctcttcttcagccttttctggtcggactgaataacaaaagagattctgtgaagccccggcagtgccatcctcgtcct

SEQ ID NO: 50466 - DNA, 476 bp, Heterodera glycines
taagctcccattgtattattactatgaccaaaacggataatgggaagttcaccgaagaaaataacacgttgatggcaaatggaaggacaaaaccctcagagaaaacatctctgtccacatttatatacaacaaacaggacgggactttcttagggcgttctgcaaagtcttgggcacagatcatcggattctacatcgtcttttacatatttctagctctcttttggttgggatgtctgtggacctttcttaatacgatcgatgattttgttccgagataccacggggaaaacacaattattggcgcaaacccaggtgttggttatcagccttggctggccagcaatcccgagtccacgctgatcaaattttacgaaaacgacacctcaagttacaaggattatctcaatgccatcgatacgtttctggagaagtatcacaacacagaaaacactcgcttctgcgacgagaacggc

SEQ ID NO: 50467 - DNA, 510 bp, Heterodera glycines
tctgcctccaacatgtcaagcagtcttgacgtcttcaaactgacggacgatgacgcaatgaaatttttggtgtgcgaatcgcacatcggcaccaaaaagatggactaccaaatggagcattatgtgtggaagcgtcgatcagacggcattcacatcatcaacattcgcaaaacgtgggagaaactgttgttcgccgcccgtgccatcgctgccattgaaaatccgtccgatgtttttgttgtctctactcatcccaactcccaacgcgatgtgctccagttcgccgctcacattggtgccactccaatcgttggccggtttacgaccgggtctttgaccaaccatcttctgaagaattgcttggaacctcggctgctcgcggggtccgaccctgaggtgcaccaacaggagggacgcgacgcgtcctacgagaacactcctgggattgctccgaccaacacagactcgacgttgagatttgtggacattgccgtcccggcaaacaacaag

SEQ ID NO: 50468 - DNA, 479 bp, Heterodera glycines
gcaacccggagcagtacctggccaatttacatgagctttacctaaagacgcacaaattgctgggccttctgcaggagaaattccgcacgaattcattggacccccaatttttgccaacgctcactcagtcggtgttcggcccctatttggtcacatatgcaaaaattgagcacaaattcatcgccgacaaatgcacttttacgctccgaaagttctacgagtccaaagggcaccaaaaacggagtattctctcgagcggacttcaagaactcaagtcgcgtctgctgacagcggaggattttggtggcgaaacttttctttccgaaatcatagcgataaacattctgcaggagtttaagaatgccttcgcccgctgttcatcgctttgcaaaaaaacggagtctcttgaactgaacacagtgctttttgacatgcttctcaaatttctgtacaccgaacacgtggaatacgccattgag

SEQ ID NO: 50469 - DNA, 769 bp, Heterodera glycines
atttttggctggcaatgacaacgaaaagtgagggggatgaaaataattctgtggatgagaatggcgagccctctggcaatcacgcggagaattgcagcaccgggccctcttcgcctgccccgtcagtgtcctgcgaggcgtgcggtaccaatttctcacaacttgagaaggatgcttttgccgcagtacgcgaaatggcgccgtacgtcaaaaccatcgccatttccgaaatactatcccgcactcccgagctcatattcctcaacattgtcactttggaaaatgagagttattgcgtggaactcactcaacgaggctggcgggtgagttccgaccgtctcgactgtatgaacggagacattcaaaagttggaaatgcacgtcacttactacgacgccattgagcagctgttggacagcttaagcgagcagtaccgcgagaattttggcgccgcactctcttcaaaactggccgctctgcagacggaacagaagcaaagacagcaggacggagaatcagagggaaacggcggaggggcggcagagagaagcgacgcggggcaaaggacggacgacgagccgaactgacaatgagcggagcaaagaaaagcacagaatgtttgtccattttgattgtcccacccttcgttggtctgttactcatttacacttctccgaggcgagtgtcccatttctcttccattcccttcagtttcattttgaccgtaatcatatttaaaaattttttgtaaaataaaaattattttgtc

SEQ ID NO: 50470 - DNA, 476 bp, Heterodera glycines
caaatgttgagttggttggaggacaaaaacgagaagttcttgaacattgtcacggacattatgcagaaagtgatcacgaagaattccgaacaaatgacatttttcatcggaatgaacggacaccaaaaactggtcggactaattgccaattgtcgtcaggaggcactgttatggagagttaccaaactgatggacaaaattgtgcagatggacgcggaaagaatggtcggcgcgggactattggaagcattgcaacgccatttggaccatccgagccaaagactgcttcgtcaagtgctgtcgtgcgttcgaagtgtcagtcacgtgccaaccgccgaccgaacagttcagccacttctgcagaaactgctccaacttcttggaacgagtgacattcgcctaaaagaaaattgtgtggacattttggccaatttgtgcgccaacaattcccaaaataaatccttccttgttgagaa

SEQ ID NO: 50471 - DNA, 1090 bp, Heterodera glycines
caatttgggtttataaattgttttggatataaatttgccaacattgccttcgtttttcctggggatgaacaccagcacaccgcgcgatgctccgacggcgcaagacgcacgaactttgcgccaaatggcgtcacttcgccggtccatgcgcagcactctgtccccaattgtggcggaagagggggagagagaagtggggacttccgccgccgccgcaacccaacggcgttcaaccgacttggcccagtcgttgctccaacgacggtcagtgctcagccaatttggcagtgcccagtcgtcggtgtcttcctccgtcgggagttacactccgtcaatgatggccagcaaaattgacaatcggcccgccattgtcatcgaaattggcactcgactgaccaggattggctttgccggtgattttttgccccaggagattttccgctccgaattcgttgacccattggacggtccgtccccgtcctccccaattgcactgtttgaccggtcgcgcactgagcaacagcagtacgaagtgctcgtcaaattcttcaaaaacatcgttttcggcaaattgttgaccactatgagctcgcgtcgtgtggtggtggtcgaatcgcttttggtgtctaattggcaacggaatgccattgcccgtgccctcttccaatgcccttctctaagcgctcattccattttgttcgctccgtcccatttgtgctgcacttttcccttcaacacaaaaacttgtctggtcattgacatgggtgctgacgaagccgtgctctttccggtagctgaaggggtgctgatgctgaacagtttggagaccagtgtggcgccctccgcgacggcgttggagcaaaatgtgcgtcgtttgatggcccaatttggccgtctgcggaccggggccgaagacgatgcggagggacggccgctcactgagactgagttggaacaagcggaccgaatgcgactgtgggaggacgtggcggtgcgcttctgtttcgccacaacggccgcgcgcggaaaacgcattcagacgtatttggccaattccgctgcttcttcgtctgccgattgttccgctgcg

SEQ ID NO: 50472 - DNA, 629 bp, Heterodera glycines
caaaagccaaacagatcaacaaataaacacgtcagattagggtcgattcggaatggcacaatatgtgccgtggtattacaaacgctcaccgcccattttttgtggcgtttgtgtgcccgtttatttgggcgtttggtccgttcgtaagttcatcgttgtgcttggctttctgctctttctgatcggcgttctgctactgctcggtcttctgctcatttgcgtggccatcgaatgttccgctgctgccggtgctttacttccgttcgccttagtgcttatcattgctgggctactacttttgcactgcggatgggctgctcatcttttggacgttggcgagggaatgccgtacggtgaatattcgacgacaaaaacggtgagcacttcgaccagaacgaaaaggacggcgccgaagggggaggaggagccggtgttcgaagagatcgaaggcaaacagccgccgcccgagatcaagcagggattttggcaattcgatgagcgcgaggcgtggcaaacggtggccaatccgtacccgataaattacacgctgaagccggtgattgaacgccaaccgtacgtgccataaccatgggaaagcaatgaaaatgccattctctgtgccaattttg

SEQ ID NO: 50473 - DNA, 462 bp, Heterodera glycines
gtgacgcaaaagattgtgaagaaaaaacagaagaaaggggcgcaggcgggcaaatacgtcaccaaaacggtgaccaacgaaagcttcttcaactttttcgatccgaaagtgacgaccatcacagaggaaatggacgacatcgaggaacagaaaaccaatgatgacttcgaggttggacagatcattcgtgaacagctgattccccgtgcggtgcttttcttcactggtgaggcggcagaggaagacgaatatgacgagttcgatgacgaggaggaaatgggggacgaacagtcggaagaggaggacaatgccatgcactgaaggaccattggacgctgttaatgacaattgtttagtgacgctgatgatgttctctatttaaaagttgttttgttgacacttatctttatcacacacattctgttaatgcgcgtacacacaaacaaaagatttattctgttc

SEQ ID NO: 50474 - DNA, 475 bp, Heterodera glycines
ctattggtcttttgttagagcaaccggtgaaaaaacgcaaaattgaagttggggaaagcgatggcaatgagcagcggagtgttgcggtccgtctcttctcggaggacggaaaagagatcggccaggcacccgtcgttcttcttgcttccaccactgctgaacagctccaagtgctttaccaccaattgttgcgcagtgaaaaacagcaaaacggcgaatgcggcgacgacggagactttgacgaagggacggcgcccgtccaatttcggaccgtcgcagacgaaaaaagtggcggaaaagggacggaaattgtcgattctttgctcgactcactgccctcagaacgcctcttcttggaaaagcccctcgagttggtctgtctgccacaggccgtgttccgagttcggcccgtcactcggtgcaccgcttcgttgcccggccatggcgaacccgtcctttccgtacagttcagtcc

SEQ ID NO: 50475 - DNA, 639 bp, Heterodera glycines
gtccaccaactttggtgcagacacaggtagaaggtggctctacccttttctccctgaatttcttcggcgagtccgctttcctcactcagtcttctcagctttacctcgaaacgtgcattgcctcgttgggcgattgttattgcatttcgcagtcttaccgcgctgaaaagtcgcgcacgcggcgccatttggccgaatattcgcacgtggaggctgagtttccatttatcaccttcgaaggtcattttcaaagtgtagagaaccagcgaagctgtgtgttcagatttgatggtgcgcattgaggaaatgacatgtgacacagtcaacagagtgatggccgacccggaaatacgcgaacttatccagcagcagtggcaaaaggattcccaatatgagttcgtcgctcccaaacggccttttcttcggatgacttatgcggaggcaattgaatggcttcaaaagaatgaagtgatgaacgaagaggggaaacccttccaattcggcgaggatattcccgaaggccctgagcgatttatgaccgacacaattggacaggtctttgaatccctcgtttttctttcacaatcgcccgttcccttcagccaattcttctcaatcgctttccgcatggaattaagg

SEQ ID NO: 50476 - DNA, 476 bp, Heterodera glycines
aaaagtttcatcgattcggcaattgcatttgtgcgaaagcacggctttgatggcattgacatcgtaagagaatacccaaagggcggagagcagaagcgaaacttcagcagattttttaaggaactgaaagacgccgttcggaaagaagcgtcttcaagcggaaggccgcgtctgctgatcactgctgcggttgcggcggggacggaaaacattgacaacggatacgacattccgacagtcggaaagcttctcgactttgtgcttctgatgggctacgacttccatggctcgtgggagcagcagacggggatgaacgcgccattgtacggacggtccaaagatgtgccggagaagcgcttgtggaatgtggctggtgctgcgaattattgggctaagaagggcatgccgaaatcaaagattattatcggaatcccaacatatggccgtggatggacactgagcaacccgcaacaatt

SEQ ID NO: 50477 - DNA, 1065 bp, Heterodera glycines
gtttgagtgcgtctgatgttgtgctttcttcgttctgcaaatggttgctcctccgtgggattctcttcgtctgtctgttctcgttttgcttttcctcgcctttgtgtgttggcttcgttgtccaatgagtcgggactgagcgagtgccttccccaatcggttgaaagtgtttcggcatcggctgctgcaattcgggagagagaacgccgtgagcgccttctgacgatatcggacgcaatgaagttttacctggagaggaagcaggacgaaatggcgattctggagaaggagaagttgctgtacgcgcagggaaagcgccacttggccaacataatgggcttcgaccccgactcgatcagcggggaccaaatatcgcagtccatccgttatttgttccccagcggcctattcgacaaaaaagcgctacccgtgatgaaacccccggaggaagtgttcccgaaaatcgtgaagattgacgtggacgcctccggctctccgaagcattcgctgtttttcactgccaaacccaaattctattctttgctttcggacataaacaaacgcacacaaaaactggtgaatgcattcgacggacatcagacaaaagtgaacgaagttgaaaagatgcaaacgatggaattggcacttctcggagaaaaaccggccgagaaaggacagatcaatttgatgggcacccaatgggtgacgaaggatcagctgcagcagcaaatgcaggagatcctttccgatgacgaatatgcaaattttataattgcgctcgaatacatttcgcaattgccaaattccgcggaggaggaggactttatcatgtcattgcgtcgtgggattggagcaagtgaaaaaaatagacttttccgcgcaaaagtaccggaggtgacgataaacgaagatggcaggagagaatgctggagaatttgcaagacgagggcttccgccgtgaaaattgtggtcagagacggaggcaccggccttttcacagtcaatgggcaacactattgcacgttccgttcgctcctcgcgagagaatgtctcttggctccaatg

SEQ ID NO: 50478 - DNA, 436 bp, Heterodera glycines
tcattctaccccgattcgtactaaattttcccaaacatgtaaaatgtgttgagtgttcatccaaatttttcaaccaaaattccccatttctcgcttctttacaattttatttctataccattattcgacttcaaacagagtttattaacgacatgccaggcaatgaaacaattcgaggccatttggaaaaacggaaggattggatccgacggacgagggaccatcaggaaaagtcggcggatatcaaaaagttgaagagaagcgcacgggaacggaaccccgacgaattccattttcatatgttgcggagtcaaatcggatttgatggaacacatcgcgacttagagacggaagaggaggagaaaagcgaagcgcaacgccttttgagcgatgtcagcgacattaatttcgtacaattcaaattgggcatggaacg

SEQ ID NO: 50479 - DNA, 705 bp, Heterodera glycines
caaataagtgccaaatttaatgccaaatgttgtctcaaattgaggaccatctcttcctcagtttttggattgaatatgctcaaaagtatttgattgatgctaagattggccgtgttctcactgttgcacttgaccatattccccaaattcggcaccttcaaaatgtggagtaccgacacattcgaatggctgatgtcgagtcggaggagctgttggcgagtcagaagctgcaaaatgcattggattacgtcgaagactcagtgaacagaggaatcaacattgttgttcattgtcaatgtggcataagccgatcggcaacagttgtgatggcttatctgatgaggaaatacaaatggaatgttaacgattcgttttcttttgtgaaagcgcgacgttcatgcgttcagccaaatccgtctttcttacgacaattggaagttttccagaagttggactatcgttgtgacttgctaactctgcgcaactcgaagctgttcaaggaattcgaatgcatttccgaaaatccatccgaagtcagtcggtcaacttgtgacatttactcattaaatgaatcggcaaaactttctgttgggaggcgattttcgtgcaaaaaatgtcgctgcgatctcttctatgatttcaatattttatcacacaattttgttgttgccagcggccaaaatgaaagcgtaaagttggcaaaaa

SEQ ID NO: 50480 - DNA, 1195 bp, Heterodera glycines
atattccgcccattttgggcttttaaaacacattcaatttcaaacggaagtgttaaatgtgcaacgggtggaggaatttgcacagaatggcaaatggacagtcacttatcggaagacggaggacgaggagcaaaaagtgatggacgacactttcgacggcgtcatgctttgcactggccatcactgctccgaacggtggccaaacccccctttccccgggcagtccgtcttccgtggccaagtcattcactcgcgcgcctttcacaccgcaaaaccattcgaagaccaaactgttgtggtggtgggcattggcaattccgggggcgatattgcggtggaactgagcaaagttgccaaaaaggtgtatttgtcgacccggaccggctcgtgggtgatcaacagtgtgtgggagaagggccaccccactgacgcggtactgctcaaccgattcgcatttgccctgcgggcgatcactccgcgcagcgtccaaaacagattgatagagcgcaagttgaaccttcgccttgaccacgaacggtacgggcttcgcccgtcgcatcgctttttggaggcgcacgtcacagtgaacgacgaactgcccaatcgaatcgcgagcggaacggtggtgataaagccgaacattcagaagttggcggagaaggacgtgacttttgacgatggtacgactgtgtacggtgtggatacagtaatcttcgccaccggctacaactttttctttcctcagctggagaatggcagattgatttctgtgcaggacaacaaaacacttttgtacaaattgatgtttccgcacgacttatcgcctaagaacactttggccatcattggcctcatccaacccaccggctccattatgcccatttcggaaatgcaggcgcggctgttttgtgcccaattggtcggtgacatttcactcccgcaaaaggcacagatggaagccgacgcattggcacaagcgcgaagaattagcaaggaatttgtgaacagaccacggcacacaattcaagtgcaatacgtggattacatggacgagttggccaagttggtcggctgcaagccgaaattagtcggacgcattttcactgatccatgcctggccaaagttctcctcttcaacggcctcgtgccgtaccaattccgattggatgggccccaccgatgggaaggggcgcga

SEQ ID NO: 50481 - DNA, 658 bp, Heterodera glycines
gagaaaattcgtagatgggaaattactacagtccacctaaacgagtggggcagaaccctttcactcgttctggggcgccgccgcctaaattggtcattaggaaggacaaggatgtgccgatgcaccgagtcaatgacccgatgagctttgcagctgcatatggcggatgaacgcgttcggactgcgggactctcgaaggcggagagagagtggagagaaaaatgggttcatgaccagagtatgcatccggatgagcctatccatgtcgacgcggtccaccgccaactgaatccaatcagagtgctttatcgatggccaatggataagctttacaagcatttcttgcgaccaacttttgggaattactgggcaacgattatccgtgtctatgttcccaagttcttctggttctttatgacattcgaatttttctactacgtgtggaaatacgaatcgaagagttggcaaaaacgaattggcttttccactatcaatcgaccggatcgttatgtgcttgtcaaagaccacgatgaggagacgcttaagcttggcctgacagactacagccgatctgactattttgacaaggaattctaccagcgcattaaaacggccaacatcgacttcggccccccgaagaggccgtggtgatcgctgc

SEQ ID NO: 50482 - DNA, 472 bp, Heterodera glycines
ccaagtttgagcaaaaacaaatcataatgaaatacgtcgctgcttacatgttggcatcgctgggcggaaatggcgacccatcgcccaaggatttggaaaaaattcttgccgccggcggacttgaggtggacatggacaatgtgaacgccgtcatcaacgcagtgaaaggcaagtccattgacgaggttattacggcgggccaaaagaaattggccaccatgccaaccggtggaggcgctgcggcaccggcagcagctgcagcaacgggcgctgctgcgccggccgggaaggaggagaaggaggaaaagaaaaaggaggaagtgaaggaggagtcggacgacgacatgggcttcggactgttcgactgatcaacggacggacggaatgccaaagtggattgtgccgtcggaaaattctttctgttttttcttgttatcccctgtcaaaaaatcataaaattgtttttgttgaa

SEQ ID NO: 50483 - DNA, 883 bp, Heterodera glycines
tttctcgcctaacgaagtgcgcgaaaaagcgagccaaatgatcggctaccatttggtcaccaaacagacgacggccgagggccgactgtgccaggccgtgttggtctccaagcgactgttcacgcgcaaggagtactacttcagcatcactttggaccgttccaccgccggtcccattttgatcggctcctccaagggcggagtcaacattgaggaggttgccgccactgatccggatgcgatcatcaccattccgatcaatattaacacgggcgttacactgcagatcgccgaagacatggccactcggatgggcttccatgacgaatgccgtgcacaggcggccgacaccattcagcgattgtacgacctgttcatcaaaagtgacggtaacttggtcgaaatcaaccccatggtggaggacgcggaaggcaatgtggtgtgcatggactgcaaattcgttgtcgacccgaacgccgagtttcgccaaaaggagctgttcaaactgaaggacagcagccaggaggacgagctggaggtgcgcgcccagaaggccaacctgaactacattcgactggacggcaacatcggatgcatggtgaatggtgccggtttggcgatggccaccatggacatcatcaaattgcacggcggcgaacccgcaaattttttggacgttggtggcggcgcaacagttgaacaggtgtacgaggcgttcaaaatcatcactgcggacgagaagaaggtcaatgccattctggtgaacattttcggtggcattatgcgctgcgatgtgatcgcccaaggcattatcaaagcggcggtcgtccgagttggacttgaagattccgattgtgtgccgtctgcaggggacgcgcgtgga

SEQ ID NO: 50484 - DNA, 660 bp, Heterodera glycines
ccacggccaatttcctgacttgatgagaatcttcaactgcctcgggaccccgccggagaagaaatacctgttcctgggcgactacgtggaccgtggcgcgcaatccgtggagaccatcatgctgctgctttgctacaaggtcaaatatccgacatcgattgtgctgctgagagggaaccacgagacgagcaacatcaacgcaacgtacggcttcaaaaaggaactggaggaacgctatccggcccattcgcaagccctgttcgacagcttcaatgacaccttcgcgtggatgccgctgaccgggctaatcggccaaaaaattttatgcatgcatggaggcatcagcaacaaaattcgaagcattgaacagctcaagcaattggaacgcccgatgctgctaccgccgaccgatagtctgcacattgaccttatgtgggccgacccgatggaagcgcaaggacaacgaccgaatccacgaggcgcaggtgtcctgttcggcgaagatgtggttatcagaacttgccagctgctgaagatttcgtgcatcatccgagcgcaccaattcatccaatccggatttgagccaatgttcaaccaacgactcatcaccgttttctctgcacccgcctacacaggccaaacaaacacgggcgcggtact

SEQ ID NO: 50485 - DNA, 734 bp, Heterodera glycines
gaaccaatgcacaaccaattccttccgcttgcgactgcgttgtcgtccatccgtcagtaccattcgccttccgtttatggcaaatcggatgaactgttgcagctgcgcattgagctgaacatgaccaccgaaaaagcgaccaaattcgtgtcagattcgcgtcaattggttgtccttccgcatccttttcaacactctgaaaagcgtaccattttggcatttgccggcaccaaagaagcgcaacaggaagtgatgctaaacggagcggacattgcaattgggccggaaatggtcaaaaagattctcaagggtcagttcaacatggacgactacgacttttgcattgcccacacggacatggccaagcacattctgccacttcgcggtgttatcaaaacgcgatttccgactaaaatcaacggaggaattggcgatgatctcaacgaaattttggaaagctttttgtccggaataaatttgaccgtaagaagggaccctaccaacaaggaatggggcctaagtgagcctttgatcggaagattgagcatgtccgatgagcaaattgaggagaacgtggcggtcattgttgacactctgtgcaaaatgcgcaaagccgtgcttggcccgttcatcaaccgcgcctctctgatcacagcctctgccggccctcaacagtcgtttttccctgtcgacgtgagcccttgggaagcgttgccgacggaagaggaaattga

SEQ ID NO: 50486 - DNA, 476 bp, Heterodera glycines
attaatatgattggtgcgacttggataaagaatttaaaaatcactgtgcagggccgtgagatttatgactctaactcactttatgcttataaagcatacttggatgccgaactttcttattccaaaaacgtaaaggagtcagacctacaggcgagcgggtattatgtggacagtgagaatcaggacggcacggatattactcagcagggttttgaactgagaagaaaattgttttcacaaagtcaaactgcacaatttattacaaaattggatgcagatatttttaatcaggacagatatatggtgaatggagttgagattgatatacaacttacccctaatgacaatgagtttatggtaatggcagcggccgacgataaatatagaatagaaattaccgcttgtaaattatatgttaaaactcttgaagttgttgatggtcttgcattagacatacagaaaaaacttgaaagcaa

SEQ ID NO: 50487 - DNA, 490 bp, Heterodera glycines
atttggaccaaatgggcgagtcgacttgggccatcaggagttccaagtcgtggtcgaccatttcgcggtacggccaataccaagcggagtcctttcgccattctctgaaagaggaaacggaaaaactgcgccaggccaaccccaaattgttccaacagcaaacgcccagcacttctgacacgccacccgtcgactgtgcttcgccagcaccgtcgaagaagcgcaaaacggccgcttcaatggccgcggggagcggaacgccgacgagcagaggccgcgtggaggagagcagcccgtacaaaatcatcaaattcggcaccaacattgacctgagtgacgagcgaaaattctatgtccaactgaaggaattgaacaaattgcccgccttttgtcgcctccattccgccagtaatatgctcagttatctcggccacaccgtttttgggatgaacactgtccaattgtatttgaaagtgcccggctgcagaac

SEQ ID NO: 50488 - DNA, 523 bp, Heterodera glycines
aataccatcacggcccggctgattttaaaattccagtttcctcattatcaactgtgcttctattgatttacgtacctttttatgatggacgaggacatggaagaagtcgaaattgtttttgctcagcgattggccagcggtgaaccaacggcacgacaaagggccatgaaacacttgcgaacgcacataagagaaaggacgaaaactgatgcaaagggcttttcctctgtttcgttagcgcgactttgcaaagggttgcattatgcgctttggatgcaggacaaaatgactttgcaggaggaacttgcggatgaaatctgcgctctttgcaactattttcgcaccgacgagcaactgcttgaatttgtcgttgttctgttcactacgctttctaaggaatggccgtacatcgaccggtggcgaatggacaaatttctcatgttggtccgtcgtttggttcgcactttgttccgtcgattgtcctcccaccgctgggacccgccattgtgtgaccaatttttgc

SEQ ID NO: 50489 - DNA, 658 bp, Heterodera glycines
attaaaatactagtttttattttttgaataatggacgatgatgacgcaatcggtggtgctgaggcattcaaatgggaacaagcttacacggaagggctgaacattcgttcggtgctccaagaggacgaacatggctccgtcgaggagtccatccgtcggttggtcatggacgagaagcgacagcgacggatggaccgactgccggccaaaatccgactcggaatgatgcgttatgtccatttggctgtcgattgttcctccgccattctctccgccgatttctttccctcgcgtctctccgtcgcgttggaatgtcttcgtaaattcgtcgacaaattcttcctgcttaatcccctctcccaaatgggactcatcgctgtgcgcgacaaacgcgccgagcgcatcagcggatttaccagttctgtccaatttctgctcgaatctctgcaggacatcagttccaccaattgtggtggtgaattctctctccaatctgtcctccaatgcgctcttcactctttccagggtttgcccgcccattccagcaaagagtgcattcttttgattgcccagtttaagttccgtcgatgcgtcccctctccgccacactttcgagcagctcaaaatgcgttccgtccgctgctccatcgtttcattt

SEQ ID NO: 50490 - DNA, 417 bp, Heterodera glycines
atttaattattcttcccggttatttttagtaatccaatttttaaaattgtataagctttttaagatggcccgtcgctatgatactcgtacgacaatcttctctccagaaggccgtctctaccaagttgaatatgcaatggaagcaattggtcaggctgggacttgtcttggaattcgagctcccgatggcattttcattgctgcacaaaaactaacggcaaacaaattgcttgatgatcgagtgttaaatacaagtcatttgaagcagatcattgcaacagttgctttaaaattttactgaaatccaagcgggaggcgcctttttagtttacagaattttttgtcacaataagtcaaaatttattttcggtaattccgtggtctctttatcaccttccattatttttgaacgaaatt

SEQ ID NO: 50491 - DNA, 754 bp, Heterodera glycines
cacaatttgctgtcccattgtttcccgatgctgtgaagaagcaatgcttgaaggaattgaaacagcgatatgaaaataaagaaattaaaagtccgccggaaaattttgaagaatgggttctgcaccattttggaccccaaattttggatgtgttcttcaatccgtactccaaaaaagtgtggacagtgaaaccgtcgaaaatgtctccaatttgggttggcactcgggtggcaaaattgccacaagaaaagctggaggaactgtgctcaatggatgccaatgtgttgaaaaatgccgattttggatggggcccaaatgcacaatttaatttcccaaaatacggtggcaccggcgccgtgtggaaaaatatgacggagaaattgccatcggaatggttcaaatataattcaaaggtccttcgcgttgaccatcgccaaaagtgtgtgcattacgtccaactgaatgccaatggtcagccgacgggcccaacaaagtcactgaaatacgacgcactgatcaactccagtcccatcgacgcgttcgtggcggacaacaaaatttgcgagatgccgttgttggagcacaacaaagtttttgttattggcgtcggattgaaactgccaatgactgagttttgcgagaaatacacttggctctactttcctgaccctgacgtgccgttctatcgtgtcacatttttcacggtatggtgaagtaactccggacaacaccaaattttggtccgttttgtgcg

SEQ ID NO: 50492 - DNA, 516 bp, Heterodera glycines
  unsure (1)..(516): unsure at all n locations
ttagaataaatacaaattattttaaaaatgcgtgaaattgttcatattcaagctggtcaatgtggaaatcagatcggttcgaagttctgggaagtgatttctgatgagcatggaattcaaccggacgggacttacaaaggcgaaacggacctccaacttgaacggattaatgtctactataacgaggcccatggtggcaagtacgtgccccgcgctgtgcttgtggacctcgagccgggcatttttttttcaatccgggccggaccttacggncagcttttccgtctcgacaacttcgtgttcggacaaagcggagcgggcaacaactgggccaagggccattacaccgagggagccgaattggtggacaacgtgttggacgttgtgctaaaggaggcggaggggtgcggccgtctgcaaggctttcaatgactcaccccctcgggagtagcaaacggaccgggaggggaactctgtttgttcgcgaaaacccgtgaagaataaccggaaccgata

SEQ ID NO: 50493 - DNA, 777 bp, Heterodera glycines
cctcgctccgtccaaataagttttatttctgaaatgaaaacttcacctaagattaaaagcagaaaaactgcttcaacaaatgaagtgaaaaaggaatgccctgaaggcacagagaaccgcgaaaatgttgggacgtcgagcaggttaattgtgaagaatttgccgtgtggcaaaaagacgcgatgggacgaggccaaagttcgagcgcacttctccaaatttggcactttgacggacgttcggctgaaactcagcgaaaagaccggagcttgcaaatttgcctttgtcggcttttcatctgccgaacattgccaaaatgccatcaaagcgttggacggcgcgtacattggcggctcaaaacttacggtcgaagagtgtaaagcattgacaactgaccgaacggcgatcaccaaacaactttcgttgaacaaacgcaaaaaactgaggcaaaaaggcaaatgcgaagttgatgaggaggaggacaaagaagaagctgccgaagaggcggacgtcgactcactaattgaaaagcaaattttggacaccggacgacttttccttcgaaatttgccctttgtgtgctcggaagagcaaatacggcaacttttcgagccgtttggaccactcgccgagttggaatgtgtcgtggacaatgcgggcaaatgcaaagggtacgccctgtgcaccttcatcttcccggaacatgcggttgccgcgtggaaagcgttggacggcaccgtttttatgggccgaatgctgcacataatcgccggcgaa

SEQ ID NO: 50494 - DNA, 487 bp, Heterodera glycines
cttccttggattgagttcaagaaatgtctttcctcaaagtgttcgcccgtcgtctctttttgcatgtcacttttcttcgggtaccaacgatgatgttttatttgaacgggtcaatcaaaaattggtcatcacgctgaacaggcccaaggcattgaatgctcttaactttccgatgattcgcaaaatttacccccagcttaggaattcttccttcgatttggcacttgtcaaaggtacgggtggcttagccttttgtgccggtggcgatgtcctcgctgtctcaaaatcctataaggcgaatgatccggaccgaatttttcagcaattttttctagaagaataccaactcaatcatttaattggatcactcagccgaccctacgttgccttcatcgatggcattacaatgggcgggggatgtggcctctcattgcacggggcttttcgtgtggctactgaacgaacaatattggctatgccagaaacg

SEQ ID NO: 50495 - DNA, 494 bp, Heterodera glycines
catgatgatcgtgtgccagcatttacggaacttacgcttatcagacattcacccgactctgagaatattcaaatgcaattcgccgcgttttttatttacagcggccttggaagattgatgagaccagttaggaaccttttatttgatcaaatcgagcaaataggaatttttgaacaagtttacctttccattataattgaccccgaagaggcagaaccgggcgtaacaatgcaccaagaacttcatccctcgtctctgttctcattcgctggcaatttgattccttttcccgatcacaaccaatcgcctcgaaatgtgtatcaatgtcaaatgggaaaacagacaatgggggtcccagtccacgcttggcagacgcgtacggacaacaaaatgtacaaattgcaaactgcgcaaaaacctttactcaaattggaggcccatgacaaatacgaaatggacgaataccctctaggcacaaatgcgtgtgtggccgt

SEQ ID NO: 50496 - DNA, 894 bp, Heterodera glycines
tccatacatctcaaactcaaaaattttcttcgtttttctactgcttctcgtcaatataattgcttatgagctcaatccatacaatactttgggaattcgtcggacagccagtcaaaaagacattaaagatgcttataagaaattagccttgcaatggcatccagacaaaaacaagaatcccgagtccaatcagcggtttatggatgtcaatcaagcttataaaattttgtcgaaccctcagagaagaaaggcttatgatactttcggcttcacagatgagcaatttgaaggcatgcgaaaggaattctttcgcgaacaacagcagcatcagtttcagtttgtcagatggccccaacctccaaggaaaaaacaaacggatatttctcaatttttgttgccattcggaagtgtgcttggaacactatttttcattttcgtcgttgggtacttccttaaccatatgaatgtttcggagcaatcgaagagacggagacagccacaaaaccgcgcagaagaagctaatgaaatgggaggaggagacacgaaaacagaggacaatgaaaaagagcttgctgaggaccaaaaggcaccattgactgaggaggagcggcagcagaagttgcaagcgcgggtttggcgagtgatgggtccgatgattcgggaattgcgagctgaaactcagttcgggctgatacggctgctgaagccgggctgtcgttcgatcatcgtcctcgtggacaaggacagtaaggacaaactgctccagcagtttgcccgtcacctgtactgcttgagaaacaacaagactttctcattcggtttcctaatggtgccgaagaatctcagctggttccgttctttgctcgagctgactcttccagacgaacagcaaaa

SEQ ID NO: 50497 - DNA, 814 bp, Heterodera glycines
attttctttaattagttagctaaaattctcaatggatgatttgttaaatgacatcgatgaagatcagcagcaaagcgaaagtgggagcagttcgcttccaccgcagtctgttaacacgatggcttggctggaacaaaacaaacagaaccaagcgcgggcattctccgagaatttgttgaaagatttgagcgctgtttcagagacgggcaaatctgctgaatttaacgtcaaagatgaaatggaaggtgaagcaggagacgaagaggagaatcagttcattcagaattgtcagcggattcgttcttaccaagtggcttccgagaagaattgcaaccacgaggcaatcgtcccctttgacgttgaatatcaacagctaaagaagaccaacaccccggcaaagctttacgagttcaaactcgacatgttccaaagccaggcactcaaatgcctggacaatcaacagtctgtgctggtctcggctcacacatcggccgggaaaactgttgttgccctctacgcaattgccatggcattgcgggacaaacagcgagtgatttacacgtccccaatcaaagcattgagcaaccaaaagtaccgtgaacttgttgaagagttcgaagacgttggccttgtcaccggggatgtgacactgaacccaaatgcatcatgtgttgtgatgaccaccgaaatactgcgttcaatgctttaccgaggctgtgaaattgtgagagaagtcggctgggtgatctttgatgagattcattacatgcgcgacaaagaacgtggcgtcgtctgggaagaaactctcatttta

SEQ ID NO: 50498 - DNA, 1443 bp, Heterodera glycines
gagattgattggaataaccggctgcccttcgtcggtcgctgctgcgactcattccttcgcattttccgctgtttgtgcgttttccgtgccttttctgtttccccccttttcgactgccgcaaaaacaacaaattaataaataattaaaacgaaacgaattttaatgggacaactgctggtcgcttttcggggagcagccaatggcaacagaaacaacgacaaccaaaatgcagcaacaaatccatcggcagggcttagacgactgttcgttctgctcagtgcttttttgccgttcggacagcaaacagcgaataatttggagcaacggaacgacaataatcagcagggagagtcagcagaaatgggccaattccgtgccgggttcggcaggcgccgccggcgccatgcgccggctcctcccgatttgtcgggcagcggcgaggcgggcggtcacggcagtccgtgcggtgccaacggcggcggctcatttttcggctcgcactttctgatgggcggtgagctgtacgactcatcaaagccggaagtctttttgtttggcgaccagcaggacttggagctgttgggcagcaaatcagtgaagttccctttctcggccaaaggcgtcaccgattcgatcggtgttctgaacgcgttggtcaatgtgcgcaaggactccgtcaaattcacaaaagttggccgtgccggcggcggttattcctccggcttttaccgtttggaattcgtcttcgactgcgacgtgtcctgctttgtccaaattcacttctgtgcccgggaacaaattgacgaacagcagccacaacttctccagattgtctctcgtcagccccaatttgaacactccgaacgtttccatttccccgtgggcgccaaccaacacttcagccatttcaccttcaaaccgcaccgatacgacatgaaaatgatgcattgggacggcggcccagttttcccggtggtcatcgaaattcgatcggtgtccgaccaattccctgaacaggtccaaaccacgctttgcagcatcgaacggtccaatgatcagtcggcggtgctaattctgaagccaatgaagcagaaactgttctcggacggtgtcctatttttgctgcaagaaattttcggcattgagaacaaagagatggagacggcgccgccggcgttggcggatgaaaacggcgccgaatgcatcatttgcatggccaactcgagggacacaatgattttgccgtgccgtcatttgtgcatttgcaatggttgtgccgaaacactgcgatataagctgaataattgcccaatttgccgttcgccgtttaaagcactgctaaaaatcaaagcgatgcgcaattcactggtgggcaaaggggtcggctctgacgggagtatgaccacggcacggattcgtcatgagccggtgactctgattga

SEQ ID NO: 50499 - DNA, 809 bp, Heterodera glycines
acgctctcttcgtcggacgtcggtggtggcaatcgcagtagtaacagcgagcactcctcagccgacaacactaaccgaggaaagaaagcggcaaaggtggtggtgaacaagaggagggaagtgaaggaatttgtgttggtcggaggaggtggtgacgtgaaggaggcagaagtggccgccggaacggtaacacttccggaaggagcagcaggggtgggaagagtggacgacccgaggcgggaaaacagcaaccgaatggttgccgcctgtgttgcgaccccctccgtcactgttaccgccaccgccgccacttatttcaatcacaatcagacggggtttgccggcactctcggaggtggtggtggttccaaaaaagggatggaggcgaacagtaacccatccaaagcctcgaaaggagtgaccatgaccaccgcagaggtggaccagctcaggcaacagctgcaatcggtggttgaaaatggagatctcactgcttcgaatgtgtgtgttgaacagttggaaagtgcggtgttaagcaaggatacactcgaggcaactcgtatcggccgttttgtgaacgacgtgcggaagcagactgcccagcaatggcccgacttctccaaacgttgtcgtgcgctgataaagcaatggcagaaggtggcagagtacaggcccagctcctcctgcgaaggctcttccaatggcggcactcctcagcttgtctcgccggctttgaagcgcgggctgacaccacgggcgggggccgtgacgacgcccggcaaacgcacaacaccacatcaaccgcaaca

SEQ ID NO: 50500 - DNA, 643 bp, Heterodera glycines
aaactccttaaaagaaaagcagcagaagaattaccaaacggaagagcagagaaatgccgtcccaaggagaactcaaagaaatcttcaacctttacgatgaggaattggagggcaaaatcgacgccacgcaaattggcgacgtggcacgcgcgtgtgggctgaagccgaccaatgcgatggtttggaaagcggcgggcgaagaatacaaacgcaagggcgagaagaaattggcattcgaagaatggctgcccatcttcgaacagttgcagaaggagaaggaagtgggcacttacgccgacttcgtcgagggtctgaaagtgttcgacaaagacgagagtggcaaaatcatggcagccgagctcaggcacgtgctgctggcgctgggcgaacggctgagcgcggaggaagcggacgaacttttgctgggcgcccaggacggcgagggaatgatcaattacgaccagttcatcaaaaaggtgttggccgggccctaccccgaggattgaaagacgcaacgcaaattagacaaaacacaaaatgagagatgggaaaagtccacccgaatgacgaaagagatgatacaactgttttctcgccccatttccaaattggcaattgctccaataaaaggcgttcaattttc

SEQ ID NO: 50501 - DNA, 645 bp, Heterodera glycines
atgtcgggcggttgtcctcttgcgggcggtgctagcgttaatgggtgtcctatgtcgaatggcggcgaccaaattgacccatcgaatgccatgccaccaccaaatcagaagccagcccctgatcagcccttcgttctttcaacaaaccgtcaaaagtcaaccattccaaaagcgaaagtgatggtcgatggccaattggaaacttgggaatatccttcggctcagatgttttggaatgcaatgcttaagaaggggtggcgttggcgcgacgatcagttggaccagcgcgacatggacaacatcatcagaatacacaatgctaacaacgaattggcttggcaagaagtgcttaaatgggaacactccttgcatcctgagtgcgatatgccgaagctgaaaagctttcatggagacgcaaaaaatttgtcgcctcgagcgcgcttccgttcatggcttggttatcaattgccgttcgacagacacaattggctggtcgaccgatgcggacgcgaagttccttatatcatcgattattacgacgtcggacatgtgaaccccgaaacgaaattgtttgcccatttggacggtcgaccggcaattcgcgatgccagcacaatgtgggaccgaatggttgtgggatattgg

SEQ ID NO: 50502 - DNA, 487 bp, Heterodera glycines
ataagaacaaaaaatccattgactgacgattaaatgttctcaacagatgcgcaagatatactcggtggtggtggtagtggatcccaattggccaagaaaagtgggttaccaacgatgaagttgaccaatttggacaaaaagaaaaaaatcacaacaaatggacagccaaaacggcctgtcggaatgcatcgggaactgtacaatctcttcgttcaccagggcaaggacaataacaaagaaaagatcgaatcgttgatgccaacacagacaaagaagggattttctctcgcaaaagcgcagctgggtaaacgtcctgtcagaaaatggctttggtgtccatttgagaatgaggcgagaaaggatggacttgcgcttaagcattgggaacgtgaggacaaacattcaacgccctactcctttgtgcagttcaataagcaacttgatgtgccttcttttacggatgaggaatatgaagaacatttggtgg

SEQ ID NO: 50503 - DNA, 681 bp, Heterodera glycines
aatgggtcagaaattagctgttagtcttgacgattattttcatcctgagacggcacctcgaattgacagaccaccgacgtttgatcctttgtatggttttccaaagggtcgcaagccaagagaaatgcaggcttcgtgggaagaattgttcgttttttttacataaacaactgactaaatggctctacacaagtttacgcaaactggtgatggtaattggttggacgcaaaaactgcactagagcccactaaactataaaataaatttatattctttagggagaaaatgaaaatgccgattagtgagcgagattattgtgcccataaaatggttgctttgcgcaaatgcgtttgggatagggcgccatttgcctcgcattattgccatggacgtcgacacgatttgggactgtgtctttatgatgatcatttgatgcgtatgaaagaatttgagcgggagaaaaggctccttatgagaaaggcaagaaaggaaagggcaaaggctgcttaagaaactaatgttgatttgctagacaattgtatctttgtggcctctgattaggaatatttccatgtttatgtgtaaaatcattgcttaattgaaactttggctcgctcatgaacttgggaattaaatccaattagttttttaatgattcaatgatttttaatttctttgag

SEQ ID NO: 50504 - DNA, 594 bp, Heterodera glycines
gtcgacgacagcacacacagccgaaaagcgcttcttctcatcgccttcgccttcaaaacttagaagcaccaatcccaaccagaaaaaatgtgcgacgaagaagttgctgctctcgtggtggacaatgggtccggaatgtgcaaggccggtttcgcgggcgatgacgcgccccgcgcggtgtttccgtccattgtgggccgcccccgtcatcagggcgtcatggtcggcatgggacagaaggactcgtacgtgggagacgaggcgcagtccaagcgtggtattctgacgctgaagtacccgattgagcacggcatcgtcaccaactgggacgacatggagaagatctggcaccacaccttctacaacgagctgcgtgtcgcccccgaggagcacccggtgctgctcacagaggccccgctgaacccgaaggccaacagagaaaagatggcccaaatcatgtgcgagacgttcaacacgccgggcatgtacgtgggcatccagggcctgctgtccctgtaaccctcccggcgcaaccacagtctcatgatggactaccgcgatgccgccgcccccccgcggccgtttacgaagggg

SEQ ID NO: 50505 - DNA, 623 bp, Heterodera glycines
caacgaagttgttgcctggcctttttcttcgctcttctgcattttgtgcaccaattgcttgcagtcggatggcaaagtcggacgtgccggcgctgagcacgacgaatcagccctacccgtacaaggaacagactccgaagggtattttcgagaagatgggcttgcagaaaacgccggacggcacttcaatcggcgaattcgcagttatgcgtatggacgacatgatgaacttgatcgggcgtggctctctttggccattgaccttcggtttggcgtgctgtgctgttgaaatgatgcatttcgccgctcctcgttatgacatgatgcggtttggcgttgtttttcgtgcaactcctcgtcagtgcgacttgatcatcgtctctggcacagtcacaaacaaaatggcaccggcactgagacggatctacgaccaaatgccgcatccaaaatgggtgatcagcatgggctcgtgtgccaacggtggcggttattaccattattcctattcggtgttgcgcggctgtgaccgggtcatccctgtcgacatatatgtgcaaggttgtcctccgtctgccgaggcgttgctctacggcgtgcttcagttgcagaagaaaattaagcgg

SEQ ID NO: 50506 - DNA, 1070 bp, Heterodera glycines
atggcccacctcatccaggacggttttgtcgtcaatgacgcaacatggaaactaggcattttcatcaccgatatgaacatatcgcgagagttattcgttcgcggtgacatgaccatcggtagtctgatgatgcagttggtggggcaaattggcgagactcaggactggagtgaccattacatgtggtggcctgaccgccgtaagtggctgaaacacacgcgaagcacgttggaccaaattggaatcactgcagcgacttacttggaatttacaccgatgcataagcatgccaaggtccaactccccgatttgcagattatcgatgcccgactcgatttttccgtgcccattttgaaggtcacccaaaaaatctgccaagaacttgccatccgtcacccggaagaactgtcgctgaagcgtgatattccgccagatattttgcgaaaaggcgcatctgtcgaatcggaggctcagattcagccatacatgaagccgggcgaggagtccattggacccggcactctccgaacggccaaacccatccgcgcttcaactgtcaacctcactagcgggcgaggctcacctgcactttcgcaggcatctgcaatgggccccggtcacttgtttaacgcttctgaaattggcacactgccgaagatgggaacgattccgcgcggaatgagccccgggtcagccgcatatcgcgaagtgcttggacgaacaccggagcccggttactctgaaggaggcggtctcgaatgtgaccagttcgacgaaaatttgataaactcaccgaaaataactccgggtcgtgaaacattcagaccccaaaattatttggagaaagccgcgttgaaccggggatggttggactcatcgaggtcgctgatggaacaaggcatttgcgaaggcgatgttgtgcttcttcgttttaaattcatgcagtttttcgacatgaatccattaagaaagtgctgcagatgcaagcaggaagggcagcggcagcgcaaaacggtgcacaaaacaagaagaaatcgcaaccggtgcagctgcccacggatttcaattcg

SEQ ID NO: 50507 - DNA, 664 bp, Heterodera glycines
agcgtgagatcgtccgtgacatcaaggagaagttgtgctacgtggcactcgacttcgagcaggaaatggccactgccgcctcctcctcctcgctggagaagagctacgaactgcccgacggccaagtgatcaccgtcggcaacgagcgcttccgttgcccagaggcgctgttccagccgtccttcatcggcatggagtcggccggcatccacgagtccacctacaactcgatcatgaagtgcgacatcgacatccgtaaggacctgtacgccaacaatgtgctgtccggcggcaccaccatgtacccgggcattgctgaccgcatgcagaaggagatgaccgcgctggccccgtccaccatgaagatcaaaatcatcgctcccccggagcgcaagtactccgtctggatcggcggctccatcctcgcctccctgtccaccttccaacagatgtggatcagcaagcaggagtacgacgagtcgggcccgtccattgtccaccgcaagtgcttctgagcagcagctgcacgaccgcacggaggaggaggagaagaccaacgaagccgggacactcgccatccgccgacccattcgccaccccccaccaccatctgttttttgctgaaaattatgcaaaaatatttttgaataaaatctatgaacaa

SEQ ID NO: 50508 - DNA, 653 bp, Heterodera glycines
gtttgaggtaaaatttgtgcgtaaacacagagccaacaacatgggatctcgcagtgtcgctggtggtgttggtgcttcgattatgaacaaacaagccagcaaatacaacgagagtgagggtgagctgttgctcaactggatcaagcaggtcaccggtgccacaatgacggtgaacggaacgcgcgaaaacttccaagcacaactgaaggacggcacattgttatgcaaggtggcactgaagctggaaccaaactcgatcaaaggggtgacggacaaggccagctccacgttccagcagatgagcaacttggagctgtttatcgaattctgtcgcaagcagggagtcatcacgcatgagttgttccgcgccgtggacctggtcgaggcgcgggacctctactcggtgtgcatgacgctcaactcgttgggccgaattatgcaaaagaagggcaaatcccacccgaagcacgtgtcggcatccgaaattgtgaacatcccctccacggatgcgcttcgtctttgatcagtgatcaaacattgaaaatggggtgggtatgcggcaccaaatttttgcagtgatcggagttattggctcataaagatgtgtgttccgtttattggcagttctgtgaataaatttggcactttgaaaa

SEQ ID NO: 50509 - DNA, 420 bp, Heterodera glycines
gttcaatattcctatcatttcctcggatcgtttgccaaaactgcgcaatgttctcgccggtgtcttctccattcaaaacacttacaaatataacgacaattatccgttggacggtgaaggaaatacaaaaggcttttgctttttggagtaccaaacaaaggaggcggccaacgcagttttggccatttgcgatggacatcgccttgacaaaaaccacacattttcagcgtatccattcaccgctattcgaagcatgaaggagccggaaaaggactggaagaaaccggagagacaaccttatgtcgatttgggtgacccatggtcttggctgcaaaaccccaagtgtttggatcagttcggtctcctctatgaatcgggccagggtggcactctccgtttggatgtgttttggaacgtcag

SEQ ID NO: 50510 - DNA, 550 bp, Heterodera glycines
tggagctccccgcggtggcggccgctctcgaactagtggatcccccgggctgcaggaactcggcacgaggctaatattcaattttttgaattaacataattcttttggaatggctcctgcaccagaaaaggaaaaaactgaagataagaaactgaaagacgggcaaaaaccaaatgtgaccacggatcacgcacactgtttgagcaatgtccaaccaaatcttcccgtcaataaagtggtggtgcatccgctcgttctgcttagtgtggtcgaccacttcaaccgcgtgaacaaaacgcacaaagtcaatcgagtggtcggtgttttgcttggttgtatgaagcacgacaaaacccttgacatcgcaaattgttttgctgtgccttatgacgaggactccgagaattcgaacattttctttcttgatgctgattttctggaggacatgtttgggatgttttacaaagtcgcggcacgtgaaagaattgtcggatggtatcactctgggccgcgtctttgcaagaatgacattctgatcaacgaagtcatc

SEQ ID NO: 50511 - DNA, 609 bp, Heterodera glycines
ggcaacagcacatcatttagctaaaactcatcaacacacagaacacctgcaagaaatggtcatcaaatccaattcggtcatttcacgttcgcattctgatcattttcaagaagcttctggttcattgtcagcaacttccggttccgaagatgcaattaagcactggggttggtggaggcattttgtcgcaggtgccactgctggttgtgtcagccgatcagtgacggcaccgctcgaccggctaaaagttttccttcaggttaacgccaaccataagactccacacactttgccatccgcagtcgattatttgtatcgcgaaggtgggtttctgtctttctggagaggcaatggcatcaacattctgaaaatagcacaggaatctgctatcaagtttatgttttatgaacaggtgagctcttcaatatttgttctttaatttttggatttagaaaagcaagagttccaaaaattaacggggcatcgcgatctcgacatttttgagcggttcatggcaggggcttctgctggtgttatcgcccaaacggccatttacccgttagaagtgctgaagacgagattggctcttcgaagaacaggcgaactcaa

SEQ ID NO: 50512 - DNA, 509 bp, Heterodera glycines
ctattgctttctttcaatcaaatctctcaacaatgtctgaacaatccggggaaacctttgcgtttcaagcggagattgcgcagttgatgtccctgatcatcaacaccttctactcgaacaaggaaatcttcctccgtgagctgatctccaactcctctgacgctcttgacaagatccgttaccaggcgctgaccgacccgtctcagatggagagtgggaaagagctcttcatcaaaatcgtgcctaacaaagccgataagacattgaccatcatcgacactggcattggcatgaccaaagctgacctcgtcaacaaccttggcaccattgccaaatccgggacaaaagcgttcatggaggctcttcaggctggtgcagatatttcgatgattggccagttcggtgttggattttattcgggtttccttgggggcgagcgtggtcgcgtcacgtcgaagcggcatgacgagcgattgtgggcgtgggaggagatcagcgtgggggggccg

SEQ ID NO: 50513 - DNA, 487 bp, Heterodera glycines
gaataaccatcatccaactgtaaatggaaatggctttggcttgaccaatgggacacatttcgctgatgaattttctgagtccattaaagacgttggtattattggcatcgaactttactttccaaaatcctacgtgaaccaagaagaccttgaaaaatttgacaatgttacatcaaataaatacgtgctgggacttggccaacaagaaatgtgcttttgccatgataatgaagatgtttgttcactttcgctgactgttgcagctgcactgatggacaattacaaagtcaatccaaaggacattggctttctcgcggttggtaccgaaacttggttcgacaaaacaaaaggggaaagccgtggttatggaattgtttgccgattccggcaactggacttggaaggcccccgacgaaaaaaccccgggttcggggggacccaagcgttggttattgccccccaatgggtgggacccgaattacccaac

SEQ ID NO: 50514 - DNA, 1225 bp, Heterodera glycines
ccaagtttgaggtttattatttataaatttataaaatgcaaaatcaacagaatatggacaattcagcaaggtcaattttcgttggcaatatttcttacgatgtgagcgaagacgaattgcggaagcttctctcagcatgtggtcaaattgttagctttcgccttgtccatgaccgcgagacggggcgccccaaagggtttggtttttgtgaatttgccgatgtgcctcaagcggaggcagcaattctttatttcaatgggttcgagtttcggggacgtccacttcgtgtcgactcggctacgggcaatgatcggagtgctgatgagatgcaacacttccaaatgactttgactcgtccgcaaaatcccaccgacgaattgagtccttatgggcccgaattggagccgggaaaagcaccggaagtaattgcccgcacagtcgcgtcaatgcctcccgaaaaaatgttcgaattgatgcgatccatgaaggaaacggtgaacaacaatccgcaaatggcgcgccaacttttgatggaaaatccgcagctgtcgtatgcattgctgcaggctcaagttgtgatgcgagtggtggacccgaagattgcctaccaaatgcttcatcgtgaacatgctcagccgcttgtaccgccgacttccatccccactcatatccctcaacaatttgctggcaaaccccctcaattgcctccccaattcaacatacctccgccctccgtcccctctcatcagtttcaaatgcaacctcctccattggtgccaggccaatttcaccacggatttccatccatgggcatggctccgccttcgctactgcaacagcagcagcaacagacgccttttacacaacaaaagccgacacccatcgctcctttggcagtgcctccggcagcgaccgctccgcaacagcagcaggctgttagtccgcctccgcttagccaacaagcacagcaaagtaacagcgacaatttggacgaggagcagcaggcgcaaatgcttatccgcgtgctgcaactcaccgatgagcaaattcgtatgttaccaccaactgagaagtgcggatgcaaatgcgtgaccatatcaaatcgcactgacagaggtcgaaaagccaactgatctcttctttctccatcaacctatttttatataatgtttgatttttttgttgttgaaaatcaagatttaatgaaaaaatttttactaggaaa

SEQ ID NO: 50515 - DNA, 538 bp, Heterodera glycines
gagccatggatggatggattaacaacttcaccagcagatgaacgcgttggaattcaaaaaatgaatcactctgttatttcctcgtgtttcacaataaattctgtgtgtgtctacgcttttttctactgttttttcaactattttggttttggagtgtaccgatacatacgaatcaatttttgtacattttttaatatttttttttgcaaattttaatcgctgtttattgactcttttttttggctaatttactggcaaatcaacaaaaaattaggcaatcgaccgctaccatgacgacgacagaaacgccgacggcaccgcgcttggaccacaccacgggctggacctgtttggcgtgcaaattggtgttctccagcgggcaattgcagcgggaccattaccgcagtgaatggcacctgtacaacatgaagcggcaggtgggccaatttttggattggtgatccacccaatactgattgagagcgtgcaaaaaattgcccggtactttcaaaatcccggtaatccttcagaattggtg

SEQ ID NO: 50516 - DNA, 667 bp, Heterodera glycines
tttcatttcatttcgtattcattaattagccgataaaaatgtgcgacgaagaagttgctgctctcgtggtggacaatgggtccggaatgtgcaaggccggtttcgcgggcgatgacgcgccccgcgcggtgtttccgtccattgtgggccgcccccgtcatcagggcgtcatggtcggcatgggacagaaggactcgtacgtgggagacgaggcgcagctccaagcgtggtattctgacgctgaagtacccgattgagcacggcatcgtcaccaactgggacgacatggagaagatctggcaccacaccttctacaacgagctgcgtgtcgcccccgaggagcacccggtgctgctcacagaggccccgctgaacccgaaggccaacagagaaaagatgacccaaatcatgttcgagacgttcaacacgccgggccatgtacgtggccatccaggccgtgctgtccctgtacgcctccggccgtaccaccggtctcgtgttggactccggcgatggtgtcacccacaccgtgcccatctacgagggttacgccctgccccacaccatcctccgttttggacttggtgcggcgtgacctcgctgactaccggatgtaaaatcttattgagggcggggttcctccttcgagacaaccgccgaagcagaa

SEQ ID NO: 50517 - DNA, 257 bp, Heterodera glycines
tggtgtttattccaatggttatgatggttccttaaattcttgccaccgttttcccctttttcacacagtgatcatagccaatcactttacgagaaaagatccgaatcaatccgattccctgactgacgaggacattaagccatccccgaattggcaaaacttccgcaatagctccacaatttttttgcggggcccgcccacatttttgggcccggccaaatggaaacaggcaattgtttttttttttttcggcgggg

SEQ ID NO: 50518 - DNA, 1124 bp, Heterodera glycines
ggaaggcgaccgccgcccgatcggtttcgactggtctatctgatcgtgcttctccatggaatgggcatgttgctgccgtggaacactttcattacgatcgcaggggattattatttgcaattcaaattcgctaatgtgagcaatgaagacaattacaaagtgtacttcttcaattatctgacggtttgtgcccaaattcccaatttgctgctaacttttctgaatttatttggcgtcataagaggcggcttttaccgtcgcatttacttcactttggccgtcatttttggcatatgtctcgtcacaattgcgatgggactttcggctttttcctcttcacaatgctttccgttgtgcttctgaatagcgccagtggtgtttatcaaaacagtatttggggattgttcgctgattttcccggggaattcgccggtgccattattattggcaacaatttgtgcgggattctgatggcagtgctagacatcctcatcattgtgttggtcggtgccaatgccgcactcgccgccacagtttacttcggtctcgctctgtttaccgtcgtcctttgcattttttctttccattttcttcaaaaattgaatttctacaattactatgtccaaaaagcggcgaaagcgcgcgcgaacaatggaacgaatattctgcacgaggaggaaacgggcgaagcgaaggccaatataaaagtgacgcatccgccgctaaaaacatacatcgcaattttctctgaggtccgtcgccagttgctcgatgtttggcttgtcttttttgtcactttggctctgtttccgaccgttttgttgaaagtgtctttaattagtccgttcaacgaccagaaaacttccgaatcgctctacaagcagctgacagttttcctcaatttcaatgtttgggccgctgtcggctgttggctgtccggcttttccccgaggccttcccccgattatttgtccctgccgatttgcctccgtctgctctttcttccgttgttttgggtttgcgattaccaatatgaccatttgactccgcgtcgcttcgtgttcatccacaacccatgggtgttcactgttctgatcactcttatggcactcagtcacggctat

SEQ ID NO: 50519 - DNA, 223 bp, Heterodera glycines
ccaatccctaacaaaaaaaagatattcaccgcgtcacggatgacattctccaagaacaccttcagcactgagcgagtctcctcgtagatcaggccggaaatgcgcttgacgcccccacgacgagccaaacggcggatggccggcttggtgatgccctggatgttgtcacggagcacctgagaaaatgtggagaccaattagaccttgaaaacacgctttaaac

SEQ ID NO: 50520 - DNA, 666 bp, Heterodera glycines
ccttatcctcgaaaattcctttctggactaaactctgccccttctccaaacaacagccggaacagcagcagtcttcccccgtcgcagaagacacaattccgccccagcaacaaaaagaaggtgccgcaatgtctgccgaaggaaacgacgcaccgccagccgcagagcaaccgccaccagccgaagcagcaccagctgaagcggtccctgtccaggaggcggcggcaccgccagtagaagcggcggccgaaactgcaccagcggaagcagcgcaaccggtagaggaggcggcaccgcctgctgaggcgcccgttgaagcggcaccagcggaagcagcgccaccgatagaggaggcggcaccgcctgctgaggcgcccgttgaagcggcaccagcggaagcagcgccaccgatagaggaggcggcaccgcctgctgaggcgcccgttgaaccggcaccaccagtggaagagccaaaggcagcagagcctgaggcacccgtttcggaagctgttccagcggcagaagcgccagtggaagaagctgttgctgcccccattgaagtcgcgcccgcagaggcagagcccgtctctgccccgccagctgaagcagtaccagccgaagaagcgccggctgctgaggtcgcccagctgagtttggaggaacaag

SEQ ID NO: 50521 - DNA, 714 bp, Heterodera glycines
taatttctttggcattcggacaaaagcgaacagatctccgcctagccccaactgatcatgaccgaacgaccttgtcgttgaaaatgcagcgcgacaaattgcgccaagcgtatcaacggtacgagcgcaacatcgccaaggacgcggagagagcgcgggcactgctcagagacggacgcaaagaccgagcattgttactgttgaaaaggaagcgcttccaggagacgatgatcaatcggatcggtttttttttggagcaggtggagcggacgatcaccgacatggaaatggcacagatcaacagggaagtgttcgacaaccttcggcttggcaccgaggcattgaaggcactgaacgagacaatttctttggacgaagttgaacgtttaatggaggagagcaaagaggcgcaagagtttcaggaggaattgtccaccatgttgggccaacaaatgtcggaggaggacaacgacatggtggaggaagagttcgagcgaatgctctccgaacaaatgccggcagtgccaacagagcaaccgacggacacaaaagagggacggaaaacagcggacgaagagaggacaaaggaggagaaggagccaaaacgacggagggagggggtggcgcaggaggcgacctaaaggcgtcggcacttcaaattggtgccatcgacgggtcggacaaatgccaaagacagtggccatcggctgcttt

SEQ ID NO: 50522 - DNA, 542 bp, Heterodera glycines
gctccccgcggtggcggccgctttcgaactagtggatcccccgggctgcatgtactcggcacgaggtggcgcaagagccgcccttacaaattgtgattcccagattggatgatgataaaccgttggtgcgtcgaccgacgcctcaggcacaaccggcggctccagcggtgccggctgaactgcgcgtgtccaatcgggaggaggacgcgcagaacatcgaaccgtcaatgagtggcaaacaaatagtcgggttgatcattccaccgcccgacattcgaacaattgtggacaaaacggcgcttttcgtggctcgcaacggattggaatttgagatgaaaatcaaagagcgcgaggcttccaacatgcgtttcaactttctcaaccctaccgacccatattttgcctactatcgcaacaaggtcaatgaatttgagacgggcgttgcatcggcggacactcagtccaaagtgaagttgccggaggctgtccgtgagcatgtgcagcgggccgaatttattccgcggctgccgcccaaaccgttc

SEQ ID NO: 50523 - DNA, 478 bp, Heterodera glycines
cagatcatggcgcaagagccgcccttgcaaattgtgattcccagattggatgatgataaaccgttggtgcgtcgaccgacgcctcaggcacaaccggcggctccagcggtgccggctgaactacgcgtgtccaatcgggaggaggacgcgcagaacatcgaaccgtcaatgagtggcaaacaaatagtcgggttgatcattccaccgcccgatattcgaacaattgtggacaaaacggcgctttttgtggctcgcaacggattggaatttgagatgaaaatcaaagagcgcgaggcttccaacatgcgtttcaactttctcaaccctaccgacccatactttgcctactatcgcaacaaggtcaatgaatttgagacgggcgttgcttcggcggacactcagtccaaagtgaagttgccggaggctgtccgtgagcatgtgcagcgggccgaatttattccgcggctgccgcccaaac

SEQ ID NO: 50524 - DNA, 816 bp, Heterodera glycines
cctctactctgtttgctgctgatcgtccgcttttcctccccttcagcttaaacactcaaacccctctcccccccccccccgcctccattctccgctgactgatctgtccgcccccgcacttcttttgcccgtttcttccgccgttacacactcatctcacatagtcccacaaaacatttcaccaacaaaagcagcagaagaattaccaaacggaagagcagagaaatgccgtcccaaggagaactcaaagaaatcttcaacctttacgatgaggaattggagggcaaaatcgacgccacgcaaattggcgacgtggcacgcgcgtgtgggctgaagccgaccaatgcgatggtttggaaagcggcgggcgaagaatacaaacgcaagggcgagaagaaattggcattcgaagaatggctgcccatcttcgaacagttgcagaaggagaaggaagtgggcacttacgccgacttcgtcgagggtctgaaagtgttcgacaaagacgagagtggcaaaatcatggcagccgagctcaggcacgtgctgctggcgctgggcgaacggctgagcgcggaggaagcggacgaacttttgctgggcgcccaggacggcgagggaatgatcaattacgaccgtaagcgattattaatgaaattaaccgtgtcgagagtcccgacaaatgaccgttcccccttggtatttcagagttcatcaaaaaggtgttggccgggccctaccccgaggattgaaagacgcaacgcaaattagacaaaacacaaaatgagagatgggaaaagtccacccgaatgacgaaag

SEQ ID NO: 50525 - DNA, 966 bp, Heterodera glycines
ctccattgaagctcgccgttggcttaatgcgactgtggttggttcttaaaacttaccaacaagtctaccatagtaatgcattaagtgttctttggttgaatttgatgacggaaataacccaaaatccaacaccatagtgccgttgatcgatggtggaacagagggattcaaaggaaattcacgtgtgattattcctttcatgacgccgtgtattcagtgcacgatagatctttacactccccaggtcaactttccgttgtgtacaattgctcacacacctcggcttcctgagcattgtgtggaatatgtaaaagttgtgctttgggaaaaggagaagccttttgggcaaggtgaaaatggtaaataactccatcaccattttccatttccatagacgttaaattggatgctgatgaccctgctcatgtcgaatgggctttccgtgctgctcaacaacgcgcgaatgagtatgaaataaaggatgtcgatttgcgactcacccaaggcgtgctcaaacgtataatcccggcagtggcttcaaccaatgccatcatagcgggaagctgtgctcttgaggcattgaaactggcatcaaagtatctgtttcaacgttgttgcattggaacgtgatcccgaatgtttggtctgcggtcagaaatctgtccaaatgtattccgtgcgcgaggactgtacactctcaggctttttagatgacttgaaagacaaataccaacttcagaatccttccattcgagcgggtagcactttcctgtatgaaatcaacactcttatgccagaaatggagacagcaagtcggaagaatttgtgtaagacgctcaaggaacttcatgtcaccgaggatagcgaactgcttgtagcggatgaagcattaacgagatctattgtttttcggatcaaatattccaaataaattttattcgaatgtccgataaatatctctgaagg

SEQ ID NO: 50526 - DNA, 365 bp, Heterodera glycines
  unsure (1)..(365): unsure at all n locations
acagcacacacagccgaaaagcgcttcttctcatcgccttcgccttcaaaacttanaagcaccaatcccaaccagaaaaaatgtgcgacnaanaagttgctgctctcgtggtggacaatgggtccggaatgtgcaaggccggtttcncgggcgatgacgccccccccgcggtgtttccttcattgtgggccccccccctcttcaagccttcatgctcgcatggaaacaaaggactctatttggtaaccagggccaatcaaccgggttttcctacccttaattccccttttaacccggtttcccccccctgggacacattggaaaaaatttggccaccctcttttaaaaaaattttttttcccccc

SEQ ID NO: 50527 - DNA, 670 bp, Heterodera glycines
ctcaaacaaaaatattcacaaatgacatcttcggacgaagaatttaaaaaagaatgcacttttgcctcacttccgcgcactgtgcgtggaatgcctttggttgtttcgtcgaattcggatggaaccaaattcctttactgcaatggaaatagcgtgttcatcagagacgaggaaaatattgccgattgtgatgtgtatacggagcacgcgactttgacaaccgtggcaaaatattccccctctgagttttacattgccagtggagaccaatcgggcaaaatccgtttttgggacaccacacaatcaacgcatattctgaagtcggagttcgctcttctttcgggcgcaattcgcgacatttcgtggtctgaggacagcaaaagagtcgcaatagtcggcgaaggccatgaaaggtttggccatgtcttcctctttgacacgggtacgagcaacggcaatttgtcgggacaaagtcggccgatgaatagcattgattttcgtccgacacggccttatcgtttggtcagtggttcggaggataacactgtcgccattttcgaaggccctcctttcaaattcaaatcgatttttcatgaacattcgcgttttgtccaatcagtgcgttacaacaaagacgggtccctttttgcggcaggcggaatggatggga

SEQ ID NO: 50528 - DNA, 624 bp, Heterodera glycines
atagctcatctcactgatattttggttttctctctctatctcaaccaacaacaacaacaactcaatgtctgacaatcgtggtgcctccgttgcttcgaccggtacgaccaacagtcaggagtctcaagtggcgtctccagtgaaagccggaaaagctactacgaagacgacggctagcggaaagggcggcaaagcgaaggcggacggaaaagtgaaggcgggcggaaaaggggcgaagaaggcgggcggaaagggtggtatttgtgaagattgctgcgagcggaacgtacagcacgcgctctgctcgtgctggcgttgcatttcccgtcggacgtatccatcgtttgctgcgccacggtcgccatgctcagcgcattggggccggagcgcctgtctatatggcatcgggtgttggaatacctggcggccgaaatgctcgagctgaccggcaacgcggcgacggagaacaaaaagttgcgaatcaacccgcgccatttgcaattggctgtgcgcaacgacgaggagttgaacaagcttctctcggaggtcaccatttctcgtggcggtgtgttgcccaacattcacacggaacttttgtccaagatgcaacagaacaagcagcag

SEQ ID NO: 50529 - DNA, 808 bp, Heterodera glycines
gtttgagtgatagtatccttattttataaactcaaatttgctgaagtatcatgggagttccagcctttttccgttggctttcacgaaagtatgtgtcgatcattgttgacgcggtggaacagcgcagaagagaaattgacggagtaaaaatcccaatagatgcaactcaaccaaatgagaattaccaagagtttgacaatctttacttggacatgaacggcattatccatccgtgcacacatccggaagaccgacccgcaccgaagaccgaggaagaaatgttcattttgatcttcgagtatattgaccgcctcttttccatcgttcggccaagaaaacttctctacatggcagttgatggggtcgcccccagagcaaagatgaaccaacagcgaagtcgtcgatttcgagcagcacaagaagcggcggagaagcgcgagctcatcgaaaatgtgcgtaagcggttggagtcggaaggaattccgttgccgccaccgcgaaaggaagaggaacactttgactccaattgcataacacccggcacgccgtttatggcccgtctttctgttgcccttcgctattacgtgcacaaacggatcacctacgacccggcatggcaaaagatccaggttattctttccgatgcgaatgtgccgggtgagggcgaacataaaatcatggactacgtccgacgtcagcgcgcttcgccggcgcatgacccgaacaccgttcactgtctttgtggcgccgatgccgaccttatcatgcttggattggccacccacgagtccaatttcaacataattcg

SEQ ID NO: 50530 - DNA, 281 bp, Heterodera glycines
agaaactcagctgttgcaccagccattcatgctcaatcctgaacagactgtcaacgaatatttggaagaacatggggcaaatattgcggatttcttgcgcattgagatgggccaagaacacaccaagacaaatgacctcgtcacacggtcgaaaggatttagttttctcggctattaaattacgccaattccctggcaatctcgttaatgagcacacgtcggcgttccccagttagaatcactcaagaaatggcgtaattttaatcaagaaaagacagtat

SEQ ID NO: 50531 - DNA, 786 bp, Heterodera glycines
tttggcctccgacgaaacggcctatctgattgcggacacctattaccgaacacacaaatatttgtccgccctctccctgtccattccctgtgtcagttacaaatggatccaacagtgtgtggccgagaaacaattgaccgaccatcggccctttttgttgccagctggcgagtcttcattggataccaagcaacaattcgaatggagaccactaaagggcgtgctgatgaagggaaagcgtgtgctgatttggtcgagctccgccgagacggaccctggcattgtcagttttgccgaaatttggacaccgatcctgcaaaatttgggcgcaacattagtcggcattggtcctggtgaaccatttgcctccaaatcgagcgctaaccttgaggaaaagatggaattctgttccaaaattgagcctcccgttgatgtgctgctggcggagactggactgccaggccgaggtggccaagctggtcgaggaacggggcggtttggccgtgtccagcgaatgggtcattcaggccatcgtcactggttcgctgcccgacctgggcgagcccggaggcgagaagttccgctacgattttgtttagtgttggctgaatgaacatccacagttttggtggtgaatgacggcggcaatggactttgactctacttgaacacacctaacaatatcataaaccattcgcttttttggaactacacccggaaacttttctctttttgttgcagaattatctgccctatttaattattattttattgtcccactgacat

SEQ ID NO: 50532 - DNA, 575 bp, Heterodera glycines
ttggcgcgcgaccgaaagtatcgcattccggtggcgcttaagattctcttcaaatctcagctggtcaaagggaatgtggagcaccaattggtccgtgagatagaaattcatgcccacctcagacacccgaacattttgcggatgttcaactattttcacgacgataagaaagtgtacctcatattggagtacgctcttcatggcgaattgttcaaagttttgcaaaaaagtcgtcggttctctgagtcaacttctgcccagtacatctttcaagtgtccgatgcgctcaattattgtcactcaaaaaaggtcatccatcgtgacatcaaacccgagaatattttgctttgtgccgatggtaaaattcggattgccgactttggttgggctgtccacgccaaaaataggcgtcagacaatgtgcggcacacttgattacttgccacctgaaatggtcttgaaacgacaacacgatgaaaaggtttgacgtccttttcggcagtgacggtcccagaatttagggaatattcctttttggatggactctgaaatttgtttcatttaatttgaattttt

SEQ ID NO: 50533 - DNA, 570 bp, Heterodera glycines
ctccgtgacgaattcggcacgagggtccaattaagatagaaatggcaacgcggaagttgagttttcctgagaaaattgccaatattcttggagttatttatcgctatcatgaaccgcgacttccacgttacaaagacattctgaagaaagtgtgtgtccgagaattggctcctccaactccaaaggattggcctcagatcaaagcggattatgccaaattggacacagtgatgagaacgcaggcctacagacagtttaagttgaaggaatttctcgtttattcggctgttttcgtggaagtgctctgttggtttttcgtcggagagatcattggacggggcagtctcaccggatacatcgtccgcagttctttcgttgacccgaaggccgcaaagaaaatggcgcactttaaatgggacgatcatcatgaactcaaagtggagaacgacgaagagcaaagcgggcactgatcggcgttcgatagatgatgcatatttctgtattgtaatgcttaggaactcgactcgaaagaaaattgttaattagacaataaaaacgatgctttcaaaa

SEQ ID NO: 50534 - DNA, 855 bp, Heterodera glycines
aaagctggagctccccgcggtggcggccgctctacaactagtggatcccccgggctgcaggtatccggcacgaggtacgtggagaccgccgatcggttggtggaaattgcgcggaacgaattgccaaatgcgaggttacccgccttccaagtggcacaagcggtcgatgtgctcacgttgggctcctacccgcggctgccacaaaatatcaaagaccgttttattccgccacttccgttgggtgcggccgaacggcgcctgacattgcgccaactgaataagttgattgaattccatttggcacaacaagcggcgcaactgtctccacgaattcgacacattactgtacaaaacggaatggcatgtctggtggtccccggagaatttgaaatggagctgactcggctgggcgatgagccgaccacccggtggacccttctgaacatccgaattctcgtggaaagtgccgaagtcggagagggacagcaaatggtccatccgctgcaaatcaatttcctccatcaaatggtgcaggaaaaactcgacacagcaaacgaacccattatggcggcttacattgttttgcattggttctgtcgctctctccatttggacattcttttttgtcaggctctccaaattgcgaaaataaaccgaagcggcaaagggagtgagggctcctcgcagcaatacatccgagtggacgagtacaatgagaaggagtgccgtttggcgatcagttattggctgaggagagagggcggcaccattcacggaaggctgtcgtctcattaccgaatgctcatttttggagacaaaaacaattcccatgtcggactgaaaattcgtcaccat

SEQ ID NO: 50535 - DNA, 530 bp, Heterodera glycines
aatgcgttgatttatttgggacgaaggatctgtaccaaattttgaaattggacaggagcaaaagcaacttgagcagtgcacaaatcaaaaaggcctattatcgccagtcaattctgtggcatcccgacagatttgcatcggcacagcatgacgaaacgacgcgcgagttggccaagcagaaattccaagtgatcggcagagcatatgcaattttgggggatagtgagaagcgcaaagcgtacgacgaaacgggttcgctcgacgatgagaacgaattttacgaaggcaaagattggtcggccgtgtggcgaggcgttttcaaaaaagtcactccggaagagatcgaagcgtacctggccaaattcagaggtccgtatggaaagaacaatagttcaaggatgaaaatgtataaatgaaactaccgcttctcgttaattggattgatttagagaaattagttttaaggattgtttaagcaattggtattatatggttcatatgggtttgtattaaattgaacttgtacaaaa

SEQ ID NO: 50536 - DNA, 660 bp, Heterodera glycines
gtgaaaacggcgtttgcggatgtggcggggtgtgaagaggcgaaaatcgaaatcatggaatttgtcaactttctgaagaaccccgcacaatacaaagcactgggcgcaaaaattcccaagggtgctcttctgactggccctccgggcactggtaaaactcttctcgccaaagcaactgctggcgaagcaaatgtgccatttatcactgtgtccggttccgagtttttggagatgttcgtcggtgttgggcctagccgagttcgggacatgtttgaaatggcgcggaaaaaggcaccatgcattctgttcattgacgaaattgacgctgttggacggaaacggggcggaaagggcgccatgggaggccactccgagcaggagaacacactgaatcaattgctggtcgaaatggacgggttttcaactgatgaatcgaacgttgtggtcatcgctgccacaaaccgcgtggacattctcgaccccgcgttgatgcgtccgggccgatttgatcgacaaatattcatccccgttcccgacatcaaaggccgtgcttccatcttccgcgttcatttgacaccaatcaaaacaaccttggacaaaatcgagctttcccgcaaacttgctgcgcacacgcccggattttccggcgcagacattgcc

SEQ ID NO: 50537 - DNA, 621 bp, Heterodera glycines
cttaaaaaacaagacagcccgcgaccaatttccgaatcacaatttcattgtttatgctggacatgtcattccccgaaacgatgtctctgtttttcgcgatgaccctgcgtgaagtgatctctattcatgtgggacaagcgggcgtgcaaattggaaatgcttgttgggaattgtactgcttggaacatggcattcagcccgatggaaaaatgccatccgaccaaaacaaccaagacgattcgttcatcaccttcttctcggaaacaggcaatgggcgtcatgttccgcgtgcggtcatggtcgacttggagccaacagtgatcgacgagatccgcactgggacttacaagcatctcttccaccctgaacagctcatcactggaaaagaagacgcggccaacaactacgctagaggacattacacagtcggcaaagaaatcatcgaccccgtcttggatcggattcgtcgcatcgcggataactgcaccggacttcaaggctttctcatcttccattcgttcggtggtggcactggctctgggttcacatcgctgcttatggaacgtctctctgttgactatgggaagaagtctaagctcgagttctccatctaccctgctc

SEQ ID NO: 50538 - DNA, 500 bp, Heterodera glycines
acgagggatcagttcaatgttagcctctgtgatcaacgaccgcttcaaccggcacagccaatacgcccctttcttttctttggaattttaccctccgctgaaagaacaccccaaaaatttggcggacttcttcgaaatgttggatcatctgaagcaggcgcagcctctgtttgtggacatcacttggtcaagacgaaatgacccgggaaatttggccaaattgaattcttcgtcggccattgccattgccaccgcggccattttcggcaaagaacgcacaatgctgcatatctgctgcaatgatcacacgaggactgagtcgattagtcatgtgaagcaaacattgagccatggcattgcgaatattatggcactgaggggggacgacatgccaacggagcaaacgcttctcaccaaaaacacaaaacacttcgccatcgatttggtcaaatggactcgagaattggaagagaccgacggatattttggcaatgatcggc

SEQ ID NO: 50539 - DNA, 861 bp, Heterodera glycines
caacggttcgccgccgtcggatgagtccgtcgtttattcatcctcaattgcttttcaaccgccgatgcaatggcaccaccgccggcaacagtcgacgaatacaccctgtcgcagtcacgctttccttccgttgcttcactggcgccgcccaccgttttgatgatgtccaccgctggtcaaacgcccgtccaccgcaggcgacactgtagcgccggctcaaacaatgcgcagcccaacaacagtcacgaagcaatctccagaatggacgtgttaagtgagcggatccgtgacttccattacaacgaggaccaaacgcacgcacagctcaatcgaaaattgcaattacgcgaccaactttattacgcaatttcaccgattttcccaatgtgcggactttacattgtcggctcgtcactgaacggattcgggacgaagcggtcggacttggacctttgtctgatgataaccaatcgcgatattgaccaacgcactgatgcggttgttgtcctgtcgtcggtgatgcggacattggagagcaatcaaattgtggccgagcagaatctgatcctggccaaagtgccgattctacgcatcaaatttatcggcactttccacgacataacggttgacctgaacgtcaacaactcggtggccattcggaacacgcatttgatgtgttactacagctcttttgactggcgtgtccggccgttggtgatggtggttaaagagtgggcaaagcgtcacggcatcaacgactcggcctgctcctccttcacatcgtactcgctggtgctgatggtcatccactatttgcagtgcggtgcacagccaccgcgtacgtgcggatgtgcgcacgct

SEQ ID NO: 50540 - DNA, 841 bp, Heterodera glycines
ccaagctttagagagtaaaccaaacatggaaaatccgagtgattttaccctaggaggtgcattgcccacatcaagcacagacgattatttgaagctaaaacgtttggagaataaactagcaaacttggacgttatggaggagtatctgaagatggacatgcgaaatttggagaaggaattggtgcacgcacaggaagaagtgaagcgcattcaatccgttccgctaatcatcggccaattcctcgaagccgtcgattacgaccacgccatcgttggttccactactggctcgaattactacgtgcgtgtgctgtccattttggaccgtgaactgctgaaggccggctgcagcgtgtccttgcacaagtacagcaacgcgctggtcgacgtccttccgcccgagtccgactcgtccattcaaatgctgcgagcggacgaaaagccggacgttgtctactcagacatcggcgggctcgacacgcagaagcaggaagtgcgcgaggcggtggaattgccattgaccaatggcgagctttacgagcagatcggcattgaaccgccccggggagtgcttctctatgggccgcccgggttgtgggaaaacgatgttggcgaaggcagtcgcaaagcacacaaaggcatcattcatccgagtggtgggcagcgaattcgtgcagaaatatcttggcgaagggcctcgaatggttcgcgacgtgtttcggctagcaaaggagaacagtccatgtatcattttcatcgacgaaattgacgccattgcgacgaaacgatttgacgcgcaaacgggcgcggaccgggaagtccagcgcattttgttggagtt

SEQ ID NO: 50541 - DNA, 475 bp, Heterodera glycines
aagaaatgaactatgataatggaattagcgatgatgatgatttggaaatggatgaaaatggaagcgatggcgtagaaattgtggattttgttgaagagccgcacaaggaagacaattccgccgcaaaaattgctgcgcattcgaaagatgtgttttgccttgccctttccccggatggccattggctcgcttcggggtcggaggatgaaactgcagccgtatgggacttgcggcacggaatgacttctcccctcctccaccgcacaatttcttcccattccgactctgtccatttgttggcatggaacgtttccgcaaatattctcgccagtgcggacatggccggtcgcataatttgcacaaaagtgacgggcgatgaagccacacaaacggcgtcacttacaatcgacgattgcttcgtcgaaccttcacggagagacgacgacaacggggaggacgaggaaggccaaggctc

SEQ ID NO: 50542 - DNA, 1475 bp, Heterodera glycines
attacgctgaacaaccctttttaatcgaaagctttgacttgacatgactgatgcgaaaactgaccaaaaagataatgtgaagagtgaagttggagatgtgcccaatggcgggacgtcattcactgcacagcttagcgacgatttcactatccaatcgaatacgaatgaggtggtcgattcattcgacaacatgcaactcaaggacacattgctgcgtggcatttactcattcggttttgagaaaccatccgcaattcaacaacgtgcaattgttccatgttgttcagggcgtgatgtgatcgcgcaagcccaatctggaaccggaaaaacggcaactttctctatttccgttcttcaacgtgtcgatgagaatgcaccggatgttcaggcacttgtgatggcaccaactcgagagttggcccaacagattcttcttgttatgcgtgcacttggcgagtatatgggggtcaagtttcacacttgcatcggcgggacgagtgtgcgcgacgaccagcgcaaattggaggggagcgttcaagtgatcgttggaacaccgggacgagtcaatgacatgatcctgcgcggagcactcaagactgacaaaataaaaatgtttgtgcttgacgaggctgatgaaatgttgtctcgcgggttcaaagaccaaatttatgaagtttttaaaagcttgccgaacgatgtccaggttgttttgttgtccgcaacgatgcctaatgaagtgctcgacgtgaccaagaagttcatgcgcaaccccatccaaattctgattaagaaggaggaattgacgctcgaaggcattcgtcaattctacattttcgtcgacaaagaggaatggaagttcgagaccctttgcgacctctacgacaccgtaaacatcactcaggcggttattttcgctaacacgcgaagaaaagttgaggatttggcgcgaaatatgacgcagaagaaattcactgtgtctctcattcacggcgaaatggagcagcaggaccgcgacgtgattatgcgcgagttccgttccggctcttcccgcgtcctcatcaccaccgacctgctcgcccgtggcatcgatgttcagcaggtgtcagtcgtgataaactacgatttgccgggcaaccgtgagaattacatccatcgaatcggtcggtccggacgattcggtcgtaagggagtggccatcaactttgtgacgaaacaggaccagcaaatgttgaaggaaatcgagacatattattccacccaaatcgaagaaatgcctgccaacatcggggacatgatttgagcgttgacagggcaggatcgataaatgggaaagtgatttgggagttattatgtttggattaccacccacccgccctttcaaatcattcggtattaccattattatgttggtcccctttcggctcctggttataaatcgattgttgttttggagggatatgaataatatttggtat

SEQ ID NO: 50543 - DNA, 865 bp, Heterodera glycines
ggacggggaccacgttgtgttcaccgactttgagcacgccgaactgaacgaacttccaccagtgccagtcactttgaagggaagtgagtgccaccactgaacatttgttggttcatctacagtcctcccatttttaggcaaagtcttcaacattggaaatgctctcgcggccttttctggcgcagttcaaggccccgtttcgcgtggacgtgttcagcaagtcaaagtgcccaagaaaatgtccttctattcattgtctctcgcactcgccgagcccgactttatgatttgggactttgccaagttcgacgaacctgcgcaacttcacgccctttggcaggctttgtacagttttgaggagatggttcgtcatcttgcgactttccatttgtttgggttttcctttcagaaaaactacagccctttgccccgttccgatgccgacgcaaaattgttaaaggaaatgctgccaaaagatgcgcccgaaatgccggactcactgctcttaaacttctcttaccaggtcccttttgtgccattttcaacttcgaattcctcccccgtcttaaggcgtgcggaaatctccaacccatcgcttcgctcatcggcggtttggtggcccaagaggcgatgaaggcagtgacgcaccacacgactcccctcaagcagtttctgtacaccgattctcttgaggcgttgccgggcgcagattcgacctttgacgccgccaagttggagaagaacgattgtgcaccggtgagtttttggacggacaactaattgctgttggagtattcaaaaactgtccatttgcagcgcaacaatcgctacgatggacaggcggccgttttcgggtgggcctttc

SEQ ID NO: 50544 - DNA, 481 bp, Heterodera glycines
cgcgagtttatgtcggcagttaaaggacgacgtgagcaggacagaaaggaatgggcagcctattggaatattcgatggaaggaggtggagaattcattcgtcggcaaatactcttattacacaaaccgttttttggattggccggtcacttggttccgtgagaacattgtggagcggctgcacgacaagcacaagatgccgtattaccatcgcaaaatcagcagagtgcccgaaatcgacgaatgcggcgtcaacgaccgaatttgtctcttcgaagctgaagaacaattccgactggacaaattggtggaccattacattcgcgatattttgtaccaacgcttcactcagtgcgttcgcgccgaagggtacgaccatttgtacaaatgcgcaaagcacgttgacgactacgaaaatgccgagttgaacttctttatcaagtatggcgaattgggcagtgagcagactgtggtggcgtgtt

SEQ ID NO: 50545 - DNA, 500 bp, Heterodera glycines
ccaggttgtctgtatggtcgatccatgtgaggacaaaagttggattcggcttcgttcaaagcctggccaatcagttcaggtcactcgcactttctccgtcttttttctctttattctcactcctcttctctctttctctctctctctaactcccctttctccttgtctaatgatatgtccttgccgtcgctttgtaagaccgattctgtccacgcttttgatcagcttcggcccggaagcgacaacccagaaacactgtcggaggcggtcaaagtgttaaaaggggaatatttggtgaaagcaatcgaagagcacaaaatggaccaagcgatcattttctgtcgaaccaaattggactgtgacaacatggagaagtttttggcgccacgcgggtacaaatgcgtttgtttgcacggcgaccgaagcgcggacgaacggacgcggaatttgctttcgattaaggaaaagatagtgcgctttctcatctgcacggacgtggc

SEQ ID NO: 50546 - DNA, 422 bp, Heterodera glycines
tcttcggatgacttatgcggaggcaattgaatggcttctaaccaatgaagtgatgaacgaagaggggaaacccttccaattcggcgaggatatttccgaaggccctgagcgatttatgaccgacacaattggacaaccaattcttctcaatcgctttccgcatggaattaaggctttttatatgtcacgttgtgcagatcaaccggaattgaccgaatctgtggatttgctaatgccgggcgttggctagatagtcggaggatcgatgaggatttggaaggaggacgaactgcttggggccttccaaaaagccgacatcgatcccaagccatactactggtacgtggaccagcggaaatacggaggttgcccccacggaggttttggacttggtctggagcggttcgtatgctggttggcca

SEQ ID NO: 50547 - DNA, 479 bp, Heterodera glycines
ggagaattcactgctttggacaagaaagtgataaacgccttattcttgacttggatgaccaacaagcggggccttcggagcaaaaagtcggcaggagagggcctggacggaagtcagcgaatccgacattggacaatcttctgggccatgcaaacttagaacatgcccgtgggcggacaaaggaggccatgacttttcttttcgaagtagtcaagctggccccttaccatgtgcagacatacaaagaactttcggatttgtactcggaattgggccaaaaagagaagagctttgaattcaaaatgttggctgctcttttaaactctaagacaacagccgaagaatgggatgaaatagccgggactgctaagtcgtttaaccggttggaattggctgtcgcatgtttggccaaagcgattcgatgtgaccccgagaattggctttactacgaaaaacgcatccaaattcttgatgcatcc

SEQ ID NO: 50548 - DNA, 434 bp, Heterodera glycines
tgagcgcggcgtggccaaccgatggcgctcactgttcatcatcatcggggacaaggccaaggatcaggcggtcactttgcatcacattttggccaaggccaccaccggggggcgtccgtcggtgttatggtgctacaagaaggagacggagttcagctcgcacagaaagaaacgcatcaaagagttgaagaagcgcaaagagtcgggcctgttccagtcaaaggaggacaacctgttcgagcagttcatcctgtccactcaaattagctactgttactatgccgactcgcatcgcattctgggcaacacctttggcatggctgtgctgcaagactttgaggcacttacgcccaaccttttggcccgaactgtcgaaacggtggagggcggtggcctcgtcgtgctgctcatccaatcggtcacctcactgaaac

SEQ ID NO: 50549 - DNA, 420 bp, Heterodera glycines
gtttgctgccgccacttgaaaatttggcgaacattgaggagactgtcgtgcgtgacaaagcggtggaatcgttgcaaaaaatagcagaaaaacacagtgcagctcaactcgaggaatatttcattccgatggttctgcgattgtcagctggtgattggtttacttcgcgcacctccgcttgcggattgttcagcgtggcatacgctcgtgccaatcctgctcaaaaaactgaattacgtgccgcattccggtgcctctgtcgcgacgatacaccgatggttcgccgtgctgccgcatccaaattgggcgactttgccaaagtgcaggaggaggactatttgaaaaatgaaatcacccaaatgtttgaggacttggccaaggacgaacaagactctgttcgactgctttcagttgaggctg

SEQ ID NO: 50550 - DNA, 706 bp, Heterodera glycines
gtccgaaagtgtggtcattatcagcgaacgcaaagtggaaattgtgttgaagcaagtggccaaaattgggtggacaaacttctaaaggaacaaacgacgggattggcacaatcttcggactgtgagcagcagcaaaagcaaccgcagcagaaaatagacgatgagaaacaacaagaactactcatgtggaacggactgaacgaacctagcgaacgcttcacaacagaaaaagcgatgattccgctcaatttgcaaattgcagagtctgctctgaaggtcctccaaacaaaaacgcccgggggagaaattgagcaaagtgcgacggcgggagctcactgtacaaacaatacgtgcaaaaaagtgttcaccggtcccgagagcgatgccgaagagtgcgttttccacccgggcaatgccgtttttcacgaaggactcaaatactggtcgtgttgtgggcgcaaaaccaccgattttaccacatttttggaccaattgggttgcactcggggcaaacactgctggaaaaagaaagaaattgtcacaaatgcgcgcgaggattggtttcaacgaggtggccaagtgcacatcacaatttactgcaagggagcacttccgagcgaaacatccgccaaatcggacggtctgacattggaagtgaccatcaacgggtccaccaaacggtacgaactgttcggggaaattgcgc

SEQ ID NO: 50551 - DNA, 624 bp, Heterodera glycines
gtcaattttgacatgagttcagaatcggacgaacagagtgccgatgttaacggactctgttcgcaatcgcttcgatcagatgaaaaagtgtgtcccgacccggacacaattaaaatgtttattggccaaattccgaaggcgtgggacgagttacaactgaaggaatactttgaggagttcggtccgatttatcagctgagtgtgctgcgggacaaagagacggcctccagccgtggctgttgcttcgtcacttattatcaccggaaggatgcgatcagtgcccaaaatgagcttcacaatgtgcgcactttccccggactcagtcacccgattcaaatgaaaccggcggatgtcgaaaacaaaaacgagcgcaaacttttcattggaatgcttcccaagtcaatggacgaagagagcgtccgggcgctgttcaaagagtttgggcaggtggaggactgcagcattctgcgagaggacggcaaaagcaaaggctgtgcttttttgactttggtttctcgttcctgtgcccaacaagcgattcgaaaaatgcaccattcgcagattttcgagggctgttccaaaccgttggtcgtcaaattccccgattcctgtcgagaaaaaacg

SEQ ID NO: 50552 - DNA, 590 bp, Heterodera glycines
ttccttgttaacaaagcaatggcacacatccagtttggaccgcaacaacccgaggtggaggaggacctggtcaactgggacgaggtgccagatgatgagttggaggagactgcgttcgaacgttttgaggggctcaaggaaatgtttccgacaccggtgcgctctgtgttgtccaccactgtgcaattgacatgggtggtagcgcagaattcgttctcttttgcacgcagtgctgcttgggtgttgtcgaccagcgcgctgctcatggtgatgccgtacattgtggacaaggagttgcaagatgtggagaaggcacagttgaaacaacagcaacagttgctgctcggtggacggcccagctgaaatgattgattttgatcaaattggtcgatcagagagcgcaattttcttgatcagcactgattgatttcgatcactttttgttgcttttttccattttttgattgtttcgtttgttgtgttcacaacaattagagcgcctttgccccgtttaccctcaaatcgtcgccattatccgccgtttttctttgtttgaccaatttcttcaagctattgatacataaaatttt

SEQ ID NO: 50553 - DNA, 464 bp, Heterodera glycines
caaaaataggcgtcagacaatgtgcggcacacttgattacttgccacctgaaatggtcttgaaacgacaacacgatgaataggtcgattattggtcagtgggcgttttatgctacgaatttttggtgggaaggccgccattcgaaactaaaactcaggaggagacgtacacacgcattatgaaggtgcaatactcattcccgagctttatgagtccggacgcgcgagatttaatttcgaagttgctggtcaaagagccgtcccgccgcttgagtttcgagcacgtgctgaaacaccattggatcatcgcccattgcaataagaacaacgacgccgactcgtccaccgcgtccagcgaatgttggtgattggagaagcgaacaaatgggggacagcactcactgcctttgattttatttccttatttctatccgatctcttttgtgaataaatggctgtaagcaa

SEQ ID NO: 50554 - DNA, 592 bp, Heterodera glycines
tcaaacagcacagacgcgaatcgcaattgtaaacccggacagatgcaagccgaaaaattgtgggcagccgtgcaaaaagaattgtcccgtcgtccgcactggcaaacaatgcattgtggttgagccaacatcgaaaattgctgaaatttccgagatattgtgcatcggatgcggcatttgtgttaagaaatgcccttacggggccatccaaatcatcaatttgcccagcaatttggagcgcgagaccacccaccggtacagtgccaattcattcaaattgcaccgcctgcccacgccgcggctcggctcggtgctcggcctggtgggcaccaacggaattggcaaatcgaccgcgctcaacattttgtccaaccgactgaagccgaacttgggcagcttcaagagtccgcccgattggccctcaattttgcaatattttcgcggctctgagctccaaaattacttcaccaaactgctggagaacaaattcaaggcgatcacgaagccgcaatacgtcgaccaaatcccgaaattcctcgaaaaacaaccgctgaaaaaggttggcgaattgttggagaaacgggcgcagaaa

SEQ ID NO: 50555 - DNA, 635 bp, Heterodera glycines
cgcaggaccaaggcagagatgatgtcgatgtgcgtgtgattgtccatcagtctcatgccggagcaattattggcaagcagggcagcaaaatcaaggagcttcgtgaactgatgcaagcacatatcaaagttttccaagaatgcgcaccccaatccacggatcgcgttgttctcataaccactcaacaatccaaaatgccggatgcaattaagcacctgatggagtttatgcgcgaggtgccaattaaagggccaaccaaaccatacgatccgagtagccacgaccctcgcattgtgcagtgttatgggggcttcagcggaccaatgccaccacctccaatgggtggtccaccgatgggaatgcatggaggcggaggaggttatgcaggttttggaccacgtggcggaccgcctatgcctggtggaatgggaatgcccggtggttttatgcaagaacaagtgaccacgactcaagtgaccattcccaacgagttgggcggcaccatcatcggcaaaggcggagatcgcattaatcggtagtcacccaaaataaattcaaattttgttattatgctgacacagaattcgggcggaatcgggtgctcgtattgagatcggaaatgcttatgggaacga

SEQ ID NO: 50556 - DNA, 646 bp, Heterodera glycines
ccaagcgcacaacgacaatgaacacggcgacaaattgggagtcccctccccgcagcgtctcttctctcccaacacttcgttccacacggaactgcccgcggacggccccggcggcactcagtccaacgcggcgagtgaagcaggcggtgtcgctgccagtgaccaaaaccagcgacactttcacatgcgcatcaaaaaacgcattttccgcggagaattgatgagccgagaagttcgcgccagtggggtgctcgccattggcaaactgtgccttttggacgaacagttggccaagaagtgcatccccgtgtttgtgcgacaattgcgagaaaacccggaccattttgtgcgcaacaatatcgtcgttgtcatctgcgacctttgtattcgttacacttccgaagtcgaccggtacagcaccattctcgcctcgtgcctttgggacagttccattctcatacgccgccaaacgttgctgctgctcaccaatctgatcaaagaacagtacctcaaatgggaagggacggtcatttaccgttttgtgaccactcttttggacccggagcagtgcattgaagaatatgccaatttttgtttgacggacattttgttgccccaatttcgtgagcggatgttcttccatcac

SEQ ID NO: 50557 - DNA, 1081 bp, Heterodera glycines
atctttccagggagagtgccatttgctgccatcacaagtcgctccccaaacttcgtccctccgcctcacttattccgctttccatggcgtcggctccaaattcgtccgccgaatgttcgctgagtttggctttccctcggagaacatttcgtacgttaaggaacaagacaagcccgaccccgactttggcactgttccattccccaaccccgaggaagggcaccgggtcctcaaactgtgcattgagactgcaaatgccaatgactcgactttgctcctcgtcaatgacccggacgccgaccgactccaattggcggagaaagaggcaaacggagagtggcgcgtgttcagcggaaatgagatgggcattctgctgacgtggtgggcgtggaccaattggcgtgccgccaacccaacggcggactcttcgcgggtgttcgtcctccattcggccgtctcttcccaaatggtcgccacaatggccaaaaaggagggcttcaaagcggcgcattcgttgacgggcttcaaatacataggcaatttggcacacaaattgcggtcggaaggcaacaccgttattgccgcctgggaggagtccattgggtttactcccggcacaacgctggacaaagacggcgtttcttccgccgcggtctttgctgaaatggccaattggctgcgcacccaaaagggcgtttcgctgcgtgaacagctcttccgcctcttctccatctacggctttcacctccaacgcaattcgtattggggggtcaaatcgacggaagtgacgaagaaattatttgcggaccttcgctccgattatcccgaaacgattgggcagaatttcgatgtgaaatttgtgcgcgacttgacgacaggttatgacaacgctcaaccggatgacagggccattctgccgctgagcacctcctccgaaatggtgacgttcactttggtcgacggaagtgcggtgacactgcgggcgagcggaacggagccgaaagtgaaatattacatcgaactgcgcaccgaaccgggcaaagaagaaaaggatctgagttcggtgcttgagcagctcgac

SEQ ID NO: 50558 - DNA, 805 bp, Heterodera glycines
acggactttgcagaagagcacacagattttgtacacgccggacattggaaccattctgctgctgttggacgtgaagccgggcgcacggatttgtgagaccggcacaggcagcggttctttgtctcacgccattgccaccgcagtggcaccggacggccatttgtattcatttgacatcgatgagaaacgtgccaaaactgttcataatgatctcaaactccacggtttgtcccaaaatgccactgtgctttgccgtgacgtgtcccagcatggctttgccgcaaccgattgtgcggagaaagagtggcgttgtgacggcgttttcctggacttgcccgccccgtggttggccattggccatgcccacaaagtgttgcttcaaaacgggcccgagcgccgtccgtctcggctggtcagcttttcgccatgcattgagcaggtgcagcgggtgtgtgccgagttggagcagcacggctttgtggacattgagacggttgaggtggtgccacgaaaactgaaggtggtcgacttgccctgcgaaagtttgtccgaatacgcagccaaaggagcgaacgcacagacattcttccagaaagaatctcagcacaacaacactgattgtgaacagcaacggcagaagggacgccggggtgccaagcgcaaggcggacaatgcgggggaaaagaccaaaatggaggaggacgcggacacatgccaaaatggactgaacggaaaagtcgctgctgccagtattgcgcaggaaagcgatggtcctcagaccgagactgatgccatgccattccct

SEQ ID NO: 50559 - DNA, 569 bp, Heterodera glycines
ccaagtttgagttgttgaatgcaataatcctaaaatgttccgcaaccaatacgatagcgacgttactgtgttcagcccgcagggccgtcttcaccaaattgattatgcagtcgaagcgatgagacagggcagtgcagcagtagcaattcgtagcaaagattatgctgttgtggtcgcacttatgcgtgcacaaaacgagctttcttcatatcagcagaaagttttcaaattggacgatcatctcggcttgtctatgtctgggcttatttcagatggacgcattttggcacgctttatgcaaagtgaatgcgccgagtttcgctggaactatcataatccaatttcggttgaactgctcaaccgtaaattaggcttgaaacttcagtccaatacccaatattacggacgccgcccatttggtgtgggactgctcatcattggatatgatgacaaagggcctcacgttgtgaaagccgaaccctcgggggacgtgtccgaaatgtttgctgcttcgattggcgctcggtcacaaagtgcgcgaacttatctcgaaaagaacctaccagaat

SEQ ID NO: 50560 - DNA, 613 bp, Heterodera glycines
tgtgcacgaattgcactcgcgaattcccaaatattccgaattcggtgagcgtctccaaatgatcgttagttccgcaacacttcacaacatggtagtacaacggctggcgactcaggatatgtacttcccccaatggattgatctgaaagggcaggattcggatacggaaactgtacaccaggttgtctgtatggtcgatccatgtgaggacaaaagttggattcggcttcgttcaaagactggccaatcagttcataccgattctgtccacgcacgtgatcagcttcagaccggaagcgacaacccagaaacactgtcggaggcggtcaaagtgttaaaaggggaatatttggtgaaagcaatcgaagagcacaaaatggaccaagcgatcgttttctgtcgaaccaaattggactgtgacaacatggagaagtttttggcgccacgcgggtacaaatgcgtttgtttgcacggcgaccgaagcgcggacgaacggacgcggaatttgctttcgtttaaagagaacatagtgcgctttctcatctgcacggacgtggcggcacgaagactcgacatcctaggcgtgccctatgtggacaatgtgacattgcct

SEQ ID NO: 50561 - DNA, 578 bp, Heterodera glycines
ctacaactagtggatcccccgggctgcattatctcagacgaggggtctccgcctcgttggacaagccgatgttgttgaagcgcaaggaggccaagacgtacggtaaaaagcagttgatcgaaggccgtttcgaggcgggccaaagcgcactgatcatcgaggacgtggtcacctccggtgccagcgtgttggagacggtggccgccctccgtgcggttgggctgcgctgtgtgcacgtcttttgcgtgttggaccgccagcagggcggtgagcagcgactgggccgggaggcggacattgttttacggagtttgctttccatgggttcgctgttggactttttggagcagtgcgggaccattgacgcgggcaaaaagacgcaaattgttcaccaacttcaaaacccgatctttgacgacagcgccacgcatttgcaggagcaaaaaacggagaaaaatgaagcagaatgcgtgccattggtggtgtcctcctccgtcgtgccgacgacgacatccgtcggttgggcccaacaatttgcggacggcacactgaaccggcggttggcacaaattatggtg

SEQ ID NO: 50562 - DNA, 458 bp, Heterodera glycines
ttgagatgttttttggcgaagagattactaaaattccgcgggaagtcggcaaagaggacgtgtgtaaagcaatttctcatcaaattgaggccattgacatagatcagtgcaatttgaatatgtatttgaagcctgacacgggagtgatttcacttgaccaattccaagcgatgggttccaaaagattgacaatgctaaggaaactcgaaatgcttaaagaaaaatttggaaatgccaattcgcaggatgagtacaaaaaggcatttcgagaggacatcggtgctctgatgccattggtaaccaatttatgcgtaaatgccggactcaatgaagcaagaagagaggaccgcatttcgcattttatacttcgtcttgctttttgccatattccagaacaatccgattggtttgttcggttggaaaccgaactttttcgcatgcgctttcaaaacgagacg

SEQ ID NO: 50563 - DNA, 876 bp, Heterodera glycines
tatcccttcaattctcatatttttcattgtctacagtctgatcttccgcgtcttcgtcgaaactttacaccgatggaaattcagcgtgatagccatttacgaagtatgaaagagcttctcagcacgatggacccgcaagtcgaccccaattcacacattgaattcaagcagaagacacacattctttgtgcccgctttttgggtggtgcttggaagaccgtctcattggaggacatgaagattcacagaattaaaggcggaatgagcaacatgcttttcttttgccgtctgactgaaaatcacccaccactaaaaggggagccggacaaagtccttctgcgcgtgtattttaacccagaaacggaaagtcatttggtggcagagtctgttattttcacccttctctctgaacgacacctggggccgaaactctatggaatattcagcgggggccgtcttgaagaatacattccgtcacggccacttacttgccatgaaattgcattgcccaccatggccaacaaaatagccaagaggttggctcgagtccatcaacttgaagtgccaatttggaaagaaccggaatatatttgtgacgcgcttgaaaggtggcttattcaattgaaacaaatgcccagtggttctcgtgatttcgatttgccggctgaaagtcacgaatgggctcctccgagcataaattgcgaagatttacagaaagaaattgagcacctgaggagattgattgtaaagagtcggagtctggttactttctgtcataatgatcttcaagaagggaacattctcttgcccaaagcacattctggcaatatccgaatcggctccgaatcggacgaaattttatctggcattgacggg

SEQ ID NO: 50564 - DNA, 490 bp, Heterodera glycines
gttcatactcgcacaaacagcgagatggagaacgctcatacgaaaagtgaagacgaattgtttcggtttttcggcacagggccagacggactgacagaggaacaagcagacgaattgcgggataaatatggctataatgaaatgcccgcggaggaggggaaaaagctgtgggaattgattctcgagcagttcgatgatctccttgtaaaaattttactcctagccgcaataatttcttttgtccttgccttgtttgaggagcacgatgaccagacgagtgcagtcactgcgtttgtggaaccttttgttattctcctaattctcattgcgaatgccacggtcggagtttggcaggagagaaatgcggaaagtgcaattgaagcgctgaaggaatacgaaccggaaatggcaaaagtcatccgagcgggcaaacacggcattcagatgatccgtgcaaaggaactcgtcccgggcgatctcgtcgaagttt

SEQ ID NO: 50565 - DNA, 742 bp, Heterodera glycines
gccatatatctttagacttttttcagataatcagttttgcgatctcaataaaacttttctttatttgtcaacttcaattgagagaaaagacaaaagcaattggattccgattaccaaggacagtgaagctgaccaacacgtcggtgtcattcaaaattttgggcacagctttgtcaaaaccttaaaggtgtcaatttcaggtgttgagtcttatgattccggcatttactatgcgtttagggcatatatgatgaatgaattgggattttcagaagatgtcaaaaagggtctctgtgaagcgtcctgctattatgtcgacgatgtcgaccaggatgattatacaaacagtggctttaaaaacagagcgtcacgttttgctgatggtgcaaaatgtgaaacaatggtgaaacttaattttgatctcgcccgtcagcccaattttttgcttaataactctgacgtgatttttagcatacaccgtaacaccgatgtttttctaattatggcaccgccatatgtttccggaaatgcagtcatagtgaacccgcacacatatcgtattaacatacacgatattagaatttatgtaaaaacagtagatgttacccagtcattaaataacataataagcaatcagctacaaaccaccccggccaaatatcctatgagaaaaattgagatcaggagtcttttcatcccgcgtggcacttctgatctttcacacaatgtttttacaagcatt

SEQ ID NO: 50566 - DNA, 617 bp, Heterodera glycines
gagcatttaattttaagccttcaagccgaataaaatcttttttcttcgatggatcaacaggagaaaagttccggatggtttgcaaatgttgaaatgggtccaccggatgtgattttgggcgtaactgaagcatttaaacgcgatgacaacccgaaaaaggttaaccttggagtaggcgcatacagagatgaccagggaatgccttttgttctgccgagcgtaaaacaagccgaaaaagaattactcgaagcaaacctcgacaaagaatatgctggcattgccggtttgccggacttcaccgccaaggccattgaattggcgctcggaagagattctgaagttttgaaagcgaaacgaaacgcgacggttcagtcggtgtccggcacgggagcattgagaacgggcgccgaatttctctccaaatggtttccgcacaacaaagttgtttatcagccgacgcccacttggggcaaccatgtgcccgtgttcaaggttgctggctttgaaatccaaaagtaccgctattacgacccgaagacttgtggctttgatgagaatggctgcttggaagacattctgaacatcccggcgaagtccgtcattttgttccacgcgtg

SEQ ID NO: 50567 - DNA, 516 bp, Heterodera glycines
attaagtttttaaagcttatattaatagcaatgactgaaggaggtgaagaagtgaatccaaaggcctaccctttggcggatattcaactttctcagaagttgcttgatcttgttcagcaggcaacgaactatcatcaattgaaaaagggtgctaatgaggcaaccaaaacactgaaccgaggcattgctgaggtgatcattttggcagctgatgcagaaccattggaaatcattttgcatttgccattgttgtgcgaagacaaaaacgtcccatatgtattcgtgaagagcaaggctgcacttgggcgtgcatgcggtgtgactcggccggtgatcgcaacttcgatcattcaaaatgaaggatctcagttgaagtctcagattcagaagattaaagaagatgtggaaaagttacttatttgattaaaaatttgcaagcttatcactgttttgttattccatcttgttttgttgtttcatgatttgttcgacgacaattaaaatgactctgaaaaa

SEQ ID NO: 50568 - DNA, 634 bp, Heterodera glycines
attttgcagaactgtggaccgaattcgtttccaaaatgctattctttcaaaacggtccggtcgagcagtgtccgcaccaacagcagcagaatgccgcgccgctgtcccaccgccccacggcattttccctccccgcaacttcgcctttctcaacaatttcatcggtgggctcactgccgtcggagccaacaacgcccacagaaagaatgagcacaggaaatgtgatgatgatgatgagcccgaaaagaatggacaaaggaaacggaggagagaaaggacaaagacagaaagccccgggcaaagagcggccaaaggacggcaaagagcgcgtgcacaagtgcgaccagtgccaaaaggcgttccgcttcaagtccaacctgttcgagcacaaatcgctgcatttgggcagcagcagtcggaaccctttcgtgtgccctttctgctccaaaacgtgccgtctgaagggcaatctgaagaagcatttgcaagtgcacgtcaccagcgcggaggacttggaatgcttgtggaaacgctctttctcacgcagttccggtcgtccgagtaaaaatgcaccgcccgctccgttgccaaagcccggcgacgacctcggcatggtgccggtgctcgtctctca

SEQ ID NO: 50569 - DNA, 1053 bp, Heterodera glycines
tcaaatggcatctgatcaacttctttcatcccgagatagatttttctcattcagagttttagattcataaataatatatttgtcctggtccatccacaaaaaaataaccacaacatgaggctaaatcttaacatttgggtacactgataattttattgatgaattaatttccatctatttttcatgtcgattaaggcatattttggttaatgtacctatttatgtcgaacctctactgactccccattttcgcgcatctccaaaaataaaatttgaaaaatacgcctccaaaagacgacagatgactgtgacatcgacaaaaaacaattcttttccgagctcatttaaagacattactctacacgacgtatgggccagcaatttggaggccgaatttgccaaactgcgcgacctcatcgacgactatccattcgtggccatggacaccgaataccccggcgtcatcgctacgccggtgggccagttccgcagcaaggaggatttcaattatcaacaactcaggctcaatgtggactgcttgaagctcatccaggtcggcttcactctgatgaatgagaagggtcagctgccgcccgcccgtgacattttccaattcaatttgcacttcgatccgagcaccgattcgttcgcgcacaattcgctggaactgctcaaaacggcgggctttgacttcaacaaacaccagaacggagggcatcaaattggaggactttgggtgagctgctgaccacttccgggctggtggctgatcggcgcatcacctgactgacctttcacagctgtttcgactacggccacctcatcagggccattatgctggtcaaactgcccgaggacgaccaagacttcttccgctaccatcgcaaattgatcccgaaccgtttccacttcgagattctgttgcgactgaccgggtcgcgcgacaccatgctcaatggccgacttcaggagctggccgaccaactgcacgtcccgcgcattgccacatgccaccaagtcggctcggactcgttgctcactgcgatgactttc

SEQ ID NO: 50570 - DNA, 615 bp, Heterodera glycines
ctaaattctgtttaatgtgtcaatgagcaacaacgacatcatttttcgaaatgaggaaggcgttaattatttggcaccatggacatattcctgtctcatcaaaacttcgatagatcggttgaaaactgctttatctgagaatcgtgaagccatacatgctttaaatcatttacaagaagtctttcgtcaaattgaccgtgcttctccctcctttctttatgatttctcaaaacttttgctgatcgattcgggcgttgcaggaactaatgtgcaggaatcgtaccttcgaatgcatgcaaacgcggccacagaagagctggaactgccacaatttgcacacattgcagaatttcaatatttgtcaatgagagctgtttcactgtgcaaggtgcttgccagaattccggacgaaatgactgataggttttaacttaattcaagccctgaattttgtcgggaccctgccctaatttctcaaatttacaagctccttttcgaaataatggctttataatttgtttataaatagcaattttttatgtcttcagaaggtcatttctggagaccatcaaagagattgcttcgtccattaagcaattgttggacacgacaaac

SEQ ID NO: 50571 - DNA, 460 bp, Heterodera glycines
atgtgtttttggctgttggaagagttgggtccacctctgagaacatcggtcaaaaagttgtttgggttgaagagcacaacaaacgccatttcctgatggatttgctcgatgccagtgagcccgaggcactaacactgattttcgttgaaaccaaacgcggctgtggagatctgagttacatgctccagcaagaaggctaccattgcgtagcaatccatggcgatttgaagcaaatggaacgcgagcgtcatttggagaacttccgcaacggaacggcacccattttggtggcaacagcagttgccgcccgtgggttggacattccgaatgtcaagcacgtgatcaattatgacctaccgaatgacatcgatgaatacgtgcaccgaattggcagaaccggccgtgtgggcaacattggaatggccactagctttttcaacgacaaaaaccggaacatttc

SEQ ID NO: 50572 - DNA, 549 bp, Heterodera glycines
ctggagctccccgcggtggcggccgcttttcaactagtggatcccccgggctgcaggattcaggcacggggcttaaccattttccaacattggctaattaccgtccctaactaattggcttttttccctcccacttaattgtgtaccatcaaaaatgccgaaggtggactttgactatttggacatgttttcacccatcttggtggcgtttatttttgcggtcatcctttttttcatctccttcacgtgcatcaattggtactgtatcacgcacaaggatgaccttacggtgttcgaaaagttcggcacccgcttgaatcttcgtcttggcccccattcaatggcagtgatcaaacgaggcggctacgcgtccacctacgcccgcgaggaggcaaagcggtcggaatgtaccggaccacaacagcaacaactgaacacgcttggggacggaaaatgccaaattagccacgcttgacaaaaatgattggcattttttcaaaatcattttaattttgatgaaattttctatgggttttcaattaaccaaag

SEQ ID NO: 50573 - DNA, 895 bp, Heterodera glycines
ctcagagtgattctcctgttcctaattggctgcttaacatcggaccaatttcttgccatgcgtggaacaaggacaaaactcaattggctgtttcgccttccaacaacgaaattcacatattcgctcgtttggagactgtttggaacccgttgcacgtgctaagagaacacgacttgctgatcaccggattggattgggctccgaatactaatcggattgtttcatgttcgcacgacaaaaatgcgtttgtgtggacatgggaggctgaaaagaacagttggaaaccggagatggtggtcgttcggataaacagagctgccacctgtgtcaaatggtcgcccaacgaaaacaaattcgccgttgggacggcgtgaaaatgactggtgggtagcgaagcaaatcaaaaagctgattcgttccactgtcacctcattgaattggcatcccaacaacattttgttggctgttggcgcctgcgacttcaaaacgcgtgttttttctgcttatgtgaaagagattgacgaaaaaccaacgccaaacccttgggggaccaaaatgccattgggagaattgctcaaggagtaccagtcgaccggatgggtccatgacttggccttttctccctccggttgtaaacttgcctgggtctctcatgattcgtccattgctgtgattgacaagtccaattctcaacctcaggaaaggccaattcagcacaaaactgcctttttgccgttcacttctgtccgatgggtcaatgagacgcatattgtgacggctggtcacgactgttccccaatgcttttcactttcgacgggacggcgttgaattttaaatgcaaattggatgtgccgccagaaaataaaaacggttccaacgtgagctccgctttcg

SEQ ID NO: 50574 - DNA, 477 bp, Heterodera glycines
gagctcacgcggtggcggcgctctgcatagtggatcccccgggctgcaggaattcggcacgagggtttgaggtagtgtaataaattcttattgtagtaaaaatgtccgaaaataagtccgaaggtggcgctgaaaagaagaagagcggtggattcaacacgaagaagtttttgttggacctcgcatccggcggaactgctgctgcagtctcaaaaaccgctgttgcacccatcgagcgtgtcaagctgttgttgcaggtgcaagatgcttccattcacatcaccgcggacaagcgctacaaaggcatcatcgacgtcctcgtccgtgttcccaaggagcagggctttctgtcgttgtggcgtggtaacctggccaacgtcatccgttactttccgactcaggcgctgaacttcgccttcaaggacacttataagcgagtcttcacgcaaggagtggacaaggagaagcagttcttga

SEQ ID NO: 50575 - DNA, 657 bp, Heterodera glycines
ataatgacgcaatttctccccgacaatttgttggctctgtttgcgcctcgtccgccgattcaattcaaaccgccgccagatgatctattcatccaccgaaaacacatgcaaatggggggcatggccgagtgtgtccatggttttgaggatccgaaggacactcctccaaaacccaaaattgagacccgagaggagaagagagcgcgaaaacgcaaggaaaaggaggagctaatggcctacaaaattgagctttgcattgccacttggacacctgcggacaatccgaaggcgaccgttgacccgtacaaaacactttttattggccgaattaattatgaaacttcggagtccaaactacgccgtgaatttgagaagtacggcaaaataacgaagattattatggtgcacgacaaaaacagcaaaccgcgcggttacgcctttatcgaatatgcccataagtcggagatgtcagccgcttacaagaaggccgacgggaccaaaattgacggacgtcgcgtggtggtggactacaagcgtggccgcacgcaaaagaaatggctgccgcgtccgttgggtggcgggaaagggggaccccgcccaatgcgggagtccaaggcgaaaatgttggcgcgtgagttggcccgaaaagggggggga

SEQ ID NO: 50576 - DNA, 543 bp, Heterodera glycines
tggggtatcctccttgtgactgactgactgactagtgaacatttcaagagcaaccagaacattgctacacaaatcgagttgtcactttgtggtatcgaccccccgagttgttattgggcacgcggaactacggcccggcgattgacatttggggcgcgggttgcatcatggccgagctttggatccgtgcaccaatcctttatgttaacaccgaacaatctcagctggagctcatttcgaaactgtgtgggtcgattaatccgcacagttggccaggtgtttgttggcgtttggcttttcctaaaaaaccaaatccgccaaagggtgtgacaagttgccttattacaacaatttgcaaggatcgttacagcaaaatttaccgagacgcgtgagagagcgtataaatccatttcttcagaacaatgagcaagccctttcgctcatcgattttatgctgacgcttaaccccgagaaacggccctctgcgtccgctgccttggaccacacttctttttcgaggcgcccatcccagcaataaacatt

SEQ ID NO: 50577 - DNA, 498 bp, Heterodera glycines
agccctctaaaattcacgaaggtgtttttgctattgttcgtaaagttggtggtgaacatattcgtttgtgccgtttgataagtgggcaacgcgtgctaattgaacgactgagttttaatccgaaagacgcaattggacatttttatgggattttcgaagtcagcaatggtggtgacatgctttgccccattgaattcgcctcaaagcttttttttaccgaattttcaaatgggaattcagcaggagataggggtcacggaaatgaaagcactcaacaacttacaagcaatcaaattatgagcttaaaagaggatggaatcactacaaacgaattagtttccaaattggtcagcggaaattgccatttccaatctcgtacaaaattttcaaaagaaaaatatatgcgaaagaaagttcacaagcattcggaccgggttgttattttgcagcccaatattcgccttttggccgactgttactaccgaaaggacccccaac

SEQ ID NO: 50578 - DNA, 462 bp, Heterodera glycines
taaaacaatttctattcggctctttccacaatttatcaacaacgtttttatcattatcacataaaaatgcgtttttgagccaaaatggaagtcgaagaaacgaaagcgacaaaattggagcaaatgtttgccaatgtatggcaaaattggagtcattttgtgctattaatggaagtcggcctttggaagcaaaggcagagtttcggccgatcaattcgatggactttcattccgacgtcggccgaatgctgtacaccatcgccattctgctgatgttttccttcgtcattttcgcccttatggtccgttccattagtcgttcgcgttcatccgccgaattggagacgcttttggatgccatgcgtttccgagaggaattggacattcagctgaggcaaaagcatcggctgaggaaggcgaagcgaaaagtgaccgcttggctgtgccgaggaaacggggcga

SEQ ID NO: 50579 - DNA, 520 bp, Heterodera glycines
caacaatttattcatttcactttcaatgacaatgaaccgacttttgcccggccgttctctgctccccaaaatcatgcgaaatttttcacacagcaatcgcctcgccgcctccgaggcggacccggaacattacggctatttcccggacccaaccgaacagatgtggggcctggagagggaaatgcttgctgcccgcctgaagggcgaagatcgctactcacccaaaatttattaccgcgctgaacattcgaccaaggatgtcccaaatgtggtgcgtgtccatttggaggacaaagtcgtcggatgcctttgcgaacacgacggagaccatgtgaattattggcacatcagaaaaggcgacacaaagcgatgcgagtgcggacattggttcaaaggcgtgcaagcagacaccgacagtttcgactgaatgcggtggacaccgatttctcgctttgaagaggataggaaattgttttggttgattaaatctttattttttgttttgttttttcgttttcaa

SEQ ID NO: 50580 - DNA, 480 bp, Heterodera glycines
gattaattcatcccagcaggaatctctttttttgtttatttccttcatttaatatacataattgtttcattccaaatggagggaatattcggcactcagcgggggggaggggacattctaccgaataacgacaacaacggcaatcacaacgacaggcaaccgttgctactcgaagaaaatgaaaaagccagctacgggtcgctggtgcctacagaggactcatttaggcaagacaaacattggtggaaaaggagcggaaaactaaaggcctcgaaacgacaacttggcatatttgcttattcctcctccgttgattatgcgctgattgcttttggtacggtcgcttctgtgctccacggggccggcttccccttactttcgattgttctcggtgggatgacctcagggccgaaaattccgattttgttcatggccaaacgccgcgtcaaaatgctactaattcctctgccatttcgccaa

SEQ ID NO: 50581 - DNA, 652 bp, Heterodera glycines
gttgtgcactaaaagccaacatgatacaggcttggcgcacgcattttgttctcgaggaaggcatgttggaagtcgagtgcacttcacttacaccagaatacgtcttaaaagcttctggccatgttgaccggtttatcgactggatggtgaaagacaaacaaacgggtgcttgttttagagccgaccacttggttaaaaatcaagcggaaactttgattcgggacaaaaaaactgatgaaaaaacaaagtccgaacttatgaatgtgcttgttatgcttgatgggatgagctgtgatgacttgcacgaagtcattaagaaattcaatttcaaatctccgctaaccggcggtgacttgtccgaacccgtttctttcaatctgatgtttcccactgaaattggacctacctgtgatcagcgagcctttctgagacccgagacggctcaaggaatctttatcaacttcaaacgccttttagaatttaaccagggacgacttccttttgctgcagcccaagtcggttctggctttagaaacgaaatttcgcctcgacaaggacttatccgcgtccgagagtttacaatgtgtgaaattgaacactttgttgacccgaccgacaagagacatcccaaattcgagaaaattgcacattt

SEQ ID NO: 50582 - DNA, 517 bp, Heterodera glycines
caacattggaaatggcttttccgcctccttttccgaatccattgcttcctcgccttccgaatcagtcggttcaattccctggacagaagtttggcttcttttctccacaacgtcaaagtattctgcccgggattccgctgctccgtccacgttttcgtccgaattttattccaagggaactgcggccacccaatccattggcaagacccaccgggccaccaacgaccacaacagtttttattgggaacatttccgataaatgtccggaccgaatcatacaggaagttctaaagaagtgcggttccgtgtgcaattggaaacgtctccaagactcacgcggaaaatttaaagcgtttggattttgcgactttatgtacccagacggagcaaagaaagcactgagtgtcctcaaggacttccccatcggcgacaaacgtctgaatgttaaagcggacgaacaaacggagaaactgctggatgaattctccaagaataagctcatcgccgccaacgagga

SEQ ID NO: 50583 - DNA, 747 bp, Heterodera glycines
cctcgtgccgaattcggcacgagggtccaattaagtttctatgtccaaacaaattcgaacttgttgggtgtggcgtaagaacaaccgttggtggcgttatttgccgcgacgtaacgactcccacaacctaatcgacatggacgagctgggcgaacaatgcgccaccttttccgacccaatgcccgccgatccacccaaactttgggtggcgtggctgtacacagattcttacgggtcgggacgaaagatcagggaccaggtgacaaagctctttggcaaagacgcgaaaacgggcgaaatgcaagtgttcaaaaacacactgtcgaccaacaaacagttgtggaagataaagcatctgctcgaaatacggccggtaacatttccaaacggagagcccggggccggaagatgcgacacatttggagataatggcggatggacgctgtgtaatcgaccggcaaagtttgcctaatgtcgacgagtttcaactgattgaccgcagcaagccagttcagcccgcgttatttggcttctcgactgatgtcaaaggatgtggccaagcaggacgtgtacgaggacaccgtctacaacccggaaaatatcagcattggatgaaagaagggcggcaaaattattgcaaatttaagatgttctttttgatgtcatttgctctactccgtccatcctatatacttcattttgtttttgtctaaaaattacattttgttgcaaataaacttctcatat

SEQ ID NO: 50584 - DNA, 482 bp, Heterodera glycines
tccacccgggccatggcaagcgagtggtgcgcgctgacggaaagatccaaatctacctgagcaagaaggcacagcgtggtgcagcactgaagcgcaacccgcgtgacgtgccgtggaccgtgctgtaccgacgaaagcacaagaagggagtacacgccgaggagggcacgcagcgaaagcgcgttaagcgcaccgtccaaattgcttctcgacccatcgccgacctcaccgtggaggcactgttggcccagcgcaatcagaagcccgaattccgtaaacagcaacgcgaggcggccatcaaggctgccaaggagtccgcccgagtccaaaaggacgagaccaagaagaagcagcagaagattgacaaaaaggcagcgccaacgaagacgaaggcggccaagcaggtgaaagcgccgaaacaatttgtgggcggaaagcgctgattttgtgacgaaaagatgggatgtgcttgtgtgaattcg

SEQ ID NO: 50585 - DNA, 419 bp, Heterodera glycines
gtttgagcgatcgaattcaacaccctttcaatttggctatcatgcaaatcttcgtcaaaactctcaccgggaagaccatcacccttgaggtcgaggcgagcgacaccatcgagaacgtgaaagcgaagatccaggacaaggagggcattccgccagaccagcagcgccttatcttcgctgggaaacagctcgaggacggacgcaccctggccgactacaacatccagaaggaatcgacacttcatctcgtcctgcgccttcgtggtggaaagaactagaacgacgaacggaggagatgattgatccgtatcgatccatatattatgtaacttgagaccgtcctgtattgtgttccgttttattcatcatcatgaaatgtatttcaatgatcacggaacgataaacccatcaaaactgtc

SEQ ID NO: 50586 - DNA, 697 bp, Heterodera glycines
gggctgcaggatttctggcacgagggtccatttaagaaacattcctttcattttcaaagatatttctgccatttgtttcgcggcttttgcacattccgtctaataaatgcaagcagtcacagaacaatgcttttgcaaacgatgggctttcagtctgaagaaaagcatggaaagcgagaatttcgaaaggcatttccgtttggccattcaatcggtcactgcggaagactatgaaaagatgcgtcagtatcggcaccgggaggactctctcgcgactttggccggtcgtctcttcctccgtaaggctgtccaatgcctttgcggtgtccgttgggccgacattgaaatttcacgaacggaacggggaaagcctttcattgttcgacccgagaacatttccataggactgaacgtttctcaccaaggcgactacaccgtttttgccagcagttgtaccaaccaagttggcgtggatgtgatgcgattggacatgtgccgaggcaataaaactgcggatgaatacatcaattcgatggcgaagtcggcttcggcgggagaattgcgaacgatgcgcggccagccgacagaacaaatgaaaatgaccgttttctaccgatattggtgtctgaaagaagccattatgaaggcgacagggcatggactcgtgaacgacttgagccgttttgatttcatcatc

SEQ ID NO: 50587 - DNA, 509 bp, Heterodera glycines
taactcaacattttctaaaatttccaatggctggtggcaaaagaaaagcgggcaaggacagcggaaaagcaaagtctaagaaaatcatctcgcgcagtgccagggctggcctccaattcccggtgggacgcatccatcgcttcttgaagaagcgcacaacaagcaccggacgagtcggcgccaccgccgccgtgtacagcgcagcaattctggagtatctgacggccgaggtgttggagctggccggcaacgcgtccaaggacctcaaagtgaagcgggtgacaccgcgtcacttgcacttggcaattcgtggagatgaggagttggattcgatggtcactgcgacaattgcgggcggcggagtcattccgcacattcaccgttcattgatgagaaagcctccgagtcaactcaatcacagtcaccagcataatcattcgcagcagcagatgaccaacgttggcaatggcgacaactgattttggccaaatgaatatcgttctttcaat

SEQ ID NO: 50588 - DNA, 764 bp, Heterodera glycines
cgcatccgaaagtggaagtgacaaaattgtgttccaaaagaatgttactgggcgaggtagccaggttttggatgacgccgagtttgttaaaatgtatgatcggtcgacttcgaaaaccttgaacacttcctcagccaatgacaacgcacagtcaaaccaacagaaagaacaggttcagaagtggaaagtcggtgatcaatgcatggcactctacgaagtggacggaaagtgttacccggccaaaatcgagcagatttcgcctgtaaaaaacacatgcactgtctcttacattggttacgaccaaaaggccattctgaagttggaggacattttgggtgaatccgatgttgaggctgccgatgaccatggcgatgagcgtgaagcggaagggacaagcggaacgactaagattgcggacaatgatgtgaaaaaagatgcatttccgatcccggatttatgtcctccaccaccgccatcgatgtttggaaagatagccgttgcgggcaatgagaaggaggcactgaccaacatgcttatgtcgtggtacatgtccggataccacaccggcttctaccagggtgttatgcatgaaaagacgacccgtcagaagccaaaatagataacgttgccatacggcttaaaaatcatctcactggttgctgtccatttttattgtctctcccctccctcagttattgtttaattttcttgttcagacataaattgccggtcaacatttccaaagcaataaacggatagccttt

SEQ ID NO: 50589 - DNA, 855 bp, Heterodera glycines
gctgttctcgcgccgggcaagctccgtctgcagaagtggtacgtcgcatatccggacaaggcaaaaaagaaaatcacccgtgagttggtaaccaccattttgtcacggaagcccaaaatgtgcgcattcctcgagtataaggacacgaaagttgtgtacaaacgttacgcttcgctttacttttgctgcgccattgagcagacggacaatgagttgctttgtctggaggtcatccaccgttatgtggagctgttggaccgttattttggcagtgtgtgcgaattggacatcatcttcaacttcgagaaggcctacttcattttggacgagtttttgttggccggcgaaattcaggagaccagcaaaaagcaagtgctgaaggcgatcagtgcgcaggatttgctgcaggatgaggagacaacgcaaggattgtttgaagacaacggacttggctgatgatcgaccacactctaatcagatcagcagaaaaagcagtagcatcaatcatttttcaaaactttttcttccctaattaacccatttttcgtttcaatgtccaacaaaagttgtatttgtgccaaaacaccttaaattttcgtttatggcacaaaatgacaaaagcattttgttcaccgtcccttaattacctgaaaatgtttttagttcacaccaagcctaatgatcactaattctaattacctatcatttcttttttccgtgatataattgcactgtcttttttattttattctgtcgatcagtctcagatgagccaaaatatttgtttttcttgtaattctttcctgtccattttgttcacttcatttttcctttcgatttcattcctcctaaaat

SEQ ID NO: 50590 - DNA, 621 bp, Heterodera glycines
  unsure (1)..(621): unsure at all n locations
ctcaggtgggattgaacctgggactccctgtttggtggcaaactcacagaccactaagacaaaaaatcaattagtttttgaactgggggctcaaaattgactcggtgtgttaaactgttttaagcaattttgaattacgactatgatcacaatttttcagttttttgttcccaatccaaagagtgtagttgacaattgaattatataaaattccatgaattttgctcacctttctttgttccaattaagtgttcttttcacgtgaaatttgactaacaaattgactcttcgagtctcttcatttattcatcaacattcgcaattcgtttgtttcttcactaatgagtggtgaattgcggcttgattcgagtcttgatctgatgcggcgtttgccaccgcaaaactgtgagaagcatttgaccgatttggtcgctcttgcgcccgacctttgcgagtctttgcttactgccgttgaccaaccgcttanagtggcgaagggtttgtgctgtgatgccaaaaagttactttgaagaggcatttctctgtttagacaaacaacggggagggaatatttgctctgcggttagtttagacattttgcaaatcgttttggaattgaca

SEQ ID NO: 50591 - DNA, 1036 bp, Heterodera glycines
agtccaagagaagacgacgtaaaggaatgccttcgggaggcgacgatgaacaacagtttgaggaggcggtcaaaccggcattggagtcccttttggcggatttgcaaaagaccaccgaagttcttcggcaaggcaaacatggcaaaggccgacggcaacagaaggaggacgaatccgccgctttgttggacttgaagaagcttcggaactctccccgccagcgaaaccaatcgccggcagcggtcgccaatttgcgaaacggaagaagcgaagagctgcagcctcgccgtgacccgatgcttgagggcgacaaattgggcatccacacgataccgaagggggactgtgcttcgtgcaaccaagcagtgattgggcccgtggtgatagcccttgggaagatgtggcatcctgaacatttttgctgcgctcattgcggagattccattgaaaatcggaattttttcgagcggcaaggaaaggcgtactgtgaaagcgattaccacgatttattttcacctcgttgttcctactgtaacgggcccatcaaagaacgttgtgtaacagcacttggcggaaagaattttcacgtggagcattttgtttgcgccgaatgcggcaaaagcttcggagacggcggattccatgagaaatccaattccgcgtactgtcgcgattgtttctaccgtacttacgcgcccaagtgtcagtcctgcaaacagccgatcactcacaaattcatcacggcactcaacacacattggcaccccgaatgcttttgctgtcaggagtgtggccaacccttccattgtgtctctctgttcgaccatttgggccgtcttctctgtgagatgtgtctccacacgcgcgtcggctccatctgcgcgcgttgtcggctgcccatcagcggccgttgtgtgtccgcgatgagtcaaaaattccatccggaacatttcacttgctcctactgcactgaccaacttgacaagggcaccttcaaagagagtgccgggcgacccttttgcctccgctgctatca

SEQ ID NO: 50592 - DNA, 191 bp, Heterodera glycines
acggagaagaaactcagctgttgcaccagccattcatgctcaatcctgaacagactgtcaacgaatatttggaagcacatggggcaaatattgcggatttcttgcgcattgagatgggccaagaacacaccaagacaaatgacctttctgttcattgttagtataattaagtgctagtaaaatattgcttt

SEQ ID NO: 50593 - DNA, 481 bp, Heterodera glycines
gttttcttttattcaaatttgataatggcagatgatgaagattatgatgggggagaaatggacggcgatgagtttatggaggaagagcccatagaagaccttgatgcggaacaccaagcgggagaagaagaggaaggcgcggagaatgtccaagttattaatgtttctgacaaagttgcatcatccaaccgagtgacaactccttttatgactaagtacgaacgtgcaagagttcttgggacgagggcgctgcagatagctatgggtgcaccagttatggtcgaaattgaaggcgaatcggaccctttggaaattgcgcgtaaggagctcaaggaccagaagattcccataatcattcgtcgttacttacctgatggttcattcgaagactggggcattgatgaattgcacattacggattggtgaaaatgattaaccgcgtaattggcattttttctatttatgtttaatgaatttttga

SEQ ID NO: 50594 - DNA, 610 bp, Heterodera glycines
atttgacttttcttatttgaataaggcattcaagcgagcattggagcccaaattgccaagcaccgacatccggccaatcccggatgaacgctgcgttaacacagctcatctcggcgaggcagagaaagagcgcttggaacaaatcggcttgaaagccattgcggaaggtcgcgtggcggccgttgtgttggccggcgggcaggccagccgtctgggctctgcccagccgaagggcgttcttcgcctgggcactggacttggccaggacgacgtcgactcacttttgttcattcaggctgcacaaattgtacgccttcaacgcatggcggccgagcagttcccggccgaggctgcgaagagcggtgggcgcatcacttggctggtgatgaccagcaacaccaccaatgccgcggtgcatgaccatctgaatgccgtactcgccgagactggcctcagttcggaccaggtgctgatcttcacccaaaaagaaattccggcatttgactttgatgggaacgcactcatgaaaagcagcactgaattggtcactgctcctgacggaaatggcggcttttatgacgtggtccgcccgcttcttccgaactggaga

SEQ ID NO: 50595 - DNA, 427 bp, Heterodera glycines
ttgtttatctttactcaacaatttgcggtttagtaattaaagacgctaaaaaatggcacaacagcaagcgataacgaagaagcgtaaagctgtgcaagacggaattttcaaggccgaattaaacaactttctcatgaaggagttggccgaggacggttattccggtgtcgaagtgcgtcgtgcaccttcccgtactgaagtgatcatcatggcgacgcgcacccaaagtgtgctcggcgagcgcggcaagcgcatccgcgaactgaccgcactcgtgcagaagcggtttggctattccgctggacaaattgagctctatgccgagaaagtgtccagccgtgggctttgcgcggtggcccaatgcgagtcattgcgttacaaattggtcggagggctcaccgtgcgtcgtgcgtgctacggggtgctg

SEQ ID NO: 50596 - DNA, 576 bp, Heterodera glycines
ctttgttcatttattttgtttgaatgcgattctatgtcaaaaacatcgaagaaaaattttgtgacaaagcaactcgttaaagaaattgttattccagctgacaatgaatttgttgggaaaattttagcttcacgaggcaacaacctccacgaagttgaaaccgatgaaggggaaaacttccttgtgagtatgcccacaagatttcgaaagaaattatgggttcgtcgcggcacttatgtgattttacagtcaattgaagaaggagacaaagtgcgagctgaaattgttcatgttttggacccggaaaacattgcgtttttgatggaaaaagaagtttggccggagagatttattgtagaagctgcgcaattgaccaagcgagggcagcgaactgaagaaaatgacgattcggacctattccccgcaacttcggaatctgaaaattcggctgaagagagttcttccctcgtttctgaagatgtagctttgaatggacagacaaatgccttttgatgaaacaacgatttaaaagaaatttaattttgttgcaaagaatttttaaataaattttttaac

SEQ ID NO: 50597 - DNA, 488 bp, Heterodera glycines
gtttgaggaaacaaatgacaaagttcgaagagaccaaatcaaaattagaggcagaatttgaaaagcttcgaaatttggaaaaagatcgttcaaaatgcatgaccaacagacggcagttggagagccaactgacagagaattccatggtcaaagaagagttcgatcggttgaaaagcgatgccggcgttttcaagctgattgggcccgtgttggttaagcagaatttggaggaagcgaaacaaaatgtggcgaagagaattgattacattcggacggaaatcgaaagaattgagtcattgctgggcgatttggagaaaaacatcgaagtgcaaaaggaatccgtcgaacgaatgcgcgacactttccgacaaacgctggcggtggccactgccccaacggcgaattcgatcaacgcttaatgagtgaatggacgaggaccgatcagactgattgcgagactgatcacttctttcccaacccgaccaaat

SEQ ID NO: 50598 - DNA, 475 bp, Heterodera glycines
caacgcgtgagattcacctcaactcgccattcaacatccggaccatctacaacttccgcctgatcaacacgggctcaaagcgcattgggttcgccttcaagacgacgaagccgaagcgcatcttcctgaacccgccgtgcggcaccgtgggcgtcggcgacaccgtgaacgtgatcatcaccgtggcacccttcgacccgaacaacgaggacatcaagaacgatcgcgtgatcgtggaatggtgcaacgcgcccggcccgtctgacgccgtgttcaacttggactggttcaccgaaaatgcggttcgaaatgtgcgcctcaacgtcgtctacaacttgtagcggatgcaatatgatgatctgtatcgatccatttcatgaaatgtatttcaatgatcactgttatcttgagactgtcctgtattatgtgttccgttttttcatcatcatgaaatgtatttcaatgatcacggaac

SEQ ID NO: 50599 - DNA, 497 bp, Heterodera glycines
gaccattcaacaaatttgattttcaacaatggaaggtgttgttctagaagagactatggaagagaatgtaatggatacagaattggacgacctcaaaaaaggagcagcggtaaaaaggggccgtggttttgaggggtcgcagaaaagtgctgtccaagtctatgaaactttggacgaggagggctccgtcggaggaccacagcgttctgttgaaggatggatagtttttgttacgaatgtccacgaagaagcacaggaagacgaggtgaaagatctgttcaaagaattcgggaatgtgatgaacatgcatttgaatttggaccgtcggaccggctatttcaagggctataccattgtgcagtacgaaagccaagaggaagcggcagaggccattgccgggctgaacggctacgactttttgggacaggaattgcgagtggattggtgttttgtgaagggcgggcgcgagagaaagcgatgaatcggatgagaagaag

SEQ ID NO: 50600 - DNA, 476 bp, Heterodera glycines
gtctgtgttaatctagaaaaagtaatggcttcacgaaaaggaaacgtcaaggaagagcagccggctgtttctctgggtcctcaggttcaagaaggcgaaaatgtctttggtgtggcgcacatttttgcgtctttcaatgacacttttgttcatgtgaccgatttgtctggacgtgaaaccattgtcaaaatcaccgggggaatgcgtgttaaggacgaccgagacgaggcaagttcgtacgctgttatgctcgccgcgccaagatgttgcggaacgttgtaagccaggttggcattaatgctcttcatgtcaaattgagtgaaacgggtgggaccaaaaccaaaaaggcggggtttttttttcaggcagagatgagggcccacgagcgttcgggtatgaagattggtcgaattgaagatggcaggcctattcctttagactagaatagccaaaaaggaggcagtcgtggaagtcgt

SEQ ID NO: 50601 - DNA, 525 bp, Heterodera glycines
gtctcatacatggaatggccgctcaaaacccgatgcgcgagctccttctcgagagagctcgtcctcaacatttgtgtcggcgagagtggtgataagctcacccgtgccgccaaggtgctggagcagctcactggccagacccccgtttactccaaggccaagtacactgtgcgctcgttcggtatccgtcgtaacgaaaagattgccgtccacgtgactgtgcgcggtgccaaggctgaggagattctcgagcgtggcctcaaggtcaaggagtacgaactccgtgccgccaacttctcgcaaaccggccacttcggtttcggtatcaccgagcacattgatctcgacatcaagtacgaccccaccatcggtatttacggtatggacttctactgcgtcatgggtcgtgccggtttccgtgtgtcgcgtcgccgccgcgccgtcgccaaggttggtgccccccaccgcattcaccaggacgaaaccattgagtggttcaagaagaactacgatggtgtcatcctc

SEQ ID NO: 50602 - DNA, 399 bp, Heterodera glycines
gacggtcggcacggcgtcttcttccgcaacgatctcttcccgtacagctccggctcatccccggtcgcctccttccgcttggccgtccaccattcgcgcgctccctccacttgcggcaaattcaacgagtcgcttctcggtgaattggccaattcggccacgttgcagtcgtcgctgtgcgtttgcacgtccattcgacggacggccgcggtggtggaggaggaagaagaagcgacggagggccggaagctgaagcttaaggagcacccggtgaccgacgaatacaaagtgtcacatgagatcgtcggcattggcgaaagcggtaaagttatggcgtgtttccataaacgacgcggcgaaaagtgcgcgctcaaagtgttgcgtgacaatgcgcgcagt

SEQ ID NO: 50603 - DNA, 477 bp, Heterodera glycines
ttttagattcaaatttgttttcgttgtttcatttcctttcattcgcaatgcctcagtacaatctgttcgcaaaccgatcgttgctcttcactaaacgtttcttcgccgtcggtcctcccggcactaaggccacatacaagcggacgaagccgcacatgaacgtgggcacaattggacatgttgaccacgggaagacgacactttcgtccgcaatcacaaaactgttggcagccaaaaaacaagcaaaattcctgaagtatgacgaaattgacaatgcgccggaagagcgctcgcgtggagtgacaataaacgcggcgcatttggaatacgaaactgacaacagacactacgcccacgtggactgtccgggccatgcggactacatcaagaacatgatcaccggcgcagcacaaatggagggcaccattttggtggtggccatcactgatggaccaatgccacagacccgtgaacatt

SEQ ID NO: 50604 - DNA, 482 bp, Heterodera glycines
ctttccatggcttcagaatgttgtatacaggttttttgtcgggttcggcctttgaacgagagcgagaagaagaacagttccaccaatgtcgtcaagtttcagtccaaagacaccatcgtcgttgggggaaaaccgtacgcctatgaccatgtgtttgagccaagttccaaccaagaggccgtgtacagcactgccgcccgacacattgtgcaggacgtactcaccgggtacaacgggacaatttttgtttatggacagacttcgtcgggaaaaacgcacactatggagggtgttattggcgactccgagaaacagggcataattccacgcatagtcaacgacatattcactcacatctacaattttgttgacacggaaatggaatttctgatcaaagtgtcttacttcgagatttacaacgaacgaattcgcgaccttttggatgttaccaaaacaaatttggcaattcacgaggacaaaaa

SEQ ID NO: 50605 - DNA, 557 bp, Heterodera glycines
gatatttaaattttctaacatgacacagcagagaaatcccaatgggatgaaaaagaccaacaaagaattgacggaactcaacgactgcttatccaaatttgcttatcttcggggttttcttccgtctcaagatgatcagcgcctattcgaaagtttttcctcggctcctccacagaaagaatatctgaatatcgctcgttggtacaaccatgttcaaacttacgaagatgttgaacgttccacctggccagataaatcgtctaacattgtcgaggaagagacagcaccaaagaaagacagagttggggaagattcgacgaaagtgacaacccaaaaacgatttgccgagatgtttggtcatttgcacttccacgaggtgggcaaaaacgacacaaccgaaggttatgtgcggacagagaacacagaacgacttctaagagagcacgtcaaagcggtgggaggaaaggttgtcacgcgttttcctcctgaacccaatgggattttgcatatcggacacgcaaaggccatcaacattgttttttgattggcaaaggcac

SEQ ID NO: 50606 - DNA, 496 bp, Heterodera glycines
gttgagctttatgttttcatgaatcaacgaagcgaaatgccagcgcaactccgtttccaaccgtccaatgctattggaacgcaccagcgctcaattataactgcacaacaatttcaacagcagcctttttgtgtaaaacgcgcccgttatgattatgatttatacgaagggcaatcgcatcataatttccaaagacagcgttttgatcaaacaccgccctccgctattcatccaatgcgcactttccaaattcgtcatcgttcaacggataaaacgcgcgggttgcgtcattttgctcaaaaagtttgtgagaaagtgaagcaaaaagttcaaactaattacaacgaagttgcggaagaattggtcaatgaatattttgacaatattgctgaagtcccatctgacccggaaaaattacaatatgatacaagaaacattcgccgtcgtgtttatgatgcgcttaatgttttaatggcgatgaacataattgaaaaaa

SEQ ID NO: 50607 - DNA, 614 bp, Heterodera glycines
catacctaactatttttaaataaaaaaattacaaccagcctgttgaatggggaattcgtcaactactgctcgatcggatgatccccagtcgacactaacagccggtgaaacgctttctgattacgatgagaacattatcaacagggggcgagtggcacgacgaaaagagtcgttttgcaagggtcttgcattcagcaaccgacccataagcatcaatgagatcgtatgcattcgattgagtgagatcggcactaattggagcggagttatgagattcggtgtcactaatgttgatccggccagttttcgcgacattgaattgccaaagttcgcgtgtcctgacctcacctctaagggcggctattgggcaaagtctcttgctgaacgatattccgtggaaggctcaattttgcattttttcaccaatgccaatggcgaaatgtattacggcgttaatggggtgcacaaagggctcttcttgagcggaattaatgtgcttagtccactgtggatcattgtggacatttacgggaattcgattgccgttgaatttatcgatccaagtgaggtgcaacttcaatcgaaacgaacttcgtccaaaaatagggctggat

SEQ ID NO: 50608 - DNA, 476 bp, Heterodera glycines
gcgatattgaccaacgcactgatgcggttgttgtcctgtcgtcggtgatgcggacattggagagcaatcaaattgtggccgagcagaatctgatcctggccaaagtgccgattctacgcatcaaatttatcggcactttccacgacataacggttgacctgaacgtcaacaactcggtggccattcggaacacgcatttgatgtgttactacagctcttttgactggcgtgtccgaccgttggtgatggtggtcaaagagtgggcaaagcgtcacggcatcaacgactcggcctgctcctccttcacatcgtactcgctggtgctgatggtcatccactatttgcagtgcggtgcacagccaccggtgctgcccaatctgcagcaaatgtacccgaaacggttcagcgtacgtgcggatgtgcgcacgctgaacgtgtcgttgccgttcgagccaattccaaccgcgatgggctgg

SEQ ID NO: 50609 - DNA, 576 bp, Heterodera glycines
ggtgagcgctcagagtgattctcctgttcctaattggctgcttaacatcggaccaatttcttgccatgcgtggaacaaggacaaaactcaattggctgtttcgccttccaacaacgaaattcacatattcgctcgtttggagactgtttggaacccgttgcacgtgctaagagaacacgacttgctgatcaccggattggattgggctccgaatactaatcggattgtttcatgttcgcacgacaaaaatgcgtttgtgtggacatgggaggctgaaaagaacagttggaaaccggagatggtggtcgttcggataaacagagctgccacctgtgtcaaatggtcgcccaacggtcggtttgaccattccttactcattcattggcccattctttaaaatgtctcattttttaaatacatttaatttaagaaaaatgtttatattcgttttaatttatttttattaagaaaacaaattcgccgttgggacgggtgcgcgtttagtcgctatttgttattacgaagtagcgaaggaatcttcccccccccccttctaattgttggcttttaattgga

SEQ ID NO: 50610 - DNA, 425 bp, Heterodera glycines
ggagctccccgcggtggcggccgcttctgcaactagtggatcccccgggctgcaggattcccggcacgaggcagcaatcagcaaaagctgaacacactccttcgaactcactgattatttgatccatctctgagagcaacttctgatcagccaaagatgccggaaagcgaaaacgacttcgatgaggaggcgcccaacgccaccatggagaccaaagtggcgggcggcggcgcggcgccgaagcgcgtcgggcgctggacgttgtcacaactgcgccagacggacggcatcatcccgtcccaggccggttggaacaatggagactcgcagaagttgatgaccaactttggtacgccgcgtaacaccaccaccaaagtcaaagtggagaatctggccgagattccggaggacattttgctgaaaag

SEQ ID NO: 50611 - DNA, 635 bp, Heterodera glycines
  unsure (1)..(635): unsure at all n locations
cgcttcttctcatcgccttcgccttcaaaacttagaagcaccaatcccaaccagaaaaaatgtgcgacgaanaagttgctgctctcgtggtggacaatgggtccggaatgtgcaaggccggtttcgcgggcgatgacgcgccccgcgcggtgtttccgtccattgtgggccgcccccgtcatcaaggcgtcatggtcggnatgggacagaaggactcgtacgtgggagacgatgtgcagtccaagcgtggtattctgacgctgnagtacccgattgagcacggcatcgtcaccaactgggacgacatggagaagatctggcaccacaccttctgctacgagctgcgtgtcgcccccgaggagcacccggtggtgctcacagaggccccgctgaacccgaaggccaacagagaaaagatgaccccaatcatgtgcgaaacgttcaacaccgccgggccatgtacgtggccatccagggacgggctgtcccctgtaccgcctccggccgtaccaaccggtcttgtgttagactccgcgcgatgggtgtacccacaccgggggccatctacgaggggttacgcncctgccccgacgccatgcctccggttgtgcttggggcgaggcggggacgtcact

SEQ ID NO: 50612 - DNA, 652 bp, Heterodera glycines
tattgatgaaaatcgacgatggagtgacttacgctgtttaacagatagggcgtctacatttgccaattcaggattcgtccctggaatcaagaatttgaaagaagttcataaaatgccggtgctagttgttggtgctggtgggcttggctgtgaaatccttaaagacttggctttatctggtttccatgacattcatattattgatatggacacaatcgatctctcaaatttaaaccgacaatttctctttcgtgaaaatgacattggacgctcaaaagctgaggtggcggctgcctttatcgagaaaagggtgtttggctgtaaagttactccccataattgcaaaatccaggacaaatctctcgaattttatcgtaaatttttcattattatttgcggacttgactccattgaagctcgccgttggcttaatgcgactgtgtgttctttggttgaatttgatgacggaaataacccaaaatccaacaccatagtgccgttgatcgatggtggaacagagggattcaaaggaaattcacgtgtgattattcctttcatgacgccgtgtattcagtgcacgatagatctttacactccccaggtcaactttccggtgtgtacaattgctcacacacctcggcttcctgagcat

SEQ ID NO: 50613 - DNA, 641 bp, Heterodera glycines
aaattcttctgcaaaattaagtgaaaaatcctcaaaaattattttttagatttaattcttaaatatgagtagtcagcaacaacagttggatgtgcttattgtcatagatggtaccaacattgataagccttgtgtattttttgatcttttcaaatttcaacatttaacttatttaatttaaaggttgatattttttcgagttctggctttgttgcttcttgtctcaattgggtttcaaagcttcattctcctaatgtaattgttgcgttacccaatcaaccgaatgatgtagcagccgaacttttaaaaaaatgggcttctaaattcaagcagcttcaggcatttggtgtttcaaattgccaatctttaaacgatgttcttcgtgaagttgattttcgacaaattcttagaaatgatttcatgctcatacaaaatttagccactttttgtttttcctatctgacgcgacaaatcgaaaaatttcgaaacgataggcggcaaaacaacaaaaatgtgctcacattgctttattactcaaaacgaaattatggaaggaaattcgaggaagatcggtctctgattggatacattgaacaaactcaaaaattaacacattatgagaacattggcaaacatagaac

SEQ ID NO: 50614 - DNA, 542 bp, Heterodera glycines
gaccatgattacgccaagctctaataccactcactatagggaaagctggtacgcctgcaggtaccggtccggaattcccgggtcgacatcatcatcatcatggccgctaatacgactcactatagggcaaaacggagccgaggaggaggacggaggacgcgggaggtaccacggcttccgcggctttcgaaggacttcttcctcagcaacggcaatgaccagtcgccgcacttgctcaatttttggagctttggacaacgattttgactttttgtttaacataaatttgaagagtatcgccaaattgacccgtttgtgcgcgccttatctcgaagaaacaaagggtgccgtagtgaacatcagcagtttcggcacacagcgttccctgtccgactacacttattacagcaccataaaaaatgctttagacaattattgccgctcaatcgctgttaaatttgcaaagcgcgacattcgagtgaacaacattaaccccggttttatcatcggcgaaactttggacgaagacgacaacagagcga

SEQ ID NO: 50615 - DNA, 420 bp, Heterodera glycines
ccatttaagtgttattattcgtatgttaaaaatgttgctgaaatttccttccattcatcggttctgctccattcgctctttgactcaacttcccaattcttatgaagtgttgcgagaccgcggtgacactgctgagctgagtcagctgaaaaacggctttcgtgtcgcctcttatgcaaacggacgtccgacagtgacggtcggtgtttggctgaatgctggctcgaggattgaaaccaatgattattaacggaatcgcttcactttttgaagggttgctgcacaagggatcagggaaacgaaattcggtgcaacttcaaacggagctcgccaaacttggggctcggcttcgctctttcactacccgggagcattcggccttttttgtggaatgtcttaaatcggacaccgataaagtgg

SEQ ID NO: 50616 - DNA, 461 bp, Heterodera glycines
tttgccggaggtcgtggaagtcgaatgccgtctttgaccaatcaaatgccgaaggcgttgttgcccatggccaatatgccactttattggttttcgcttaatttacttcgactgaatcgcgtcagagattgccttttgattgttcccctggggcaaaaattgcaaattgaaaatgcgctgaaaacggacggcggtggacgatggccaacacttaagggaatggacatcgaagtggtggccattgacagtttggaggaggacgtggatgactggggaacagcggacgtactcaaaagactgctcgggaaattgaagagtgatcacattttgttgattagcggtgacttggtcagtgatgtccggctgcgtgacatgttcaagcagtacatggagaacaacgctgtcctgtcctgtctgctcaccgattcggctttgggtgggcctatccccgggcctaaaga

SEQ ID NO: 50617 - DNA, 640 bp, Heterodera glycines
tttggatggtactgacggagatgaagcgctgaatttgaatgatttggatgaaaaagaggttcttggtgatgacgaggaggaccaacaccaaaatcaacacacaacaaaagaagaagtggaagacctttacgacgaagccatggctccgtccggtgcactctctgaaaagcgcgagtcggctgaagttatttcgtcgttgccaagttcgattcagcacaaatcgtcgtttgccatgcctatgatgatcaaatctgagcccggcattgctggcgggtcgcaaagtggcaaacgctactgctgctacattggcaatatgacttggtggaccacagacgatcaactccagaaactgattcaaaccctcggcgtcgacgatatgattgacgtgaaattctacgagaatcgcaacaacggacagagcaaaggttttgcgctggcagtgttcgccagtgaaccgtcggtgaaagcggtgatggagaaattgccaagcaaaaagctgcacgaacaatcgctggcggtgttgccgtacactaagcagtcgttggccaagttggaggaggccaccaaacgctacgaccagaaaagtcagaaggacgataaagtggtcaacattggcacagtgcgcattggcaccaatggc

SEQ ID NO: 50618 - DNA, 368 bp, Heterodera glycines
gcgtcattggcactttcattgaatatttcatttcaaaatgagcaaaactcatccaccggaattgaagaagtacatggacaaacaagtcaacatcaagctcaatgggaacagaaatgtgtccggtattctgcgtgggtttgatccatttatgaacatcgtcgttgaagattgtattgagcacctcaagaccggcgaatcgcagagcattggaatggttgttgtccgtggcaattctgtcgtcattatggaaccgatggagcgaattgggtgactgtcgcagacagaaaaaaattggcagtgatcattggtctctagctttgttaattttactctttttgttcataaattttgctttataaaagaaaaaa

SEQ ID NO: 50619 - DNA, 541 bp, Heterodera glycines
ttattgactctgaacattattgtttgtcatcgaaaaagacaaatggcgattagcaagggcactaaaattacgccaaaaggtggtaagggcggcaaaggaaagaagaagaagcttacgctaaagtttgtgatcgaatgcaaaaacccagtggaggatggcatcatgaagactgccacatttgaaacctttcttaacgaacggatcaaagtcggcggaaaaaccaatcaactggcggctaatggtgtcaaagttgaagccacgaagacaaaactggtcgttacatcggagcagccattctccaagcgttacttgaaatatctgacgaagaaatttctgaagcgcaatgctctccgggattggttgcgcgtggtagccagtgccaaggacacttatgagcttcggtacttccaaatcaatcaggaagatgaagatgaaagcgacaatgaagcatgagcgatttgccatttcttttgttgggtcgtattatttgttgcactttttaccagcgattaaaacttgttgaaagaagaaaaagagaaaa

SEQ ID NO: 50620 - DNA, 403 bp, Heterodera glycines
ttttttgtccgcagaacgaatgtctgcgttaattccatttataattgttacactgttttgggctgtcattggtgcaggaggcccatttttggtaccaagtggtatgaacagagggatcattcaaacgatgatcgtactgaccgcagtctgctgttatatgttttggctgatcgtctaccttcaccagttgaaccctttgataggaccacaactgcccgtgaaaacgatttggtggattcacaacacttgggggaatgtgaagaattgatgatcgatgattgcagtgattttccacttttggatgtactattagtgaatcctctatttctgtgaaaaactggcatgacaaaaagacacatataattcttcaaccttttatttctataaaaattgctttattaaa

SEQ ID NO: 50621 - DNA, 456 bp, Heterodera glycines
ggagcaaaagcccaaatgataacaaagaggaggaggaaactcaaagcgccaaagaggataagactgatcataaaacaaatgagcaaatgttgctggtgaggaccggactgaaactgaagcgtggcactctcttcaagaagaagcgaaatgttgacccgaaaacaatagatctgaccataaagaaggaacaagagggcccgcggaagacgaaagccgaattggcatttctcaaacggcaggaggagacggcgttcgaccgtttgtcaaagagggcccaaatcagtcaccgggagaaagtggagaagttcaacaagcaaatggaggaactgacggaattcaacgacatcccaaaggtgtcttggaccaaatgagaaggaaggaaaaatactactgtatcatatattacatttgcgatcacaatcagaaaaactaaagcaaatgcattcatttttagta

SEQ ID NO: 50622 - DNA, 415 bp, Heterodera glycines
  unsure (1)..(415): unsure at all n locations
ctatcgtcaagatgcccgaacacccagccaaatccgcaacattgtctatcaaatgggagtttactcacatgcggacggctccgcttacattgagcagggcgagacgaaggtcctttgtgcggtttacggtccgcacgaatgtcgcttccgatcacgagccaaagaagacgaggccattgtcatttgccagtacagtcaggcaactttttcggttcctgacagaagaaacaggccgcgtggcgatcgtcgaggcaattccttttcccaccttttggagagggctttcgaatcagtcattttcacaaatttatatcctcnaagtgagattgatatattcttggagctccttgatgctgacagcgccagtttggtcttctctataactgcctcgctcccgttcgtaacgataagcatt

SEQ ID NO: 50623 - DNA, 522 bp, Heterodera glycines
atgcccgaaaaattccacatattcatcgtgtgatgaatacaaacattgatggcaaccgtaaagttccttgtgcccttacagcgatcaaggtggttaagctaatattttttgagtttttttcatcttgaagggagttggtcgtcgttatgctttccttgtttgtcgcaaagccgacattgacattcacaagcgtgctggagaactttctgaggaggacatggaaaagctgactactgttatgttgaacccacagcaatacaaaatcccaagttggtttttgaaccgacagaaggatattcgcgatggtaaaaatcaacaggttttgtccaccaatttggagagcaaataccgtgatgactttgagcgcatgaagaagatccgtttacatcgcggtctgcgccattattggggtcttcgtgtgcgtggtcagcatacgaaaacgaccggacgtaaaggacgcactgtgggagtgtctaagaagaagggaggctaaaacaaccgtttggttaccgatcatgaagt

SEQ ID NO: 50624 - DNA, 321 bp, Heterodera glycines
tggcgattgtgtttaggaaagatcagacgaaaagagatggtcagattgtacaaagtgaaaattatgcgttctgatggttccgtcattttcggacgttgcgacgaaccgagggaaatcattcaacttccggtggaccttcggacactcagtgacgacgagcgaaggatgcgaatagccgagcgaaagccaattgccaagaaagtggttgaggatacattggacgactccttcgactttcacaaatatgtgtctcaatggaagcgatgataaaaccctttctttgttcgttagatttttgaataataaaaatggtcaaattaa

SEQ ID NO: 50625 - DNA, 474 bp, Heterodera glycines
atttgtggtggtttgttgctgcgtaagggtgcgtctgctgctccgcctttcgccgtcagaaatgccgtccaaatggcctctccgacgaaggtgatgggtccgcatgccttccattacaaatttgaacgttattacgccgctgcgattgttccgctttttcccctcgcttatttcgtccacgcgcccctcgtggattatgctttaactgctgcgattgttctccactcgcattggggcgtaatggctgttgtccaggactacgcgaggcccctggtcattggcaaaacgttggccaaaatggcgccggctgtcccttacatcgcttccgttgtgcttttggttggcttactgatgttcaattacaacgacgttggactgaccaaagcctttgaaatggtcttcagtttataggtgtcgatcatttgttaccgtagcattttaaatactgtataaaaattttatggaatatcaaaa

SEQ ID NO: 50626 - DNA, 444 bp, Heterodera glycines
gccgtttctccctctttcactttttgcgtcgtccgttgcctttgttggtctttcgtcgttccctttttaaaccgccattggactcaccgttctgtggcatttaccggacaaatggcgaaatttgccggacggatgacattttggtgtgccaacgcaagatgaactatcaccctggagcaaatgtccgccatcaacgagatcggaaccagcacttgttgaaagcggtctgtgacggaacggttgtgatcacacgcgagcactgcgaagtgaacccgaagaacgagtggatgtacgcgcagtacgcgtaccgcgactttgagaacatttacaagctgaccttcaacgtgataccacgacggatgtccaacacatttaaactgatcagcgaagaatgaatgaccgacccgaaattttgtgtattttcgttgttttttatgaatgaat

SEQ ID NO: 50627 - DNA, 252 bp, Heterodera glycines
gtcgaaggtggtgttatcacattgcacacgcgcaaagtgctcaacaatcgacctcttttccgtaaacagatggttgttgacattctccatccgaatcgcgcttctgtgcccaaatccgaggtgcgtgagaggctggccaagttgtacaagacgacacaagatgttgtggttgcgtacggtttccggtgtcaatttggaggaggtggtaggacagggtttggttgtgtgttcaactcactctgttacaccaag

SEQ ID NO: 50628 - DNA, 609 bp, Heterodera glycines
aactcaccagacacttgctccctctgctccctttgttctccccaaattgatcccccgaaatgaccgtccaattgtccgcccttttgctccctctcctcattatcactttgttatgcaattttgcgatggccaatttgattttccacaacattgaattcgattcggactgtatgaaggcgatgtgcatggcggacagcggatgcgaacagcaaggctgtgccgaggatgtgtttggccggctcggctgcggctttttccgcatgaatatttggcagtataagcaatgctacgagccgggacgagagattggcgaactgtcggagaccgcgtggattcgctgctcggaggactacgaatgcgcatcgaaatgcattgtgcaagtggccagcagattcaggttgaaatgctatgggaaaagcgactgcgaaaccatcgcacggattcacgacggaggagcaaatggatgccgcaccggagaaacgcttccctattggttcaatgtgaagtcgttttgtccggactgctgacgcacccatcaaaatcagcagagaaaaaggcagagaaagaaaagaaacaaaatttggccattttcccctcttaaggcataaa

SEQ ID NO: 50629 - DNA, 522 bp, Heterodera glycines
cccctcccaaatgtcttctcgcgcgacccccggtggcattggcttccaagtggtggcaaagcaagccagcaaattcaatgaccaagagggcaagctgatcctggactgggtcaaaaagctaagtggtgaaaacttcagcacggatgggagccgtgagaatttctataaattgttgaaggatggcactttgttgtgcaaattggccaacggcattcagcccggatcggtcaagaaaattcaacaaccgaccggcaatttcgcctgtatggaaaacatcaacgcttttgtgtcatttgccaaggcccaaggagtgccaacggaggaaacttttcagagtgtcgacttgttcgaggctcgcgacctgtactccgtttgtgtcactgtgctttcattgggacgaatcttggagaagaagggcaagccgaaccctttctcttgaatggtcagcacttcaaacggacgaagaaacgtacaatttgtcaccccaaatgtttatgaataaatgcttttaaatttaaaaaa

SEQ ID NO: 50630 - DNA, 765 bp, Heterodera glycines
caaaatggcgagtccagcattgcacactttcaacgcactgctggcgacgggcgcttcgctcctcactttgatggccttttactacatgttgaccggccaaggagatcgttttgacattgcgtggtttctcactgagacttccccttacatgtgggctggcattgctattgccgcatcgctttccctttctgttatcggcgtcggatggggcattttcactaccggttcatcaattttgggtggaggagttaaagcgccgaggataagaacaaaaatctcgtgtccatcattttctgcgaggctgtcgctatttttggcattattatggcatttgtattcgccgggaaattggggaaattcaccagagaaactgcgacgcaagaagtcattgtgaagaatttggccgcgggttatgcaatttttggtggaggccttacggttgggttcagcgatttgatctgcgggttggcagtaggaattgttggctctggggcggcacttgctgacgccgcgaacccagtgctttttgttaagattctgatcatcgaaatatttgctagcgctatcggactgttcggcatgatcataggcattgtgcagaccaacaaattcaacattggcaccacctgagggacgactttgccattgcttctcgtgtttctgtactttaccctctgcggacaatgaactgttttctgctggttgtgtgatcatagaatttaaattcgcatattttacatcagtcgttttttaacttttaaaaat

SEQ ID NO: 50631 - DNA, 530 bp, Heterodera glycines
agcaacaacgacatcattttcggaaatgaggaaggcgttaattatttggcaccatggacatattcctgtctcatcaaaacttcgatagatcggttgaaaactgctttatctgagaatcgtgaagccatacatgctttaaatcatttacaagaagtctttcgtcaaattgaccgtgcttctccctcctttctttatgatttctcaaaacttttgctgatcgagtcgggcgttgcaggaactaatgtgcaggaatcgtaccttcgaatgcatgcaaacgcggccacagaagagctggaactgccacaatttgcacacattgcagaatttcaatatttggttgttacacttaattgtttgggttatttaaacttcgaaatgttcgctgaattttagtgcgagttgagttttgttttccgctttgaaatattttccatttttttctaattcattcaaagtttgacttgtctgagtttacctcatctctccctttctctttccttcacctgaagtgatctttttttacaatgtgt

SEQ ID NO: 50632 - DNA, 515 bp, Heterodera glycines
tggctgcgccaaagactgttgcacgccgtgcccgaccgtaacgggcgaccagcaatgttttcgccatgttcgaccagccacaaattcaggagttcaaagaggcgttcaacatgatcgaccaaaaccacgacggatttatcgatgagcacgacctgaaggacatgttcgcttctcttgggaaggaagtctcggaaaagttcattgaaaatatggtcaacgatgcatcgggttctatcaatttcacaatgtttttaacgctttttggggagaaaattgactggcactgaccctgaagaggtgatcaaaaacgcattccaatgttttgatgaggacaacagcggaacaattgcagaggatcgcttgagagagcttctcaccacaatgggagaccgatacaccgaggaacaggttgatgaactgtttcgtgatgcgccaatcaaaaatggccgctttgactacgtggaattcacgcgaatgctcaaacactggacgaaggataaggacgaggaagataa

SEQ ID NO: 50633 - DNA, 518 bp, Heterodera glycines
gatggtggtgttatcacattgcacacgcgcaaagtgctcaacaatcgacttcttttccgtaaacagatggttgttgacattctccatccgaatcgcgcttctgtgcccaaatccgaggtgcgtgagaggctggccaagttgtacaagacgacccaagatgttgtggttgcgtacggtttccggtgtcaatttggaggaggtcgcagcacagggtttgcaaatgtgtacgactcactcgactacgccaagcgctttgaggccaaatatcgcttgttgaggcaaggcgttggtcagaaagccgagaagggaggacgaaagcaacgcaaggagcgaaagaaccgccagaagaaagttcgtggtgttaagaaagtgaaggttcaagcgggcgaaaagtgagcaaacggagaaatgacatagaaacgagggatggagacgatgtttggtgttgttgaagttgcggccgagaggcttctattgttattcttcactcgttgaaaaaatgaagatcaattcactgg

SEQ ID NO: 50634 - DNA, 864 bp, Heterodera glycines
ccatgcccgtcctgaaaagggagttcgtccgatccgaaccctggaataaatttttggcttttccaaaagattatgactttgcgtttgggttctaaattaaaattttccattttactccaaaatgttggaatcagaaaaaatccttttcgcaattcttataactatccgattacttttgaacacgtggttttcccgccaaataatcagtttaagttgccaacaatgcctcctgagcccatttatgacgagtcattgggagaaacgaagcacaaattgactaagcagtttattgaagcgaggggatttgagccaatccacacggagttgatccacaagcagtacggcttggtggcgatgagcggtggttttatcaaagccgaagactttgcatggattcagcaggaagtgaatgagaaattagtcgataagcaattcgccatttggcgcgttgacgccccgtggcttccgcgggtgcggcgtccgccatcaacaaaaaagggcggtgggaaggggcccatccatcactacgagacaccggtcagaaccggacgggtcattttggagctcggcgggtacatcactgaacaggaggctcgttctattttgatgcatctctatttgcatatgccattcccagtggaatttgtcagccaagaattgatggacaaacgcaagggattggagatgaaagtgcgtgcaaataacagaaacaaattcgattgggacacacttatcaaatacaacatgcagaattgcaaggcttggctgagtccgtacgatgtctattggaagtgccgatacgaatgaactacggaattgtttttgttctttattaattcaaaataaaagtttgttttacaaata

SEQ ID NO: 50635 - DNA, 350 bp, Heterodera glycines
cgggggttccgaaatacaggacatccaaaccgcgtgttctgttccgtcgtttcaaccgccccttctatcaatacacaatgcgtccgttggtgcagtgtccccgttgcagcgcttcgcatgagccatgggtgctgtgcatggactgctaccgcgtgttgcgcgacgccacggagccaatcaaacgacggatggtgtcgcataacgcatacattggccagcgacagcagccgatgccgcgatggactgacgaaaatggcattaatgccaacccgtaataattgttttttccatttgattgtattggccatttttatttcttaaatagttattgagcaatttttgttaaaaaa

SEQ ID NO: 50636 - DNA, 500 bp, Heterodera glycines
agacagcactgtgctccaaatcgcggaatgcttttctcttcaaacgcctcgtcagccccgtccaaattgattgccgtccaatcaccggcggtggttttggccatccaatgaccaggcaaaagatgcaaatgtacagcccggaaatgagggcagtcaattaccaacaaaagcgcacccacatgcatgcaattctcaccaagaaaactgttgaagaccgagttatgctcaacttacatttgtttgacaaggtggacaatgacaaattgacgttcgactccgattttttcaaggatcttgggattgattcgcttgactttgttgagtttatcattgcgattgaggacgaatttgagttcgaaattccggacggtgactcggacagaatgcgaacgccacgagatgtttacaattacatttgcgacaagtgcgatgtgtacgatggaatgtatgacaaatgctgccgtcaaaaaattgttcttttttaaagctaggacataaat

SEQ ID NO: 50637 - DNA, 446 bp, Heterodera glycines
ctaaaaatgaataaagcgtttgtcaaagcagcactctgctccaaatcgacgaatgtttgcctcttcaaacgcctcgtcagacccgtcgtccaaattggctcccgtccaatcaccggcgccggttttggccatccgatgaccaggcaaaagatgcaaatgtacagcccggaaatgagggcagtcaattaccaacagaagcgcacccacatgcatgcaattctcaccaagaaaactgttgaagatttatttatgctcaacttacatttgtttgacaaggtggacaatgacaaattgacgttcgactccgattttttcaaggacctcgggattgattcgctggactttgttgagtttatcattgcgattgaggacgaatttgagttcgaaattccggacggtgactcggacagaatgcgaacgccacgagatgtttacaattacatttg

SEQ ID NO: 50638 - DNA, 759 bp, Heterodera glycines
aacaatcaaaatgaaaggcttcttcgccctgttcgtcttcgccttcaccctttcggtgttttctgccgcccatttgccgcctttggacattaaccaaatcccggccgaataccgcgaattgatccccgaggaggtgaccaaattctaccacgagctgaccgaggatgacaaaaaggcgctgaaggaagtggcagaacgccacgaggaattccaaacggaagagcaggcaatggaagcgctgaaggaaaagagtgagaagctgtacaacaaagcggtcgaactgcgcacccttgtcaagggaaaaattgaccaattggtgcccgacgcgaaggcattcgttatcgggatgatcgaaaaggcaaagggaatgcgcccgaaggccggcgagaagccgaagcttgaggagctgcgcacggcggccaacgagctgatcgagaagtacaaagcattgaatgacgaagccaaagagtcgctgaagtccaacttccccaagattacgagcgtcatccaaaacgagaaattccaaaccttggccaagagtttgctgaaacaggaggcaccggccgcctaaacggcggcacttaagaaggaacggactgatcactgattaattgatggaccattgcgcttaatcttttgccattattttgtaccaaaaaaacagacagaacagaatgtgtgcatattcacatacactgataatataatattataataacttttctcagtcttttgtaaatggctaataaattgaattgc

SEQ ID NO: 50639 - DNA, 619 bp, Heterodera glycines
ttattcaaatggggcgacacaaaaagactcagaaattccgcaataagcttcagaaactgatcaagccaaccgatgacagaataaaagatgaaatccgcgtgaaaaaacctcccaaagaagatgaaaatgcacttaaaatcaaggaagcgtgagttatggggtggggttagtgaccaatgaatgcgaaatgatagcccgaagatttcggcagcgatgtttctcaaatacaacacacaactcgggccccccttccacgtcattatcgacacaaattttgtcaatttttctataaaaaaccgaatcgacattatgacggggttcatggactgtctgtacgctaaagtggtgccgtatatttcggactgtgtgctgggcgaattggagaaaatgggacgacggttcaaacttgcgctaaaaatcataaaggacaaccgcttccagcgactccaatgcacccacaagggcatttatgccgacgattgcatcgttcaacgagtaacacagcacaagtgttacattgtggccacttgcgacaaggatttgcgtcaaaggattcgcaaaatacccggcgttccgataatgtatgttcgtgaccatcggtacacaatagaacgaatgc

SEQ ID NO: 50640 - DNA, 214 bp, Heterodera glycines
caaaattcactactgcaagcgtccggacaacagcacaaagtcgtgcaaagctcgtggttcagatcttcgtgtccatttcaagaacacacgtgagacggcgcgtgccatcaattggcacgtggcgaattctgagtgacccgaggacatccccgaaccacactctctttgtgcggcttgttttgttatttggtggcgataaaatttgttgaacctt

SEQ ID NO: 50641 - DNA, 452 bp, Heterodera glycines
cgcgcagataaaggctcagatggcttcggccgcgccgcccctcggcccttctttggggcagcgaggcgtaaacgtggcgaacttctgcaaggagtttaacaatttgacttcgactattcgatttggtacaaatttgcctatgtctatccacgtcaaaccggacagaacttacgaaattgacattagcactccgaccaccgagtggcttctgcaacaagcggcggggatacgacgtaaccggcaggaggaaggagaaatcgtcggaatgatttcggtgaaacacgtatacgaaattgccaaagtcaaatctcaagacaaatctctcattggagtgccgttaaaagaaatttgtcaattggtcattgagagagcggattcgattggcatcaaagtgcaaaatgaagatttagacccggaagaatataggaaattcctggaacatcgtcaggaag

SEQ ID NO: 50642 - DNA, 257 bp, Heterodera glycines
gcagcatttgttgttgtaaataactcacttcagtgattttcttcagaatttcacgaaatcgcatattcaacgcatccgcctttttcttcagtaaactatgccctttttgagcgcctttcagcctcgttttcatcacagtttgagcccttaatgattatttttggtatggatttgttataaagtgtaagcgaaaactcacatccgtgacggaaaaactgcaatccgatctttgccaccaccagacatgtttaaaaaaa

SEQ ID NO: 50643 - DNA, 685 bp, Heterodera glycines
cctcgtgccgaattcggcacgagggtttgagaaaggattttttctttttttattattccggcggcacatcatttctagacaattgcctcaaaatgagtgtttctccgccgattgctttcccttcgccttctcattgccatttttcttccattgaaagaaatttctctccgttttctgtcaattctcagcccgggcttcgctatttgcgccacgccagcggagttgtggtgctgacgttggacaaaagccatgtgttgatgcgggatcagtgcaaaaacattgcccaagtgttgtgggacatgtcgttggcaaagacttcgtcggccaaaagcaatgaaagcaaagggcgaaagagaggcgtggaccgtagcaaattggagccgactggaaagggaaaaaagggtggtcttccgatgtcgccgcagacacgcatttgtatcattcgcgacagtgatggggtggactatgtgattcgtgcaggcattcgcgcaactctgctggaagtgaacgacgaatggttgacaaaggagcccaatttattgcgtacagcagcggataaccaaggattcatcgcaattttgatgccaccaatcagcggaaatggattgcgcaatatgaaaataccaaaggaatttgacgggacagaagggggagaacgacgggacagagaaacggtgtggggcgg

SEQ ID NO: 50644 - DNA, 528 bp, Heterodera glycines
atttcaatcaatttctttactaaatctgacatcgaatctgtaaattttatcaatcatctacccgaaaaactttattttttggaatctgatggacaagtttttcacaatttgaatgatatcgacgacggaaagctcatccaattgcattttcgagcatgtggaggaaaaggagggtttggctcgttgcttcgtagcttccgaattcacaagtcaagcaaccaattgatgtgtcgaaatttgcaagggcgtcgactggccgatgtgagggaagaagaacgattgaagaagtacatagcgaagaaggcagaacgggagaaggaaaagcagaagaaaaaggacgaaaaaattgaacgtcttaaggcgggaggggaaacaaagcaccaatttgaggaccagaaacatttgcggaagcgcgacactctcctggacgaagttgaggatgcggttgaagcaggcatggatgcgcttgaggtgaaagcggcttcatccgaacacgaagtcagcgaaacaattgccgacactgagccg

SEQ ID NO: 50645 - DNA, 295 bp, Heterodera glycines
caaaaacctcgaagaaaactgacccaaaagggggaaaagcggcaccagcgaagaagaaagagggcggaggaggagggaaggccaagaagaagaagtggtcgaagggaaaggtgcgcgacaaactcgccaacatggtcttatttgaccaagccacctatgacaaattgtacaaggaaatcatctccgtcaaatgcgtggtgaagcacggttcccaattggtgtacacacgggccaccaaagcggaggaagcctaagaaaagggggaaacggggcgatttggtttttcctttttttt

SEQ ID NO: 50646 - DNA, 406 bp, Heterodera glycines
aacctttgaaatttaccgctacaaccctgaaaagccggaacaaaaaccctttctccagaaatatgacgtggatttgaatcaatgcgggccgatggttttggacgcactgatcaaaattaaaaatgagatggatccaactttgacttttcgtcgttcttgtcgagaaggaatttgcgggtcgtgcgcaatgaacataggcggcgagaacactttggcatgcatttgcaacatcgaaaagaaaaccaaatattccaccaaaacaggcggcaaacgcataatgatacttttgattagaatatgtattttatgcattagttggtaataaacacatacattgtgattgccacttccatttaatttgtgctaatttttgtaactaaaaaataaaaatggacaccttcaaaaa

SEQ ID NO: 50647 - DNA, 488 bp, Heterodera glycines
  unsure (1)..(488): unsure at all n locations
ttgatataaccattggtggaaaagcagctgggcgtatcgtgatggagctttattcggacattgttccaaaaacggcagaaaattttcgttcgctttgtaccggcgaaaaggggatgggaaagagtggcaaacctctccattacaaagggtctaaattccaccgtgtgattccaaatttcatgttgcagggtggcgacttcactcgcggtaatggtaccggaggggaatcgatctatggcgagaagttcgtggatgagaatntcaaagagaaacacacncagcccgggattctctcgatggccaacgccgggcccaacacaaacgggtcacaattctttgttacgactgtgaagaccgaatggttggacgggtcacacatacgattcgggcgcctcactgatggagtgggatgaggggaagcgtgtgagtgctccagcggtangttgggggcgcggcccagagagattccaatcgttccctgcggtcgg

SEQ ID NO: 50648 - DNA, 421 bp, Heterodera glycines
ttatcgctgctagaatctatcaaacataaaaaatgattgaaattactgtcaatgatcgtctgggcaaaaaagtgcgaattaaatgcaatccgacggacacaattggcgacctgaagaagctggtgtcagcccaaattggaacaaggtgggacaaactcatcctgaagaaatggtacaccacttacaaggaccacatcactttgcaggactacgaaatccacgacggattcaattttgagctatattatcaatgacttgctgcgcgcgtgttcattacttttgtgatttacattacattttcccaataaattgcgctgtgttttagagaattttgagttgttagtttcgaccctaatggttcgaggctaatggcatatttatgcatccttcactaatcaaataaacccaaagaacaaaaaaa

SEQ ID NO: 50649 - DNA, 573 bp, Heterodera glycines
aaccgaatcgaatggaccaaaagtgcttagaattcttgagattgtaaaaaatgcacaacaaaagcatgggcttagacacgaaaattatcgacgttacaggggttattgttcccgtcggatcgaagggattcgaaaatcactgaagtttatgcattcgtataaatgtgcgcctaaaaggacagcaaaattcattgcgcgaaatgtttctgctgagttaatcggagatttaagatttctccaaattgccgtgttcgaagtcgaacgtaattgggcttacgcaatgcaaatgaaatttgagatggtcgatttgccactttctcgcaaaaaatttcacatgagacaaaaattgcgtcgggcagtgaaaagtgctcattttttacattcgcttattaatgacaatccgctggtccatgaggtcactcgtgttgaaactgtttcttacgtgtctttcatcttcggcagtttggaactcgaactgaaaaattggaaacgagccatcgaaacttttgacagagcaagaatcggttactccgaactgcttgaacaagtcccaaacagcgatctcagcgaaac

SEQ ID NO: 50650 - DNA, 583 bp, Heterodera glycines
attttttaaaaatgtcactcactggtgggactgtaattgcgttagcctacaaaggcggagttgcgatggccactgaccgtacagtttttgcatccggtgttcatcgttttcagaacaatacgcgccaatatcggttgaataattattgtctgatttctttctccggagactttgccgaattccaatggttgcaaaatttgctggaacgccgtcagatggaattacagatcgacgcggggatggaccatatgaagccgaagatggtgcacgcttttctcacctcactcttttaccaaagacggagcaaaatgaacccatttctgaacacaatggttgtctgcggcatgcaaccggtcgagtttcatgccggagaaattaagcctttcatcggcgtcatcgacatgcgtggcaatgcctatgaagttgaccatgtcgcgacagaaattggcaaatatttgcttcgccaaatgttggagacgcgacaaacgcaggcaaatggagcggaacaaatgagcaaagaagaagcacttcgaatggtcgcagcggcgttggaggtgtccgtcagtcgtaacagcagaacggg

SEQ ID NO: 50651 - DNA, 368 bp, Heterodera glycines
gggatgtctggtgacaattcggcacttattgcagcggagcaagcggcgtatggcccattttttggctcacttggcgtcactgcggcgatgattttcaccgcggccgggtcggcctatggcacggcaaaatccggtgctcggtctctacggaatgattgtctcactgctgctaagttcctcctgaacaatggaaggaagaaagaaggaaagaatggcacgtctgctgaacattgtgccgaccgtcgtgttttgatgatcaaaatgaccagccaccgtatataatagataaataccgtattttccatccattcttttttactgtgcccccttttctcattttttactattacattttaaaacgtccaaaa

SEQ ID NO: 50652 - DNA, 280 bp, Heterodera glycines
gggcaagccgacgagtgtgaaggacgttgaccaacatgagattgtccagtcggtggccacctttctgaagaagagtggcaagatcaagttgcccgactgggtggacttggtgaagtcgggcaaaaacaaagagttggcaccgatcaatcccgactggtattacgagcgcgtggcatccctcgctctacgtctgtacatccgttcaccagcaggagtcggctaattccgcaacttgtttggtggaataaatattcgtggtgtttcacccaatcactttacc

SEQ ID NO: 50653 - DNA, 490 bp, Heterodera glycines
agagaccaaatcaaaattagaggcagaatttgaaaagcttcgaaatttggaaaaagatcgttcaaaatgcatgaccaacagacggcagttggagagccaactgacagagaattccatggtcaaagaagagttcgatcggttgaaaagcgatgccggcgttttcaagctgattgggcccgtgttggttaagcagaatttggaggaagcgaaacaaaatgtggcgaagagaattgattacattcggacggaaatcgaaagaattgagtcattgctgggcgatttggagaaaaacatcgaagtgcaaaaggaatccgtcgaacgaatgcgcgacactttccgacaaacgctggcggtggccactgccccaacggcgaattcgatcaacgcttaatgagtgaatggacgaggaccgatcagactgattgtgagactgatcacttctttcccaacccgaccaaattgttgttgattgattcgtttgttgatttgt

SEQ ID NO: 50654 - DNA, 399 bp, Heterodera glycines
tgtgactttattcccatcctaatgccaccaacgagtaaaaaaacaggaaaggctgtcgcaaagcggtgccgaaacggaacaaactcgactccttctccatcataaaacacccattgaccaccgaatcggcgatgaagaaaattgaggacacaaacacattggtgttcatcgtggacgtgaaggccaacaaacatcagatcaaaagtgcggtcaacaagccctacaacatcgaagcacagaaggtcaacactttggtcacgcccgatcatacaaagaaggcgtatgttcgtctagccgccgattatgatgctttggacgtggccaacaagattggtattatctgatttgattctgcgctttgtttttttgttttttgcgcataaattgttgctgttaaaa

SEQ ID NO: 50655 - DNA, 315 bp, Heterodera glycines
ggccgagaacatcgaagaaatccttgccgaaatcgacggctcccaaattgaggagtaccaacgcttttttgacttgttcgaccgcggaaagaacggttacataatggccactcaaattgggcaaattatgaacgcaatggttacatttcgcgccccacgctcaaaggactgctgcatgaaattgcacccgatctcagcgacaagggtttggaggcggcggtggacgaaattgacgaggacggcagcggaaagatcgaatttgaggaattttgggaactgatggcgggcgaaacggactaaacgaacgatcagaaa

SEQ ID NO: 50656 - DNA, 624 bp, Heterodera glycines
tggacccccgggctgcaggaattcggcacgagggttcgttatttaggcttttatctattgattggatgaattgttgacttaggtagtttacctattaatttttccacattttttgccatggcttcaattgacttgtcacaagaagttcgcctttatgacaacaatgcggagcgcgatcgaattgacaacatggctgaactgtacgcgatggtcaacgcgttggagtgcctggagaaggtgttcagccgggattatatccacgccaaggagtacacggcggaatgctcaaaactgcttgttcaaatcaaggtggctttgcgattggttcccggcatgacaattgacgagtttttccgctcatattacattcaatgcccggccgcgttggagcgtattcgtgaggaccgacccattacggtgcgcgacgacaaaggaaatgctctcaaatgcattgcggacattgtggagctgttcatcacattcctggaccaattgaagctgaacattcgcgcggtggacgaacttttccccaatctgaacgacctttacgcctccatcaacacaatgagtactttgccggacgatttcgacgccaaactcagggtgaaatcgtggcatgacaag

SEQ ID NO: 50657 - DNA, 395 bp, Heterodera glycines
gagaacgctcatacgaaaagtgaagacgaattgtttcggtttttcggcacagggccagacggactgacagaggaacaagcagacgaattgcgggataaatatggctataatgaaatgcccgcggaggaggggaaaaagctgtgggaattgattctcgagcagttcgatgatctccttgtaaaaattttactcctagccgcaataatttcttttgtccttgccttgtttgaggagcacgatgaccagacgagtgcagtcactgcgtttgtggaacctggtgttattctcccaatagatgcgactcaaccaactgagaattaccaagagtttgacaatctttacttggacatgaacggcattatccatccgtgcacacatccggaagaccgacccgc

SEQ ID NO: 50658 - DNA, 518 bp, Heterodera glycines
taaagattcaacccctgcctaaatagtttttctttttcaccacaaatggcttcttcaacagcttcctcttcctcggcaaccaatgaacaacaaaaaatagtgaatggctttcaaaagcttcgtgaattgcaacaggcgaccatcaacgaattaaacaaaattcaaactgagcagagggaacacacgactgtgcttaagactgtgcagtctcttgaaccgaatcgcaaatgttttcgacaagtgggagacacacttttcgaatttacggcgtcagaattaattgtgctattggaagaaacaattaaaaggttcaaacaaagagtggacgaattggaaaaccaagtggtcaaagttggcgaggacatcaacgcgtacaaagaaaagcacaacatccgttttctgagcaacaaggacgtgatcgaattgcagaagaagcaagctctgtccaaaatttcccagctcgaccttggcccgggtggaaaatcacaataagacggacggaatcagttgctagcaaa

SEQ ID NO: 50659 - DNA, 432 bp, Heterodera glycines
  unsure (1)..(432): unsure at all n locations
aaagcatccggagaaactttaagaaagtacatcgttgttggacgtaaactcccaactgcagatgacccaaatccgacactgcatgaaatggttatttttgccagcaaccacgtcgttgctaagtcccgcttctggtacttcactagcatgttgcgtcgtgttaaaaaaacacacggagaaattattgcatgtgaagaggtcttcgagaaaaagcctggctgcgtgaagaactttggcatttggctccgctacgattctcggactggacaccacaacgtggaccgcgagtatcgcgatgttggtgaagcgggtgctagtacgcantggggtcgcgacgggggcggtcgtcaccaccctcaaacggatggcgtgcanatcatggggagggaagccatcagggtggctcactgcaaccgggccatggtggaacag

SEQ ID NO: 50660 - DNA, 490 bp, Heterodera glycines
ttgttattgtatttcttttccattctcggacaaaggccgaatcggatgaggaaggcgccgctgaccaaaacatttgggccgttttggtcgcggggtccaacggatggtggaattacaggcaccaggcggatgtttgccatgcgtggcatgtgttagtcgaccacggagtgagcccggacagaataacgcaaacggaatgccataacaaagtgatgcacactttcaacaaaatttgttttaatttctcaaagagtccgtacgttatgaaatatgcaaaaacattggccaatttgtgcgagcgaagggcggacacggcacaaatcgtggccattttgaaggaacaatgtgctcaaatggaaaagatggaagttcattagtcaaattaattaccaattgaagagataattggttcattgaaacggacgatgcgatgacgtcatccattcatttatcatttggataatttgttaaataaaataaaggccaacgg

SEQ ID NO: 50661 - DNA, 773 bp, Heterodera glycines
ggaagaaactgagggcaaattattgcaaatccgagaaattttccacgacttgctgatgtccctcgaactgcaagagcacgtgcaatgggccgacatggtacagaaattctgttcccttgccggaatgtttgcgtcgctgcaacaactgatgagaaagccgggccataacaatttcgatgacaatgttaaactgatgaaaatgacacaatttgtgccgaagaatgtttcacttgaactcgacccgaatttgacgcatttaacggagggacgactctcaaactttggccacaatatcgttccgattttgctgagaacgaagctaaagccggaggtggaggaagacgagctgaacatcgaacgcgaccggtcgaagggagacattcccaaacagatcaaaacattgaactcgcacattgacatgctttgtggaaagttggctgatttcacaaaattgcacgtggtggacagacgcgaggcaccaagttattcacaagaagaaactgtaaaattggtcaaagcaatttgtctcggcagaggaatttatccaaaagctccctcttctgctcatcccgggtccgcagatgctggacgaagtacgagcagttctcagaaagcgaaatgattcttagatttttatgtatttttttacattatattgtttttggtggcttaaatttttgatacgaaaaaaaaaaaaaaaaaaaaaaaaaaaaaaaaactcgagggggggcccggtacccaattcgccctatagtgagtcgtattacaattca

SEQ ID NO: 50662 - DNA, 527 bp, Heterodera glycines
gcaaaggaattttcatctcaaggcttgtcgaagggggactggccgaatcgacgggcttactgagtgttggcgacgaagtggttgaagtcaatgggattgaggtgaatggaaaaaagttggaccaagtcgctgatatgatggttgctaatgcacacaatttgattgtcaccataaaaccggctaaccaacgcaattccctgtagcgtaaaggaaaagccgaccaattcgcagttcaaagccaataccatcaatatttcaccggagatggttcttcatcatcagccgttgggaaaattggcactttcggaagcggtggaggaggaaaagtttacccgactgggcacgggtcgtctctgtatcatctgggaacggacagacaccaccaccaccaaatggatgaattttttgatgattacgctgaggatgaagatgaggatgaaatagtggaccacacaaagacagcgttaaaaatccattgaaaattatgcaagtttttctatatataatgacaaataaaaacttaactg

SEQ ID NO: 50663 - DNA, 514 bp, Heterodera glycines
ttctttccaatttcatcactttttctttcccaatgtaattgtaatatcatccttttaatattataatttagcgattgaattcaataccccttcaatttggctatcatgcaaatcttcgtcaaaactctcaccgggaagaccatcactcttgaagtcgaggcgagtgacaccatcgagaacgtgaaagcgaagatccaggacaaggagggcatcccgccggaccagcagcgcctcatcttcgctggtacatcaacttttaaaccgttgcagcatcatttttatacataacccttattttcagggaaacaactcgaggacggacgcaccttggccgactacaacatccagaaggagtccactcttcacctcgtcctgcgccttcgtggagggatgcagatcttcgtcaagacgctcaccgggaagaccatcactcttgaagtcgaggcgagtgacaccatcgagaacgtgaaagcgaagatccaggacaaggagggcatcccgccggaccagcagc

SEQ ID NO: 50664 - DNA, 561 bp, Heterodera glycines
tgcgcccggcttcgatggcatgcaaattttcgtgaagacattgacgggcaaaacgatcactttggaggtggagagctcggacactgtggacaatgtgaagacgaagatccaagacaaggagggcgttccgccggatcagcaacggctgatcttcgccggcaaacagctcgaggacggacgaacgttggccgactacaacatacagaaggagtccacgctccacttggtcctccgtctccggggcggaaatgggaagagaaacacgggtaagaacaagaaaagcaataaaaagcttgatcagaattgatcagcagcgaacgcaccatcacatgattgattggcacagtgattttccaccaccaaattcacaacacttttcccttttccgggttatctttgatttccattttcggttattgttttctgtttttctcctctatcttttgtaaaattctgttattttgatccttagttttatcatttatcatcgcatatatagaagttatcatagtccatatttctgtccctttttatttatttttttgactataaaacttttgg

SEQ ID NO: 50665 - DNA, 492 bp, Heterodera glycines
acatcgccgatcagctgctggcattcagcgacgcgcacatcgctttggtgttgaaccgtcctgagaaaaacgaaaaactgagcgaattggccacggaacactcggagaatgtttcacagtttgacagtttcggtaccggcgacaatgcgcggatacgcgtctgctgggcaaatcgttgtgcgatggcattgtggcatttcaaatgggccaattcgaacgcacattcgacttggtctatccgatccgaacgcaattgtacaaaatcagtgggagcaatgcgcagcgagacattttcacccaaatgcttcttcacgcggcacttcgctgcgcggacaatgagagacggtcaaaagcgactgtcttaattgaggaaaggaacaaaatgaagccgaattcggcggtcattgaacgattgcttcaaaagcataagcaaacagcgcacaacaattgttgaattgacacattttcagcaaattataaaataaatctttt

SEQ ID NO: 50666 - DNA, 1498 bp, Heterodera glycines
gtccaaataagattgaccaatcaaaaaaaaataataatgttgagccgtttctctaaaattattgtccgtggatatgcaaaagatctcaacctgaaggaagtgttggcaaacaaaattcctgaacacaacaaaaaggtggtcgaatttcgtaaggcccatggctctacagttgtgcagaacatcaccgtcgacatgatttacggcggaatgcgttccatgaagggcatggtcactgaaacttcggtgttggacccggaagagggcattcgcttccgtggctactcaatcccggagtgccaacagaagttgccaaaggcagagggtggtgaagagccattgcccgaaggcatttggtggttgttgtgcaccggcgaaattcctgaccagaaacaagtgaacgcgatcagcaaggaatgggcatcgcgtgccgatctgccagcccatgtggcccaactgttggagaatttcccgcccaatttgcatccgatgtcccaattcgtggccgccattgccgcgctgcaaagcgagtccaaatttgccgaagcctactcaaaaggtgtgccgaagagtacctactgggagtatgcgtacgaagactcgatgaacctgctcgccaaactacccaccattgcggcaatgatttacagaaatctctaccgtgatggttcttccgtgggtgtgctcgacccgaacaaggattggtccgctaacttttgccatatgcttggctacaccgaacgcgaattcgtggaactgatgcgtctctatttggtcatccattcggaccacgagggtggcaatgtgtccgcgcacacgtgccatttggtcggctccgcgctgtccgacccgtacctgtcatttgccgcttcgatggccggccttgctggtccattgcatggactggccaaccaggaagtgcttgttttcttgacaaaaatggttgccgacattggacacgagtactcggagcagcaactcaaggaatgggtgtggaaccatctgaagagtggacaggtggtgcccggctatggacacgcggtgctgcgcaaaacggacccccgctacacgtgccaacgcgagtttgcgctcaagcatttgccggacgacccgatgttcaagctggtgtccacactgtacaaggtcacgcccgacattctgctggagcaaggcaaagcgaagaacccgtggccaaatgtggacgcacactctggcgttttgctacaacactacggcatgcatgagatgagctactacacggtgctgttcggtgtcagtcgggcactcggctgtctctcccagctgatctgggcgcgtggcatgggccttccgttggagcggcccaaatcgcacagcacggacggactgatcaaattggcggcggcggcgacagcagcgaaataaatattttagaccaaaacaaaaagagaatagaaccaaaccccaattattattattattagatgtattatggttgttaaagtgtgtgtaacttgtgaac

SEQ ID NO: 50667 - DNA, 314 bp, Heterodera glycines
agacatggagattctctgggatgaaaaaatggcacgtgaactgggagataaggcacttaaagatacaattcgacaacgaggatgtcgaattcaaacctttgtcagcggactgcaaggttgttcatgagttcataggcggctacatttttctctcaatgcggagtaaaggccaaaaccaaacactggacgaggaagggttccatcgcctgactggaggatggggatagaaaattttatttgtaaaccacaaccgccatttcaatttgtcatagtttctcacatttaaacaaaataaaagcgacaatatgcaaaaa

SEQ ID NO: 50668 - DNA, 545 bp, Heterodera glycines
accatgattacgccaagctctaatacttctcactatagggaaagctggtacgcctttcggtaccgggccggaattcccgggtcgacatcatcatcatggccgctaatacgactcactataggggaaaaagcaaaaggagcaaggcctggggaattggagaaccccagcatcttccagaaaatcattcttctcaacaaagagattattatcatggaagagaatttctgttgctttgtgttcggatggattaacatttaccttttcttccacacggcttttcgttataaatttgaaaagtacgtatacaaagttacccgtgaacgatttggcaaaatgaaggcttacattgacaatgaattgaaggaagccatcgagttccgcaagacttcaaaggagcaggccgactcgttgaaagcagtgcatgaaaactttcccacaattttccaagagaatttggcgctgcaacttgaagcgacctaccgaaaaaatgtggactacgcctggcaagagatgaagcgtcggttggattacctgcaggaagtgca

SEQ ID NO: 50669 - DNA, 523 bp, Heterodera glycines
aattcgaatttacaataataaaatttttggtttagaattaaaatgctgtccaaatttgcaccaattgtggtcagtcgaacggtttccagcggtgtccgtcgtttgtccgccctttgcagcatttgctctgtacgctcgcgctccactcgcactaatcgacccccttaactcatgtaatggtggccctggcccggcatgaaaaagaattgcgtggacgctttgccgctttcgctgatcagcaccgtcgaactgactgacagttggttggttttgcgtcgactttgcttgttgatgaagtccaacacccattgaatggttatcgtcctactatgaacgcactggtcttcgttgctcagttccaatgttgacacatatttccgacgcaaaaccgaggcaccaaccgtcgacaatttgcgtccatagttgaacaaaacaccgacacacatcaatccggcaccgccggtgaacaacggatttgaggtgaacgcgtcgaaaaggcccccttttggggcatttgcgagtg

SEQ ID NO: 50670 - DNA, 542 bp, Heterodera glycines
acctgattacgccagctctaatacgtcaactatagggaaagctggacgcctgtgctaccggggcggaattcccgggtcgacatcatcatcatcatcatggccgctaatacgactcactataggggtttccaggaggtaatttctccgaatatttataacgcaaagctgtgggagcagtccgggcattggcaccattatgcggagaatatgttccggttcgaaattgagaaggagcagttcggactgaagccgatgaactgtcctggacactgtctgatgttcgactacaaaccgcacgcctacaacgaattacccatccgttatgccgacttcggtgtactccaccgcaacgaaatgagcggcgctttgtccggtctgacgcgcgtccgtcgctttcagcaggacgacgcccatattttttgccggaaggaccaaatattgtcggagatttcgggctgtttggattttctgaattttgtctacgtggaagtgttcggcttttccttccgtctccatctgagcacgcggcctgaagagggcta

SEQ ID NO: 50671 - DNA, 425 bp, Heterodera glycines
tttattcacacataattcaatgttggaagttgttctggaatatttgccatcgtggattcgcactcttaattcgttcatcgattatgagggtcagcgtaagtctgaacgtttttttccaggttattttgattgtccacggtgtgcttgggttttttgctggttatctcactcaacagctgtcggtgactatgtacagcgtcggagttggatttctgatctcttgtctgattgtgcttcccccttggccgttttaccgtcagaaccctttgaattggcaaccaaatagtccggtagaggaagacaaagctgcgaatccgtcatcatcatccggcaataagaattcaaaaaagactcgttgagtgtgatcataattcgatacggtttccttgtacactttcttattgttgataaaccgcttctgttgc

SEQ ID NO: 50672 - DNA, 435 bp, Heterodera glycines
tctgacattaattttggaccctaaatttgtgaaataatttgcttattctcaaaattaccatccaaattgcttattgcatttaatacattgtcaaagcgaggccatgaagcgagtgtgtgtcgggatttggaattgttccaagtgtcacaagaaagtggccggcggcgcctacgtgtacgccaccaccaccgcggcaacagtgcgaagcaccatccgccgtctgcgcgagaccaaagagtgatttgccgaatcccaacggcggagaacaatggtggtgacgacgacttttgcaccccactgccactgttttttgttgttatgtgttgtttttgaatgaaaatgggaattgtttttgctttttgacatttcaacatttaaattatataggtagaagcaatatttccctgggctatcaaatttagcttatcttttgaa

SEQ ID NO: 50673 - DNA, 534 bp, Heterodera glycines
tccgggggcggcgctctagactagtggacccccgggctgcagattcggccgagggtctccatcgacgaaatgattcagtccggtctctgccgactcacccccgacgaattgtgggccgtctgtcagccggaggttggcttaggcagggaaaagatcactctgcgcaaaggcgacggactcaacctgtacatgaacagagatttggcttccatttatgcgcgacatcgtctttacaacgcggacaaatattactatttggtggactatggccagaccaatcactttaaccaattgcgacttttgctgcgcatccgtggcgacgacgacttggcggaccgaatggaacacgtctctttcggtcgcatcatcggcctgtccacgcgcaatggcaaaaacgactcggtggactttctgattgaccagggcgcgcgcgaggcggatgcgtatgtgcacgcgtcgccgacgatgcgcgcggagccggccgaattgggcacaatttgccgacggttggccgagtcgacgctgctctttgag

SEQ ID NO: 50674 - DNA, 454 bp, Heterodera glycines
tccccctaaacaaaggcaaaagccaaacagatcaacaaataaacacgtcagattagggtcgattcggaatggcacaatatgtgccgtggtattacaaacgctcaccgcccattttttgtggcgtttgtgtgcccgtttatttgggcgtttggtccgttcgtaagttcatcgttgtgcttggctttctgctctttctgatcggcgttctgctactgctcggtcttctgctcatttgcgtggccatcgaatgttccgctgcgtttgtcccccttcttttcttcgtttatttgtttttcttttcagtgccggtgctttacttccgttcgccttagtgcttatcattgctgggctactacttttgcactgcggatgggctgctcatcttttggacgttggcgagggaatgccgtacggtgaatattcgacgacaaaaacggtgagcacttcggccaga

SEQ ID NO: 50675 - DNA, 557 bp, Heterodera glycines
atgctgacgtgttacgaaatacaaaaaagaggaggatgtgctgtgttacactttgcacctgtatcagcgatcaatgatgtgcgaagcaccacccagctcgacaagcgttgtttaaatgcaaaatggccggtatcgcagcaggaagactgacggaggagcggaaagcctggcgcaaagaccatccattcggtttcatcgcacgacagtgcaaaaaggaggacggcacattggacctgtacaattggatctgtgccattcccgggcccaagtcgaccatttgggaaggtggtctgtacaaattgcgcatgatcttcaaggacgacttcccatccacgccgccaaaatgccgttttgagccgcctctcttccacccgaatgtttatccgtccgggacggtctgcttgagtctgttagacgagaacaaagactggaaaccgtccatcactgtgaagcagttgctgctcggcatccaggaactgctggtgtctccccacccggaggacccggcacaggcggaagcgtaccaaatttatgtgcaaaatcggcccgagtatgag

SEQ ID NO: 50676 - DNA, 572 bp, Heterodera glycines
ttcaagaagggctttataccatcacacaacttggacaatcacttgcgcagctgcctctcactccttcttttgcgaaggtcgtcatcagttcaattcgtggcggacttcttccttttgccgtcactttggtgtcggctctctccgttcgtgaaccattattgttcatttcaagcacaaaagaggacggaacggaagagagacgaaaaagaatgtccgaagtgattaagcaaagatttctttggtgtgctgttggggaggctcgactctttggtgatttgacagtaattctgaacactgttggtgctgctgactatgaggaagagaacgctcgcgcaatcgaagccctaggacttcgccctaaggccctaaaggaaatcaacaaacagagacatcagctgacgcttcttctgaacaaatccgattctgtggagaagttgcccgagaagttcagaatggatgcaccctcccaagaacaactgaggagattaaggcatataatggtgaaatgccatccggataaattggcaaagaaagttcagtcattggatgcaccaaagggcgcatataaaaca

SEQ ID NO: 50677 - DNA, 543 bp, Heterodera glycines
accatgattacgccaagctctaatactcatcactatagggaaagctggtacgcctttcggtaccgggccggaattcccgggtcgacatcatcatcatggccgctaatacgactcactataggggagaaatgcagtttcttcttttggattaaactacctaggtatccaacaaaaaaacattttagtccgcttttaaaaaaattaattgaacccctaatcttattagtcacagaaatattgcaagaatggctccaaaagagaaagaggttggaaagggatggagctttgctcattttttttggcatctaattaaaaaggaaacacgcaatgagaaggagagacacattttggcaaacggacgattggcactttcgtttttggcagttgcttttgccggatttgcccttctgtacgactacttttttccatttccaaagtcaaaaattattcttgcggtttgctccattagctatttcgtcatgattatggtcctccaggcgtaccaatggtacgttgagaagctgacattctttcaagcggagg

SEQ ID NO: 50678 - DNA, 537 bp, Heterodera glycines
cctgattacgccagctctatttcttcactatagggaaagctggtacgcttccacggtaccggtccggaattcccgggtcgacatcatcatcatcatggccgctattacccctcactataggggggcattgatcagatgattatggtcggacattctttcggtggctatttggcctcgtcctatgcccttgagcatccgtcgcgggtgcgacatttggtgctggtcgacccttggggtttccctgaaaggccacaaattgaacaattgcacatcccaatttggatgcgtgtcttcggcagattgctctctctgttcaaccctttggccactttgcgtgcggctgggccttttggcgctcggctggtgaaaaaattgcgttccgaccttgggattcgctatgctcaccaggacccggacgccatttacgaatacatttaccaatgcaatgcgatggaacccacgggcgaaattgcatttggaacaatgtccaagaattttgggtgggctaagcgaccgatgattaatcgtttcggtggg

SEQ ID NO: 50679 - DNA, 694 bp, Heterodera glycines
gacagcaacaaaatgggctgggaaaaagcttaaacggagtggtgactaacaaaagcgcaaaaagtttgacggagggcaaaatggcgctactcgaagaaggaaagacggaacagaatggagacgaaccatcgacaaaagtgaaaatggcggaaaatggaggcggaggaggggcagaggtggcccaaaacaaatttggttcctcttcaattcgcccggcttcatctgtgctcagtttcttccgttcctcaaaaccggaggatccgtacgcctcgaaactgttcacttttctgcaggtgctcacagcctgtttttccggatttgcacacggtggaaacgatgtcagcaatgccattgctccgctcgtgtcactgtacaccatttacgatgaaggcagtgtccatcagaagggcgagacttccgtatatttgctgctttacggtgctgccggaatgtgcgttgggctttggctgctcggccaccgagtgatctacacggtcggcgaaaatctgaccaggataactcctcccagcggcttttccatcgaatttggcgccgctctcacagttcttttcgccagcaaattgggtctaccgataagttccactcagtgcaaggttgggagtgtggtggccgtcggactggtccaagcacatccggtggtccattggactgtgttcaggaatatctctctctc

SEQ ID NO: 50680 - DNA, 346 bp, Heterodera glycines
ggagaattgcgaatgtcgtcgattcttttaattatttttggttttaaaatgctctcaatccctaattaacggatgtgatttgagttatgtatttaaaagccgtaaaaatgttcagaaatttaccgcaaaatcatcagagagagaatgtccgccggtcgtgccaacattggcaaaccggcgccgaatttcagcgtctaagcggcggcggactttgactttaaaacggtgtcgttggacgactataaaggcaaatatgtggtgctgttcttttacccggaggatttgtgggttttttaaataattaattaaaaaataaatttattttttaaatttttggccatttttc

SEQ ID NO: 50681 - DNA, 482 bp, Heterodera glycines
atttaattctccacagtcaaacaaccaatctgcaaaaatgtccggacgcggaaagggaggaaagggacttggaaagggaggcgcgaagcgccatcgtaaagtgctccgtgacaacatccaaggcatcaccaagccggccattcgccgtttggctcgtcgtggaggcgtcaagcgcatctccggcctgatctacgaggagactcgctcagtgctgaaggtgttcttggagaatgtgatccgtgacgcggtgacgtactgcgagcacgcgaagaggaagactgtcaccgccatggacgttgtctacgcgctgaaacgccaaggccgcacgttgtacggatttggcggttgagcgggacgggaagaacggaggaggagaggaatcatcaaacaaaactatcccaaacggccctctttagggccacaaccattcaaatggacggatatgctttatcaacttattttaacgataaatttgatctttt

SEQ ID NO: 50682 - DNA, 603 bp, Heterodera glycines
ccatgattacgccaagctctaataccactcactatagggaaagctggtacgcctgcagagaaccggtccggaattcccgggtcgacatcatcatcatcatggccgctattacgactcaatatagggaggaaatcgccaaaaaagcaaaaaaggctcccaaacaatgatgaaaaagagggaaagaaaggaaaaggaggaggtggttttctctcagccggttgtttgggtgaaacagaaaaaacgtaattttttgtgtaaaattatgggatcgccgggtcgacggtggtacagaattttggccatttctaatttgaatccgtctccatttttcagtcgttctcgctcgcgtgatttgccctcctcacgcggtggtggtggcggcggcggttactacggctcgcgtcgtttccatgacggacgcgacaacccaaatccgaacccatgcttgggcgtgtttggcatgagtttgcataccacggagcgcgacctgaagcatttgtttggccgttatggcgaggttgattcggtgcaaattgtgtacgaccgtctctcgggacgctcgcggggctttggctttgtctacttcacacacaccaaagacgc

SEQ ID NO: 50683 - DNA, 460 bp, Heterodera glycines
cttcgattatttcactaaacaccccaaggacatgccccctctccgcgactatttgccccgtccgacgtgggtaaaacatggcaatgaatttccgttgcgacagcttttaccaggacattatgatgatcccgagtggcaccccaaagaccgcggttacgccggttcaccgcgttttggcgacaaaatacccgaagacatcatgatatatcgtagaagtcccaccgaagaagaagtgccatttctccacaaggcaatgcacaaattgatgtccatggtattttggtattgggttttctacacaatctattggcatcatcaagagcagtttacgggtgaatggtacttcccgtaccattacgaatggacggacgaggagctcggcgttccgcccgacgacgcgcctgacccggaggaacgccaattctggggccatccgggcgaactgatcggcacttaccgc

SEQ ID NO: 50684 - DNA, 384 bp, Heterodera glycines
  unsure (1)..(384): unsure at all n locations
cgtggccagcgtgttcggcctcggcttccccccgttttggggcggtccgttccgtttcgtcgatttgtacggggcgcaaaagttgatcaagcacatggagcgctacgggaacatttactcggccgtgcaattcaaaccgtgccaactgctgtctgactacgccaaagcgggccgcaaattctacccaaaatgagcgtccgaagttggaactgtgacaacaaaagaattgggatgaatgagttcgttaaatgatcgatgatatatgctgccttttatttcaatgtttatagcgcaggacagatcagaaatttgtatttaataattatttcattagatcatttctggcgttttgacaccaaataaatttttcggtcctcaaaaaan

SEQ ID NO: 50685 - DNA, 399 bp, Heterodera glycines
gttttctgtctgctttccattaaactaaactgtgctaaatatgtccggacgaggaaagggaggcaaaggactcgggaagggaggcgcaaagcgccaccgaaaagtgctccgtgacaacatccagggcatcaccaagccggccatccgccgtttggctcgtcgtgggggcgtcaagtgcatttccggcctgatctacgaggagactcgctcagtgctgaaggtgttcttggagaatgtcatccgtgacgcggttacttactgcgggcacgcgaagcggaagacagtcactgcgatggatgtcgtttacgcgctgaaacgtcagggccgaactttgtacggttttggtggctgagcagaacggtgacggaagagaacttcaaccaaaaacaatcccaaacg

SEQ ID NO: 50686 - DNA, 796 bp, Heterodera glycines
cttcctgcaccggcttgtgcccttccgaaattcgttatttcctttcttttcgacctctgtttcgtcatttccgtcgtttctcttctgcccaaagtgcaggaacgaatgcccaattcggggctcatccaggccagtatgatgtcactgtacgtttgttacctgacttggagtgcgctcatcaataacccggacaaggagtgcaacccgtcgcttattcctcggcacaattccaccggcgacgcgggagggaatgtccaagtgatcaccacttcgctgcccgtcaattcgctcgtctctttggtcatttggttttgttgccttctctacgcttccattcgcacttcttcatacacggcactgggcaaaattggtggggcgatcagtgaaggaaatgccgaaggtcaggacatccctctgagcgaagcttcaatgtccgtcgaggagggcgaccgtgggacgacggggcgcaatgtttacgacaacgaaaaggggtccgtggcctattcctactcgttcttccacttcatttttgcgcttgcttctctctatgtgatgatgaccctcacttcgtggtacaccccgagcgatgatttgcgctatttgaacgacaacatggcatctctttgggtgcgcgtcatctcttcttggctttgcgctgcgctttacctttggactttgctggcgcccgtccttttccccgacagggatttcaattgatcaccaaacaaatgaaaatcggattcgaattctccaccttgtatcaaatataactttattataaatcacatttacaaaa

SEQ ID NO: 50687 - DNA, 433 bp, Heterodera glycines
tttttaaaatttttaccagattaattctacagataaatgacaagtattcgaggtttgttgttcacgctcgcttctcccttgaaggcattttatgcaaatgtggcagtgaaacaaattgatgttacagggatgtccagcagtgttggaattcttcctacccatgtgcctacaattgcagtcttaaagcccggagttgtcaaagtccacgaacttgatggttgttccaaatattgtggaatcgttcaacattattcgaatttgtatcttgtgattgattttcaatgttttaggaaacgtctccaagtttttcgcttcttctggtaccctttcaatgaatattgacggctcgtgtcaagtgctcgctgaggaactttgttctcttagcgaactcaacgaacaggccatcaaaaatttgattgatgtcagccaaaag

SEQ ID NO: 50688 - DNA, 335 bp, Heterodera glycines
  unsure (1)..(335): unsure at all n locations
accacggccaaaccgattcaagaattgctagggaacttattgaacaatttcagcctttcatttcatttcgtattcattaattagccgataaaaatgtgcgacgaagaagttgctgctctcgtggtggacaatgggtccggaatgtgcaaggccggtttcgcgggcgatgacgcgccccgcgcggtgtttccgtccattgtgggccgcccccgtcatcagggcgtcatggtcggcatgggacagaaggactcgtacgtaggactgcacttttgccgtcgtcactccccgaaaaatagtttcattttttgcgaaaataaaggctcaaattgttaaan

SEQ ID NO: 50689 - DNA, 404 bp, Heterodera glycines
agccgaagacaaattcatcgtggatgaagtcaaatcaaatgaatgggtcaaggtcaactccaacttctcttcgttttttcgcgtccaatactcaccgaacatgctgcagtctttgctggatggtgtgaaaaaccgcgaactcggagtgttggaccgttaccaactcgccagtgacctctacgcccttgtaaaatcttctcgcgtatccgtttcacactttctcgcgttgctcactgtttgccaggaggaggaggattactttgtgtggtctgcaattgactcgggcattggcagcatcgctcattcactgaaacatttggacgacgaacgcaagctgttggaccgtttcgagcgttttgtgtgcaaaatgattgaatccgtcgctgccaaattgggctgggaac

SEQ ID NO: 50690 - DNA, 399 bp, Heterodera glycines
cgttgtcttcagtttattgagatggatgccggcttttacagagggacctcttcagagcaggacatccgtctcactgacaaggaacgcaaattgttaaggcaaatgaagttcgaaaatgtgcttgaaacaaaggtcgacttggcaaagataaatcttgatgttatcaagccgtggataacgcttaaactgaacgaaattctcgggatggaagacgacgtggtggtggaatatgtgttcacgcagcttgaggagaaggagctgaacccgaagaaaatgcaaatcaacctcaccgggtttctgaatgcgcgcagagctcgcgaatttatggtattttttcatctcttggatcaccttttgtcattttaggcagaaatgtggcaaatgtttgtcgaagcccaa

SEQ ID NO: 50691 - DNA, 517 bp, Heterodera glycines
ttttaaaattattttctaatcattaatatttaattcctaattatgttttatcaaacggtgtgccttcttttgctgttgagcgcatcgaatgatgttgcggtttttggacaggaagaaacaaccacaacatcgactagtagtacaagtacgagcacaactagttcaaccagtacatcgaccacaccaactacaacatcttcaaccagtacatcaactacaccgagcacaacaacttcttcaaccagcacatctacatcaactacgccaactacaacttcgtcgactagtacatcaaccaccccgacaacaacttcttcaaccagtacatcgaccactcccactacaacttcttcaaccagtacttcagccacacccactacaacttcttcaactagtacatcgaccacgcccactactacttcttcaaccagtacatcgaccattcccactactacttcatcaaccagtacatcgaccactcccactactactacttcaaccagtacatcaaccacac

SEQ ID NO: 50692 - DNA, 543 bp, Heterodera glycines
ttttaaaattattttctaatcattaatatttaattcctaattatgttttatcaaacggtgtgccttcttttgctgttgagcgcatcgaatgatgttgcggtttttggacaggaagaaacaaccacaacatcgactagtagtacaagtacgagcacaactagttcaaccagtacatcgaccacaccaactacaacatcttcaaccagtacatcaactacaccgagcacaacaacttcttcaaccagcacatctacatcaactacgccaactacaacttcgtcgactagtacatcaactaccccgacaacaacttcttcaaccagtacatcgacgactcccactacaacatcttcaaccagtacatcaactacaccgagcacaacaacttcttcaaccagcacatctacatcaactacgccaactacaacttcgtcgactagtacatcaactaccccgacaacaacttcttcaaccagtacatcgaccactcccactacaacttcttcaaccagtacttcaaccacacccactacaacttcttca

SEQ ID NO: 50693 - DNA, 394 bp, Heterodera glycines
tttcgttgtcttcagtttattgagatagatgccggcttttacagagggacctcttcagagcaggacatccgtttcactgacaaggaacgcaaattgttaaggcaaatgaagttcgaaaatgtgcttgaaacaaaggtcgacttggcaaagataaatcttgatgttatcaagccgtggataacgcttaaactgaacgaaattctcgggatggaagacgacgtggtggtggaatatgtgttcacgcagcttgaggagaaggagctgaacccgaagaaaatgcaaatcaacctcaccgggtttctgaatgcgcgcagagctcgcgaatttatggcagaaatgtggcaaatgtttgtcgaagcccaagacagccccgaagggattccaacgagtttag

SEQ ID NO: 50694 - DNA, 559 bp, Heterodera glycines
ttggtcgttttaagatttggcaatcggttcatttcgcgctcgtggagccgtgacgacatcgcttcggtgaccatttcgttcaaggagaacttcggcacccaaggccggggaggctattttgacaaaagcggcatcatccgggacgtcatgcagaaccatctgatgcaaattctcacattggtggccatggaaaagccggccacactgagcgcagaagactttcgcaacgagaaggtcaaagtgttgaaagtgatcaaaccggtggaattggaccagacggtgctcggccaatacattggcaacccactgggaaaggacgatgactcgcgcaagggctatttggacgacccgacggtgccgcgtggctccaccacgccaacctttgccaccgccgtgctgtttgtgcacaacgaacgctgggagggcgtgccgttctttctccgctgtggcaaggccctcaatgaacggaaggcggaggtgcgcatccaatacaaggacgtgtccggtgacatttttcccggaggattcgctgaagcgcaacgaactggtcatccgggta

SEQ ID NO: 50695 - DNA, 515 bp, Heterodera glycines
acctgattacgccagctctatactctcactatagggaaagctggtacgccttacgaaccggggcggaattcccgggtcgacatcatcatcatggccgctaatacgactcactataggggacacttttttcagcataatggaagtagaaaacgtaaagcttttcaaccgctggtcttatgaaaccattgaagtcaaggatgtttctttgcaagattatatttcagtaactcaacacccagtttatcttccacacactgctggacgttaccaagttaaaagattccgcaaatctcagtgcccaatcgtagaacgtctcgcatgttcccttatgatgcacggacgtaacaacggtaagaaattgatggctgttcgtattgtcaagcacgctttcgaaattatcaaccttttgactgacttgaacccaatccaagttttggttgacgcagttcaaaacactggacctcgtgaagactccaccagaatcggttcacaaggtaccgtccgtcgtcaagctg

SEQ ID NO: 50696 - DNA, 474 bp, Heterodera glycines
gttattttattatattcgtttatactcctcgaaatttaacgcaattacacagctaaataccgctttaaaccatggcaaatccttcgattaacgctaaggcggcagttttggtggacaatccgcgggttgaatttgtgcaactcgactcattggtggtcatgaaaattgtgaagcacggggacatcgaattctatgccggaatgtccaaaattgctggcgaaacgtgccaaggcattctcaccggactgatctccgtcgaggacaagcggcttgaagtcacttgcgacgacagttggtctcctgaacagaccaaattggctggggtcaactttgccaatttcttcgaagaattgccaattgttgtgaagaacagccatctgatgaacgttctgttggccgagttggcactttccaccaaatgccaacgcgccgcttccatccgactcgaattgggcaccaaacagtcgctggaga

SEQ ID NO: 50697 - DNA, 435 bp, Heterodera glycines
tgacatttacaatggttgaaccaaaaattccaacaacaagcgattttaacgaagaaaaccctgtaaaatcgacgccagaatcacattcgttaatcaagaatggattttttatgagtgaagaatatgggatgacaacgaaaagtgtctacacttcacaaatttcacaatctgtgataaaagctggactttattctaagaaaaatctgggagtgcatgtttctgcggcgggtagtctggaaaatgctatttggaatgcaattgaaatgggttgtcgttcatttgcgttgtttgtccggaatcagcgtcgttggaatgcaaagcctatggatgagtcagttgttgagcggtggaattgtgcaattaaaaagacaaaattcccgttgcaccaaatcgtcccacatggctcgtatttgctgaatgccgggtcacccgacc

SEQ ID NO: 50698 - DNA, 434 bp, Heterodera glycines
agtggcaaaacggcgattaacatgtacatcaattgtccaggtggcagtgtgacggctggcctcggcatttacgacacaatgcagcacatttcggcccctgtcgccacttggtgttaggcatttttaatttggagtggtggaattcagaaaaaagggatttatttcaccccaggcattggccaggcgagttcaatgggcagtcttttgttgacggtcggtgccaagggaatgcgcacttcgctgcccaatgctcgcattatggtccatcagccgagcggtggcgcttacggcacggcggcggacattgtgatcagagcggaggagatcaaccgaatgcgaaaacggctcaacgaaatctatgccatgcacacgggccaaacggtggaaactattgaccaggcattggacagggatcgtttcatgagcgcactgga

SEQ ID NO: 50699 - DNA, 580 bp, Heterodera glycines
gtgcattctctgcctctctgctgttctttgtgcttcattcacacaaacattttcgctctcttcaaaatgtctggacgtggaaagggtggcaaagcgaagaccggaggaaaggccaagtcgcgctcttcccgtgcggggctccaattccccgttgggcgtcttcatcgtctgctgcgcaaaggtcactacgccgagcgtgtgggggctggcgcgcccgtctatctggcagcggtgcttgagtacctcgcggcggaggtgctcgaattggccggcaacgcctccagggacaacaagaagacacggatcaacccgcgccatctgcagttggcggtgcgcaacgatgaggagttgaacaagcttctctcgggcgtcaccattgcccagggcggtgtgctgccgaacatccaagcagttctcctgcccaagaagacccatggcgaaagtcagtgagcgcaggacggtggtggaacggcattgaagaaaaaactatcccaaacggccctctttagggccacaatcatgcaattgaacggattggctaatttttgatttttaacatttaaataaatttgctcctttc

SEQ ID NO: 50700 - DNA, 457 bp, Heterodera glycines
tgctatttatgagtctgcatttaactaaaacttaaccaaacagaaaaaatgttcgtaaaaacattttcgaataaaaccgttgttttcaatgtggacccgactgaactgtccgtcgagcaactgaaggcactgatcgctgaggaggaggaaattgctgtgccggaccaaagacttgtctttgctggttgccagcttgtggatggaactctgctcaggacttatggagttgatgctgattcaaccatccaccttgacctcagattgcttggtggtgggaaaaagcgtaagaagaagcaatacactggcccgaagaagcagaagcatgttcgcaagaaggtcaaactcgccgtgttgaaactttacaaggttgttagacattacaattgggagaaaaggtaaaattttgaagattgatgacaatggaaagattcatcgacagcgtttggaatgcaattcg

SEQ ID NO: 50701 - DNA, 360 bp, Heterodera glycines
  unsure (1)..(360): unsure at all n locations
tccctttttcggtttatttttgtcactttatttgtccccaaaagcagaaaatgccgcgccaagtgctcgaattgtccgattacttcgctccattagctgccttaattatgttcgctttggccatcctcgtcttctctttcttcgtgatcaatttcttttacatcaccgatcgggacgacttgacagtgtttgagaaatttggtgcccatttgcacctctgtttgggcccccattcgatgtccgacatttaccgagggggaccacgggattatccgcagccccaaggaacggacaaggagatgaacagctgaaaagtcaaactatctgattaaataaacgattgtcaatacgctaaaannt

SEQ ID NO: 50702 - DNA, 437 bp, Heterodera glycines
tctttagaatgggaaagccgaagggaattagaaccgcaagaaaactgaaaaaacatcgtcaggagcagcgctggaatgacaagcgttacaaaaaaaccaatcttggaactcgttggaaagccgatcctttcggcggagcctgtatagccaaaggaattgttctcgagaaaattggcgtcgaagcgaaacagccaaattctgcgattcgaaaatgtgtccgtgtgcaacttatcaaaaatagcaaaaagatcactgcttttgttccaaacgacgggtgcttgaattttatcgaggaaaacgacgaagtgcttgtgtctgggttcggacgaagtggacatgccggtggagacattcctggagttcgtttcaaagtagtcaaagttgccaacacgtcattgctcgcactgttccgtgggaagaaagagagacctcgttca

SEQ ID NO: 50703 - DNA, 525 bp, Heterodera glycines
  unsure (1)..(525): unsure at all n locations
gcggggnggcgctctaaactagtggatcccccgggctgcaggaattcggcacgagggtcctttagggacaactgaactcctatttcttctcgccggaagactttcgtcgtccgtttgtgctcagcccgtgctgatggagaaggaggaggagggtgaaaagtcgatgaacgacctggtgaccgcttcgtccccaacagaagttcgtcctgcttctcctcccgcttcttcctccgtctccgttccgccatcagcagctggtgttcccccgtctctctatgtgcgtcttcctcagcccgacgaccctttctatttttgcgccctcgccgttggcctcgccgcagttccgcccattacttttggcatttccgggccgcctcttcacgtttttgtgcaggccgacggcgtaactgatgcaccgaaggtggagttggaagacaaacagttgtgggaggaatttcacaaatttggcaacgaaatgatcatcacgacgagcggaaggcgaattttcccctcaatgagtgtcaa

SEQ ID NO: 50704 - DNA, 450 bp, Heterodera glycines
gtccatagtcagcacatcattggaatggcgccggaaagtttggcttaaccagggaagaagggagctaaacgagcaactcaaatggaaatcgttgacaatggggagggaacggagaaggaatgctcagctaatgcggatttgaacgcttcacaagttgaccaatccgagctgacgagaatggacggagaagaaactcagctgttgcaccagccattcatgctcaatcctgaacagactgtcaacgaatatttggaagcacatggggcaaatattgcggatttcttgcgcattgagatgggccaagaaaacaccaagacaaatgacagttctgttcactgctagtatcgaaattactaaaaagtcgctgaaactgatgaatgtcgtatcgccctcacaatttcaatgttgtgcaattcaaatttaagaaattataaaattcgtcacacggtc

SEQ ID NO: 50705 - DNA, 480 bp, Heterodera glycines
ttacagagacgagggtccatttaagctttacatcccgctgatcactttcggccctttttcatctgtccatcgccaaattggccccaatttggccatcatttttctccggcactttgtgccaatgttcgccgtgttcgcttttgtgctcttttggcacggtctctcccccaattatttctgttgggtttctctcagtgcaaccgcacttatcgctgaacgcattggacactcactgcccaaatggcacacaatttggccatatttgttcagaggcgactttcgtccgacttaaagccgcttctatgcttttcactgtgataccaggcatttttggcattttctttttcctcggcctcaacggcgtcggcgccttcgttttccgttctctccttttggacggtctctcgcaaattttgtccctccgaattttctcttcaaattcggctggctttgtgctgctccatttttttctgctcggct

SEQ ID NO: 50706 - DNA, 484 bp, Heterodera glycines
cttaaagcgaaaaatgtttgaagctaaatttacaaatgccgcccttctgaagaaaattgtggaagcgatcaaagagttggtcagcgaagcgccatttgactgtacagaaaattctatgtgtctacaggcaatggatgggtctcacgtggcactgatttccctcaaattggacattggccttttcgaagtgttccgatgcgaccgcaccattgcacttggactgagtatgggcgagctcagcaaagtgctcaaatgttccaaatcggaggacactttgatgattcgctttgaggacagtgagcaggacatggtcacgttcacttttgaggacaccaaaggacggaagcaggacatcacactgaaactgatggacattgacaacgaacacttgggcatcccggaccaaaaatacgctgccgtggtcgaaatgccgtccaccgagttccaaaaagtgtgccgtgacattgcctccttctccgactcg

SEQ ID NO: 50707 - DNA, 480 bp, Heterodera glycines
gtcctattaagcagtttttgtttccttacctcattgacaattttttcttcattttgtgctgttttcatcatgagtgacgacaactgctgcggctctgttggtgcccgttctccgactggctccatctcatcaagcggttccgctgattatgacgttgccctttcgccaacccaattgcttgcaatggccatcaagaaacgtcgtcacttgctcgaggacaagcagcgcgactaccaacgggagctgctccactcgcacctcatccagaacttgtgtaagttcctcggtgaaggtcgagcgcgagtgaggcgacaccgccgcagttcatcgcggcgtaagttggtgagacatcgtcgttgggacgacgacacgagtggaaacggtgacgagaggggccagcaagtggtccctgacgatagccgatcgccttcctcttcccccaatccatcggggattgtgtttgagtcgacggttcagagc

SEQ ID NO: 50708 - DNA, 422 bp, Heterodera glycines
  unsure (1)..(422): unsure at all n locations
gcgcatgtgcgaccgtttgacccaaatccaagaccttgtcaacgatttggccaaccacatgtgcaattcggtcggtgttctgcaggcgagtgccgggccgtgcgaatttgggacagctccggagacactttacaaaatcgccaacaaggtcaaaaacttcgccgtcatttacttggtggacatcagtgaggtgcccgacttcaacaaaatgtatgagttgtacgacccggtcaccgcgatgttcttcttcagtctatcgtcaaacttctttgcctccacacattgctgtgtttgaacaatggactgcacaaattctccattctgaagggcaataatgaacaataacaacaacaatcaatcatcgcatatttgatatttttgaacactttttaactgtttaagaaataatcgtttgattttan

SEQ ID NO: 50709 - DNA, 807 bp, Heterodera glycines
acaattattttcattcttttctgttctaccgtacattttgtttgtcaaatggttgcacttttcttctccaaatttgttgttgtcccttcctcctcttccctcggtgtctcttcgtcctctgccatcctttccctcgtctctcttctgtcccccgtcgccctcccccaccggcgttcatttgccgtggtgaataacgtcaaaatcgtcgacccgatggatgtgcgcaaggacaatgtgtctacgaagaaaaaggatgatggcgttgcggctgaagtacgccgcaagaagaaggtgtacgcgctggccgaattcttagaccgtcccgaaaattggggaaagttcggcgcattagacccgtccgatcggcccgggcgttcgtggaccgttgaggagcttcgcctgaagagcaactccgacctgcacaagctgtggtacgtgctgctcaaggagcgcaacatgctgctgagcatggaccacgcgtacaaagtgcgcctccgcaacatgccgaaccccgagcgaattgaccgtgtggccgagagcatggaacgacttgaggcggtggtgcacgaacggaacgacgcctttttgcacttggagacgggcgacagcgcgtcgcccccgaaacggacggtcacttccttcatgggcttcacctacgatgagtacgcaactgaacattatcttccggccgaggccaccggggagaagcagtacgagcagccgatgctggacgaccaggcccatctgatgcaggtgctgtggcgggagaaggagcagctgaagaaggaggtggccctgatggacgag

SEQ ID NO: 50710 - DNA, 439 bp, Heterodera glycines
  unsure (1)..(439): unsure at all n locations
tccataacgccctggggcgggcccgcctacctgcacaggggatcttccagaaaggacctgctcgccgacatggagccgaacggagttgacattttccgcgtggcgaaaaaaatttcgccgaacattgtctactttttgccgaaaaacacccgcactgatcagttaattgcattggcaggccccggaggccgtgtggagttggagcaaacggtgcttaacgagaagatcaaggcgttgcatgcttattttggcctgttggcggccaattgagtccctcgtcttttttcgcgcttttctttggttgttacactcacggattatctcaaattattatctctttgaattcgttgcttttccattttctcttgatcattttgaaaattttgatattgtttcaccttctcttgctacaaattttccaataaattttcccatttcn

SEQ ID NO: 50711 - DNA, 421 bp, Heterodera glycines
tgtctgtccgtctctactccaaggcccgcattctcggctacaagcgttcccagcgcaaccagcagaccaaccaggtcttgctccgcgtcgagggcgtcaacaccaaggaggacactgagttctacctcggcaagcgtgttgcctacgtctacaaggccgagcgcgccatcaacggctccaaggtccgcgtcatgtggggccgcattgcccgccctcacggcaactctggtgtggtcaaggtgctcttcaagaacaccgttccccccaagtcgttcggtgcccgtgcccgcgttatgttgtacccctcccgcgtgtaagagtcgctttgtgttcttgcgtgcccaacgagcgatgcaatcacaatgcttccatgacaaatgcatgaatgattcttgtttttgccatgcatcattgataccac

SEQ ID NO: 50712 - DNA, 556 bp, Heterodera glycines
gggaatagacataaaccacaaatatgaccgcaaggttagacgtacggcacccaaaagtgaggatccgtacctgcgcgttttggttaaactgtaccgcttcttggccaaacgtgtggacaccagcaaacgctttaatgctgttgtgctcaagcgtttgttcatgtcgaagcgcaaccgtccaccactttcaattgcgcgcattgtgcgctatgtgaaaaagccaggtaatgagaaagaactcgtcgtctgtgttggctccgtgacggacgacaagcgcatttacaccgttccggccatgactgactgtgcggtgcgctttaccgacggggctcgcgcgcgaatcatcgctgggggcggagagtggatcacttccaaaagtgggattgcgggccccaaaggccaaaaaaccctgcttgtgaaggaacaacaaaggcgcgccaagcgaaaaacctttccgaccgccccgggaaggcttgcaatccttcaaaacgttgggttccgcgaagggaagaattttaacgtggaccccgcccccaaaacttccgggtacaagaac

SEQ ID NO: 50713 - DNA, 402 bp, Heterodera glycines
ctaaagccaccaaaaatgcgtttgtccttgctccgtgccagcgagaaacattttggcaatttgtcgaaggcttacggttggtattacgttcgcattgctccggttgaacagaaagtatggaagggctttttctttgatgcgtttgttaagccggtcaaagagcagttgccccactggtggatgttcttcttccccgtagtcacttactttttggtcaccgactgggccaagaaagagtaccgtcgtctgggacggatcaaagaattcactgacgaagaatgaatgtcgaattggccattcggactgttatttgtaggaaagaccaccgagtcgacagaatataaatcgaatgttttggtactgtcaaattgtgtgttatgtccaaataaatttattagtgtt

SEQ ID NO: 50714 - DNA, 683 bp, Heterodera glycines
ccccttaaaatcgtcgctgctctctccgcacttctcaaccccacctcctccatacacacttcaccatggctgaccaacttaccgaggaacaaattgccgagttcaaggaagcgttctccctcttcgataaggacggcgatggcaccatcaccaccaaggagctcggtaccgtgatgcgctcgctcggccaaaacccgaccgaggccgagctgcaagagatgatcaacgaggtggacgccgacggcaacggcaccatcgacttccccgagttcttgaccatgatggcccgcaagatgaaggattccgactctgaggaggagattaaggaggccttcaaggtgttcgacaaggacggcaacggctacatctctgccgccgagttgcgccacgtcatgaccaacttgggcgagaagctctccgaggacgaggtcgatgagatgattcgcgaggccgatgttgatggtgatggtcagatcaactacgaagagttcgtcaagatgatgatgtccaagtaaactcgtacaccactgtccctttgaccagatcccgccaagtccccctttgtcttcggcaccacatctttccccttgtttttttccgtcccgcatcctaactatgtcttcttgtctgtcattataatttgaaacgttttcgtgggtacaacaccctgtcccatttgtttt

SEQ ID NO: 50715 - DNA, 835 bp, Heterodera glycines
gaagctcaacattgccgacccctcgagcggttctcgaaagacctttgaaatcgatgatgagaagcgctaccacgtcctcatcgacaagcgcatctcgcaagagattcccggagaccaggtcggctacgagttcaagggctacgtcttcagaatcaccggaggaaacgacaagcagggtttccccatgaagcacggagtgctcgtcaaccaccgtgtgcgcctcctcctctcggagggccactcgtgctagcgcccccgccgtaccggcgagcgcaagcgcaatgcgatccgcgggtgcatcatcaaccacgacagcgcgggtgtttcccttgttgacttcaagaagggcgaggacgacattggcggtgtcacagacgtgactgtgcccaagctccttggttcccagcgcgcgtccgagattcgcaagacgttcgaattgacgaaggaggacgatgtgctcaagtacgagatccgccgtgaggtgcccgagaagtcgggctagcccgagtccaatgcccctaagatccagcgtcttgtgacccccttgacgctccagcgcaagcgcgcccaccatgccgagaagcgcatccgcgccgtggctgccccgtgaggccgctgcttcctacaagaagttgctcgctgaccgtgcccatgagctctacgccaagaagcacgccaagcgtgtccagcgtcgctcgtccacccacgcttcgtcgaccgcctaaggtcggtgacttggaagtctgcgaaaagcactttttgtcaaagtgtgcgtgtgtgtgtgctgctctctttttggatcgggatatatacattcatgcttgcttgaaaaaaa

SEQ ID NO: 50716 - DNA, 554 bp, Heterodera glycines
cgcggtggcggccgctctagactagtggatccccgggctgcaggaattcggcacgaggattcggttattcgtccaagccccactacacacctgagcccgacattctttacgaactgttgggccattgtccactgtttgcggaccccgattttgcccagttttcccaagaatttggactcgcatcgcttggcgcctccgatgaaatggtggagaaattggctacgctctattggttcaccgtggagttcggcatttgcattcaaaatggggcaaaaaaggcgtacggtgcgggactgttgagctcatttggcgaattggaatatgcgctcagcggacagcccgaattggctgcgttcaacccgccggagacgtgccaaaccaaatacccgatcactagctaccaacccaaatattttgtggccgaatcgttcgcggatgccaaaaacaaactcgcgtactgtatttgtcgcgctcgcgttttgagcatttttaaccctccccgctcccgcagtacatggtcaacgagcataccaagacagttccaagtcaactac

SEQ ID NO: 50717 - DNA, 775 bp, Heterodera glycines
agccattaaaacttattcctttgcattcgacctacaagaacagcctatagactaaatttgaagtatggaaatgcaagcatcgcccggtcctgactgtggctttaccaccccctcaagaacatccacaaacagtaaatttatcgtcgatgtgcctctttcgacaaaacgtgaaaagcttttgcgtggaactccgactcgttttcgacttcctcctgtgcgtcgtctgatgaagtccgctccgaatattcaccacagattctatttggcacgtgaccatatcgaaccatttgcgcaaatcgtttcattcaagcgatcagaagacaggccttcacttagcaaccgatatcggcccgaattggaggagacttatctccaacaatgctttgtacttcagggcagattgggccaaggcgatttcggagaggtggtcagtgtgcgttccaaagacgacggcaaattgtatgcggtgaaaagctctttggacatttatcggaacagcgctgatcggcgtgaaaagctgcaggaagcgtgggaagagcgcggccgactttacattcagacggaactctgctctcaaagcttggacgacatggcgagggagcgccacgaaataccggagccagaaatctggtattacctgatcgactcattgatggctctcgaacacatgcattcccacgacatcatccatgttgacatcaaaccgtcaaacatcttcgttacttcggatggcatttgcaaacttggagactttggattggttttcgatttaaaa

SEQ ID NO: 50718 - DNA, 465 bp, Heterodera glycines
  unsure (1)..(465): unsure at all n locations
cnnccccaggggcgcncgaataattgtgccctccgcccaaagcttataggaggatgacttgcagcaaaatcttcaccattgaggatttgccgaaaagtttcttcggccccctccaatcgaatgaatattggctgactttctctttcactgacgggaaagacaaaaaattgggctgcgcgaggctttgggtggacgtgtgcaaataccatctgcaggacaaacagcaaaagtgcctgagggacccaaacgcatttaagaatttcatcaacgaaatcagcagtcaggcggagcaaatccgacagaggacaaacagcggatgaaagaagcggaaaaagcacgcagaaacgggtcactcccccccctccccccacaaatcagcccaatttgaggagaacaataaattaaacaccatttataatgtgactgactcattttcaatttgcccaatgaactttcgaaatccnn

SEQ ID NO: 50719 - DNA, 526 bp, Heterodera glycines
gcggccgctctaaactagtggatcccccgggctgcaggaattcggcacgaggcccctctgttcaccaaatctggaattatattttcgttagaaataatgcaaccatttgtccattggtcgaaatgcatattcaaacgtccattttctaattcttcaaaattattttcgtcgtcattttcaatggggtttaattttgaatttaccgaagaacaaaaacaactccaagcggctgtaaagaaatttactcaagatgaaatcattcctaaagcgtcacattatgataagacaatggagtttccatgggaagtgataaagaaagcacacgccaatggatttatgaacgttgacattccgtcggattgcgggggtcttgacttggaacttgtaagcaacgtgctgatcagtgaggtcattgggtatggatgcaccggaattggaacggcaattttgggaaatgacttagccgcgactcctctggtcattggtgccaaagaagaagtcaaaaagaaatttttatcccgtttga

SEQ ID NO: 50720 - DNA, 536 bp, Heterodera glycines
cgggcggcgctctagaatagtggatccccgggctgcagattcggcacgagatctttaaattgtcctaaaaaatggtccaatacaaattatattcttttgatgggcgcggtttgggtgaatcaatccgtctgttgcttcactatgttggccaaccgtttgaggacatccgaattaaagacatggaagaatgggagaaaacgtacaagccgaaatttttttacggaaaggtcccagttttggaggttgacgggaagccattgggacaaagtgctacgattttgcgctaccttgccgaaaaatttggcttggccggcaaagatgaatgcgaaaaggcgaaggctaacgaaatcatcgactttcaaaaggatgctaacactgatttggccccctatttatacgtcaaaatgggattccgccaaggcgatttggacaaattgcgtggcgaagtgttcgagccgggagtcaagcacattttgccactgtttgagaaacttttgaaggagtccgggtcgggctacatgctcaagtccggcctc

SEQ ID NO: 50721 - DNA, 481 bp, Heterodera glycines
aaagatgaatgcgaaaaggcgaaggctaacgaaatcatcgactttcaaaaggatgctaacactgatttggccccctatttatacgtcaaaatgggattccgccaaggcgatttggacaaattgcgtgccgaagtgttcgagccgggagtcaagcacattttgccactgtttgagaaacttttgaaggagtccgggtcagggtacatgctcaagtccggcctctcaatggtggactttcaagtggccaactttctgtacacgtttaccaagttggagccggagactatcaatgcgttcccggagctgatcaaatacgttgaccgtgtccatgcgctgccccaactgcagcagtatttgaagcagcgcccgcaggaccgctgatcagtgatcagaaaagacgattttgaagaatgagaaaatcaatcattgagattaattcgataagttatcataagacaaagctttttctctaattaaacag

SEQ ID NO: 50722 - DNA, 496 bp, Heterodera glycines
ctctgctaaccgcctttttcaatgtgcgaccgtttgacccaaacccttgaccttgtcaacgatttggctaaccacatgtgtaattcggttggtgttctgcaggcgagtgccgggccgtgcgaatttgggacagctccggaggaactgaagaatgaacccaactgtcgcctcttcgctcagcaaattgcacggaccgccaaagacatcgaaattctgatcgattctttgcccgccgacgaacaatcgttgtccgtggaagagcatgagaaggcgttgttggagttggacgacgaacgcgcacgggcggccaaagagcttgaacaagcagtggaaaaggcggagaaactgacggatcagttgggcgaacttttgtcacgcattgcgcgccttcaaatggaatcgcgcccgatggcattttccacctgaaaacaaccttttcaacccacattttttttgtcgaatttatttgaatattaatacgcataaattaatttta

SEQ ID NO: 50723 - DNA, 469 bp, Heterodera glycines
aaaccatctgtactatgtgaagatcaacaatccacaattttgtgggctcagatatgtgggccgaatttctccggcaaatccagtttatttgagcttccaatgcggcaacgccgttggcattgccatccatgagacaatgcacgcgctgggcctgcagcatgaacagctccgagtcgaccgtgatctgttcatcaacatcaattgggcgaatataaatccgcaaaactatgacacatttgcgcgctcggagctggtcaaatacactagctatggcgtccgatatgactacggttccatcatgcattacgccagcaacattgcgtccaaatcagctggactgaaaacgatgacggcaaagaccaaccccggtgccaacgatgcgcagatgggccaacggagagggctgagtgcaacggatgttgaggaactgaggcgaatgtactgcatgccgggttgcgcggatgccaac

SEQ ID NO: 50724 - DNA, 327 bp, Heterodera glycines
caccctaaacacttacgtcgcttgcgaagcgattcagcaggtgactgcgccgtgcgtttggaatgaccagcagtgcgagctgagcatccaactcgaccggggcatcaaactgagcaccaccggcgacggccaaatgctgtggcagtaccctttcgaggccattcgcgcgaccggcgacgatgggcagcaatttttgtggatggattttggggaaccaattggtgaacaggtgagcgaacgaacggaacagcacgagaccctaaccaaaacgaagaaattgaaaattgttttttatggaatgatcatcctcaaaaactattaactaac

SEQ ID NO: 50725 - DNA, 337 bp, Heterodera glycines
gaacctttctgctctcgtgggtggaacattgggtccgggaatgtggcacggccgaatttcgcggggcgatgacgcgcccccgcgcgggtgtttccgttcaattgtgggccgccccggtcatcaaggggtcatggtcggcatgggaaaaaagaaccctacgtggaaaacaaggccaatccaaccggggattttgaacctaaataacccaattgagacgggatcgtacacaatgggaaacaaattgaaaaaaattggacccaaccttttaaaaaagaagtgggtgccccccccaagaaaaccggggcttttcaaaaaggcccccgttaacccaaagggc

SEQ ID NO: 50726 - DNA, 524 bp, Heterodera glycines
aaactagtggacccccgggctgcagattcggcacgaggattcccatcattaattagccgataaaaatgtgcgacgaagaagttgctgctctcgtggtggacaatgggtccggaatgtgcaaggccggtttcgcgggcgatgacgcgccccgcgcggtgtttccgtccattgtgggccgcccccgtcatcagggcgtcatggtcggcatgggacagaaggactcgtacgtgggagacgaggcgcagtccaagcgtggtattctgacgctgaagtacccgattgagcacggcatcgtcaccaactgggacgacatggagaagatctggcaccacaccttctacaacgagctgtgagtggtggtgccatcgtcagcattggcattggcactcgccgtcggtcacttggccaatccgtccctttaaggcgtgtcgcccccgaggagcacccggtgctgctcacagaggccccgctgaacccgaaggccaacagagaaaagatgacccaaatcatgttcgagacgttca

SEQ ID NO: 50727 - DNA, 489 bp, Heterodera glycines
gagcattgtgtcgacaaactaatcttattacattgcgctcgaatatgacaattcactctcgtaaagtggtggcctactattatgatggtgatgtcggcaattactactacggccaaggccatccgatgaaaccccaccgaattcggatgactcacaaccttctgttgaactacggactctatcgcaaaatggaagttttcagaccaaaggctgcgtcactagaagaaatgactaaatatcacagcgatgactatatgtgttttctgaagagcataaaacccgacaatatcgccgattttggtcgtcaaatgcaacgcttcaacgtgggcgaggactgtcccgtgtttgacggtctatttgagttttgccaaatttcaagcggtggctcaatcgcggctgcaactaaaattaataagaaacacgtggacgtcgcaattaattggatgggcggacttcaccacgccaagaaatccgaagcttccggatttt

SEQ ID NO: 50728 - DNA, 337 bp, Heterodera glycines
  unsure (1)..(337): unsure at all n locations
tgctgctctcgtgggtggacatgggtccggaatgtgcaaggccggtttcgcgggcgatgacgcgccccgcgcgggtgtttcggtcatttgtggccgcccccgtcatcaggncgtcatggtcgggatgggacagaaggactcctacgtggaaaagaagggcaatccaagcgtggtattcttgaccttaatataccgaatggagaacggatctgtcaccaattgggacaacttgaaaaaaattttggaccccccccttttaaaacaaatttggtgtcgccccccaaggaacacccgggggttttttcccaaagcgccccctttaccccgaagggcccac

SEQ ID NO: 50729 - DNA, 298 bp, Heterodera glycines
tgctgctctcgtggtggacaatgggtccggaatgtgcaaggccggtttcgcgggcgatgacgcgccccgcgcggtgttccgtccattgtgggccgccccgtcatcaggcgtcatggtcgcatgggacaaaagactcgaacgtgggagacaagcgcaatcaaaactggtattctacgctgagtaccccaatgaacacgggatctaaccaattgggagaactggaaaaaaatgggcaccaaccttttacaaaaactgggtgtccccccccaagaaacccctggttgctcaaaaggccccc

SEQ ID NO: 50730 - DNA, 558 bp, Heterodera glycines
  unsure (1)..(558): unsure at all n locations
gagattaaantgttngggaagtggtntnttaatgangtggangtgtnngaaatttnantngtggattatgttgnggtgaaagaaaagggggnnaaatatttgnngnanagngnnggtngttaanagnagaagngtttnngtaagggganntgtnnggtggtggaanggttggtntngtnaatgatgatgnangggttgaataanggnaagaaantgatggnggtgngtattgtgaagnatgnnttngaaatnattnatttgntnannggagagaannnngtnnaagtgttagttaatggtgtgatnaanagtggacctngngaggattnnaagngtattggnngtgngggnanagttngtngaaaggaagtngatgtgtngnttttgngtngtgtnaatnagggaatttggttgntttgtannggtttccgggagggnggttttagaaanattaaaaagatnggggaatggtttggggatgagttgatgaatggngntaaggggttnaagaatttntaagnaattaaaaagaaagaagaattggaaggggtgggnaaa

SEQ ID NO: 50731 - DNA, 462 bp, Heterodera glycines
tgggctttgatcagaaataaaaaccgttcgccaatctctcaatttttactctgataagcgggcttttttaaataaactgttgtttccgagtaaacacaatctttggtgaccgatcaagcagcagttttcttctgtcgaatttctctttttcttctgctgatcactcactttccccctaaggcgtgtttccataaacgacgcggcgaaaagtgcgcgctcaaagtgttgcgtgacaatgcgcgcagtcggcgcgagttggcgctgcatttgtcggtgtttgggcatccgcacgtggtgtccattgaagacatgttcgagaacagcttcgacggattcaaatgtttgctagtgggggtcgaattcatgggaggaagagaagtgctgaccatctttgagcagaacggacgattgggctactcggaaaaatgtgtgggccgaattgtgagccaaattggaagtggt

SEQ ID NO: 50732 - DNA, 497 bp, Heterodera glycines
tttgagtttagtttaaacgggttggcgagagtaatgcttctttcgaaaatcccacctcctttttgtattgctttgcgcgccgcttccacaaatccgccggctcgtggcccaagtgtaaaaacctttgaaatttaccgctacaaccctgaaaagccggaacaaaaaccctttctccagaaatacgacgtggatttgaatcaatgcgggccgatggttttggacgcactgatcaaaattaaaaatgagatggatccaactttgacttttcgtcgttcttgtcgagaaggaatttgcggttcgtgcgcaatgaacataggcggcgagaacactttggcatgcatttgcaacatcgaaaagaaaaccaaatattccaccaaaatttaccccctgccgcacatgtatgtggtcaaggatttggtgccggatatgactctgttttacgagcagtacgcttcggtgcagccgtggctgcaaaagaacaaaccgaccaaattagg

SEQ ID NO: 50733 - DNA, 469 bp, Heterodera glycines
caagtttgagacaatttatgcgttttaccattcaattacttcaaaaatcgcaacgttgttataaacttctttttgcaaattacaccaaacaagttgcttctgtgtcgccgcttttaattcatcgtcaaaatttgataagtttttcggccttccgcaatttttgctcttcaattgagacgaaaaaggaggaaatcggccgaatcaaatcgcaattggcaatcatttttacgtgtaaagtctgttccacgagacaggggcctaagcaattctcgcgttcagcttatgaaaacggcgttgtgctgatccgatgcgatcactgcagaaatcaccatattattgcggacaatttgggctggttcagcgatttggacggcaaaaagaacatcgaagagattttggcatcgaaaggagaggcgatcaaaaaggggacggcggtgttggagatggaagtgccagcggaggaggaggg

SEQ ID NO: 50734 - DNA, 549 bp, Heterodera glycines
tggagctccccgcggtggcggccgcatacgaactagtggatcccccgggctgcattcctcgacacgaggaaacgattgaaatgagttttggcaaggaatgcgttgatttatttgggacgaaggatctgtaccaaattttgaaattggacaggagcaaaagcaacttgagcagtgcacaaatcaaaaaggcctattatcgccagtcaattctgtggcatcccgacagatttgcatcggcacaacatgacgaaacgacgcgcgagttggccaagcagaaattccaagtgatcggcagagcatatgtaattttgggggatagtgagaagcgcaaagcgtacgacgaaacgggttcgctcgacgatgagaacgaattttacgaaggcaaagattggtcggccgtgtggcgaggcgttttcaaaaaagtcactccggaagagatcgaagcgtacctggccaaattcagaggttcacaggaggaaattgacgaggttaaggaggcgtatcagaagcacaaaggcaacatggacaagatcatgcaaagtgtggtcg

SEQ ID NO: 50735 - DNA, 480 bp, Heterodera glycines
aaagctggagctccccgcggtggcggccgcatacaactagtggatcccccgggctgcatgtatcaggcacgagggtcagaagttgtcttgagattgggccgttgggcggagtgtttcacttggccatggtgctaagggactgtctgttcgagaatcagaaccagcaaaacttcaaagacgcggcggaggcgaagtatttcggcacgattagtcttgacgaggcgacgcgcaaaggctgcgagcagttacgatggttcgtcgtgttctcctccatcacttcgggacgcggaaatgccggacagaccaattacgggtggtttttctcgacaatggagcgaatcatcgaacagcgccgtgcggatggtttccccggcattgccatccaatggggcgccatcggagacgtgggcgtaatccttgagaacatgggcgacaataacactgtggtgggcgggacactgccgcagagaatgccgagct

SEQ ID NO: 50736 - DNA, 683 bp, Heterodera glycines
tcccttaacggtgtttatctcttaaaattaccgcagaaaaattcttaaaacaaaaattcaagggccggatctaaacagaacaaaactgttgcatacatttacatgcacttttcggtttgatgttgcatcccatttaaaaagaacggtgaacaaagggcaatcgatacgcataaaaatcgatcgtttttcggagtggacggagcaggaccagacggacttctgcaaacaccttctgcagcgcatgtgtcaccaccaacacggccaaattgaccaatttttgggcccaatgcttcagcgggacttcattgcgttgttaccaaccggtttggcggagaatgtgctccatttgttggacgccaagtcgttgtgcgcctcggagtttgtcagccgccggtggagtcgtgtcattgtcaacggattgctgtggcgcaagcacatcgagcgccaagtgcgcaacgacgcgctgtgggccggactcgccatccgacgcggatggaagaagtacttcttctgctccaaggaccaggcgacacgcgcaatttctcagtcgtggagacagccgaagaacggggaggacgcgttggagttccagcacaaattctaccgcgaactttacccaaaaatcactgctgacattcggcaaattgagcagaattggcgcgagggacgacaccgattggagc

SEQ ID NO: 50737 - DNA, 247 bp, Heterodera glycines
ctaccaaaaaagcacccttttaaggatccgcaaattgcccttccaacgattggtgcgcgaaattgcccaggacttcaaaacggacttgcgctttcaatcggctgccatcggcgctttgcatgaggcttctgaggcttatttggacggtctttttgaggacaccaatctttgtgccatccatgcgaagcgcgtcaccatcatgccaaaagacattcaattggcccgacctatccgtggagaacgtgct

SEQ ID NO: 50738 - DNA, 259 bp, Heterodera glycines
gccaaggcccgagtcgtttcacgctgacgacggtgaacgttattatgtcggtgcggacgtgggccagtacttgaaataccatcgcggaacgctgtacaaacgctacccccaactgtggaagcgaatggcatcggtggaaggaaaacaagaggaaccctgaagtttggctttgccaccctcctacataactttgaaaattatgcttggccaaagctaaacaagggttaaaaactttttggacggaaaaaaggaaaaattc

SEQ ID NO: 50739 - DNA, 609 bp, Heterodera glycines
caaaaacgagaagttcttgaacattgtcacggacattatgcagaaagtgatcacgaagaattccgaacaaatgacatttttcatcggaatgaacggacaccaaaaactgatcggactaattgccaattgtcgtcaggaggcactgttatggagagttaccaaactgatggacaaaattgtgcagatggacgcggaaagaatggtcggcgcgggactattggaagcattgcaacgccatttggaccatccgagccaaagactgcttcgtcaagtgctgtcgtgcgttcgaagtgtcagtcacgtgccaaccgccgaccgaacagttcagccacttctgcagaaactgctccaacttcttggtcagtttaggacgaaacgaacgaacgaaaaccataaatttgaaagagctttttgcttgcttaaggaacgagtgacattcgcctaaaagaaaattgtgtggacattttggccaatttgtgcgccaacaattcccaaaataaatccttccttgttgagaacggcgcggtgccatcgatgtttcagttgctctacgagttggactccgttaggagcggaggaggagaacagccgacgggagacgaccccttc

SEQ ID NO: 50740 - DNA, 398 bp, Heterodera glycines
tattcgtgtgttggagtcttccagcacggaaaggtggagatcatcgcgaacgaccaaggtgcagtaaagaccggacgtgctttccctcaaaatattgttaccatcccgaatttcaggcaaccgcaccacgccgtcctatgtcgcgttcaccgacaccgaacgtttgatcggcgatgcggccaataattttgtggcgatgaacccatccaacaccgtgttcgacgccaaacgtctcatcggacgcaagttcgacgacccggcggtgcagtcggacatgaagcactggccgttcaaagtggtgcagggagagggtgctcgtccgaaagtgatggtggaagtcaaaggcgaggacaaagcgttcttccctgaggaggtttcgtccatggtgcttatcaaga

SEQ ID NO: 50741 - DNA, 672 bp, Heterodera glycines
gtgatgcgttctccatcaccgaccgataatgacaaagcgcgttccttaaatgtgtacagacgtaaattggccgaatataaagaaattgagaatcggcttaaggaattgcggactaaggaacgcgaaagtcacaaattgttcgacaagtcggaaaatgagattaaatcgcttcaatcggtcggtcagattgttggcgaagtgcttaaacaattgacagaagagaaattcatagtcaaagcgaccaatgggccacgatatgtggtcggatgtcgtcggaccattgacaaggagaaactgaagcagggcacacgtgtggctttggacatgaccacgctgaccataatgcgccaacttccgcgcgaggtggacccgttggtgtacaaaatgagccacgaagaccctggcaacgtgagctatgccgaaattggaggtctctccgagcaaatcagagaactgagagaggttgttgaactgccgctgatcaatccggagttgttcaaacgcgtcggcataacaccgcccaagggctgtcttttgtacggaccgccgggcaccggaaaaacacttttggccagagcggtcgcttcgcagctcaactggaactctctgaaggtcgtctcgtcggcgatggtggacaaatacattggagagtcgtcacgaaggatccgcgaa

SEQ ID NO: 50742 - DNA, 429 bp, Heterodera glycines
ctacaactagtggatcccccgggctgcaggatctcggcacgagggctttgcctaactatgcctcttcattggacttctgtggacactcgcaacgcacttttgtgcgccgccgttccttccattggcgccttcgtgggctcgacgatggccatcaaagatcaggaattggttcaatttctcaagaatcaaaactttccttctttcgcccgttgttgcaaatacaattatttgctggccaacactgccgtcaccattccgttcggttacgcttcttatttggtctacaaaattggaggaggttttgattacacggacacgactgttgcattgggactgtacggggcgacggtgctcagcggctgttttttggtgcccatgctcaagaagcaggatactaaggcgctgactgccaacgctgttgtccttgcc

SEQ ID NO: 50743 - DNA, 499 bp, Heterodera glycines
ctttattcattcaatggacgaatattcaagggagccatgcccacatcggatttatgcggatgctgggagtgcttttgccatgggactgatcggcggttctattttccacggcataaaaggcttctcaagtgcgccgagaggacaaggacttcttaacatcgctcgagaggttcggatgcgcagtccggtgacgggctctcaattcgccgcgtggggtgggatgttctctgtgatcgactgcggcctcgtttatatgcgtcgaaaggaagaccctctaaattcgatcgctgctggcggtctgaccggcggtttgctctgtgcacgaatgggttggaaaacggcgctggtgtcggctggtttcggtgcagtcattctgacgatgatcgaaggggtgggcattttgatgaaccgagtgatggtggcgcaatccgacgcagcattggcaccttcccccgcttaattgtccaatttgttcattttgttgttttagtccggtttt

SEQ ID NO: 50744 - DNA, 156 bp, Heterodera glycines
gtttgagcaaataaactatggagcattatgatcgtgcaattacgattttttctccggatggcagactttttcaagttgactatgcgcaagaagcagtgaagaagggctcaacagcggttgccgtgaaaggaaaaaattgtgttgtaattggagtcg

SEQ ID NO: 50745 - DNA, 483 bp, Heterodera glycines
caagtttgagcatttttatataaacaaaataaatatgagcgcggagcggaaaaagtccgtcttatttttgttcgatgtggacggaacattgacggcgtcacgacagtcaattacgccgtcaatgctcgcctttatgcactcggtgaagagccgtgtgcctgttgctgtggtgggcggttcggacctggccaaaatttttgaacagctcggcggcacgcaacaacgcgaccaatgcttggccctgttcgattttgtttttgccgaaaatggtctcaccggattcaaaggcactgagccgatgccatcggagtcaatcagcaaacaattgggagaggcaaaatgccaagaactgaccaatttctgcctaaggtacatgtccaacattgagttgccattgaagcgcggaaattttgttgaacatcgcaatggaatgatcaacgtgtcgccgattgggcgcagctgttcccagtcggaacgtgacca

SEQ ID NO: 50746 - DNA, 576 bp, Heterodera glycines
gttgcacaaaggttcttaccaatgaagactccgcttgacagttcttacgaccatttaatcgaatctcccaaatattttttccatccatcgtccgtttttcgttcccctttgctgggagcgacaaaaggagcgaagattggactttgggttgatttgacaaattccgacaatttttacaacgaggaagaggttttaaacaatggaagcaaatttctaaaaatgaaaatggtggggcacaaacaaacgccgacgcctgagcaaacgacggcattcattgaagcgattgaccgttttatcacgaataacccggacgatgtgattgtggtgcattgcactcatggtttcaatcggaccggctttctcatctcggcctatctgtacgaaaagtgcgacatgagtatcgaaatggcagtcagagaatttgcggagtgtcgtccgaatggcatttacaagcagtactacttggacgaccttcgcaagagatacggcgatgaggacgaagacgagatgacattccccggaaggcctttgtgggagaacggaccgatcagtgacgacgaattcaccaacaacgga

SEQ ID NO: 50747 - DNA, 473 bp, Heterodera glycines
tggccaggacacattcttcgaccagggctgtgtccgtgccacgtgtctttcgtgcagtccttcgggccaattcatcgcctgcggttctaacacgggaattgtcaatgtttacgacctgacaaaactctctccgagtttggccaagtcgaatgcaccaagaccagtacggatgttcgaccagctgaccactttggtgtcattcgttcgctttaacaacgactcgcaaatgttggcttttggttctgcagtgaagcgtatgtccggtcgcgtggccaattgttcttccggaagcgtatttcaaaatttccctgctaaacaagagcacttcgccagcgacaaattcacaacttgcgatttttccccgaatagtgcctttttttcctttggcacaaaacaaggaaagatgagactttaccagttacaccattctgatgtttactaaattttgttgttattaatttgataaattttaa

SEQ ID NO: 50748 - DNA, 530 bp, Heterodera glycines
caaaaggccatctcttttactagcataacgggagaagtgcgcacggaagaacgtcagtcaagggtggatgctttcaacagaaccaacacgggacccaaagtgatgcttttatcattgaccgccggcggcgttggattgaatctgattgggggaaatcatttgtttatgattgatttgcattggaaccccgcgttggagttgcaggcgtccgacagaatccaccgtttgggccagaagaagaatgtgttcatccacaaatttgtgtgtgcctcgaccattgaacagcgcgtactccaattgcaggagaagaaaaatgccatggccacctcagttttagaaggtgccgctaaaaagttgggcaatttgagcaaggatgacgtgatgtatttgtttgagttggagaaacgtcccaacaatcagcagaaagctggccaatcccagaaaccgacaacgagttcccaaatgtgagacgacaaatggggatttttattgtacgtgcattactcatttgacatttatttatttatttg

SEQ ID NO: 50749 - DNA, 677 bp, Heterodera glycines
attttgcacctttttgccaccttttaagcctaataattaacaaatagcacgacaatttaaagagttgcaaaatgaccgcctctttgcaacaaattcgagcccaacccggctggacggcggacaaatgcaaagagcaaattgaggtggccaagagcgagaatcggacattccaacgccaaacgctgcaggcgcatctggtccatttgctgaacaaagagcacaaattcaacgaggccatccaattggctgctcaacttgtgcgcgagctgaagaaggtggacgacaaggatttgctggtcgatgtgcaattggaggagagcattggcttttaccatctgtccaactacacaaaggcacgtgccgagttggtcagcgcacggactatcgccaacaccaaatacactccgcccgccatgcaggcccgtctcgacctccaatcgggcattttgcacgcggccgacgaccgcgacttcaagacggcctactcctacttcttcgaggcgttccaggcgttcgactcggtcaatgagtcggcgctcgcgcagcaggcgctgaagtacatgttgctgagcaaggtgatgttggaccagtcggacgaagtgcactccatcatgacggggcaaaacggcacaaaaatatgccaaaacggagacggaggcaatgcacgccatcgcaga

SEQ ID NO: 50750 - DNA, 562 bp, Heterodera glycines
gagtactctacataaagaaacagaaacagacatttctgttggcaattacggctcttacggacttgttcaatcgtctgagaagcgggaggatgttgtttttgtagaaattgagaaaataaatgctgattttgacggaaaagagatttggcttcgtggccgtctccacgactctcgcggaaaaggcaaaaattgttttgcgaaaattcggcagcggattcacagcgtacaggcggtgttattcgtgggagcagacattagcaaacaattcgttaaatttgtccaaaacattcccaaagaatcaattgtcgatgtttatgggcttgtggcgcgcacccctcagccggtcactgcttgcactcaaagcgatgttgagattaaagtgcacaaatttttcattgtctcgcaagcagagcctcggcttccgcttcaacttgaagacgcggttcggcccgacaacgaccaagaggaattggccgtagtcaaattggacactcgtttggacaacagagtgctcgacttgcgaacgccaacgagtcaggcaattttccgttttgcgggcggg

SEQ ID NO: 50751 - DNA, 659 bp, Heterodera glycines
  unsure (1)..(659): unsure at all n locations
gtttatctttactcaacaatttgcggtttaataattaaagacgctaaaaaatggcacaacagcaagcgataacgaagaagcgtaaagctgtgcaagacggaattttcaaggccgaattaaacaactttctcatgaaggagttggccgaggacggttattccggtgtcgaagtgcgtcgtgcaccttcccgtactgaagtgatcatcatggcgacgcgcacccaaagtgtgctcggcgagcgcggcaatttcatccgcgaactgaccgcactcgtgcagaagcggtttggctattccgctggacaaattgagctctatgccgagaaagtgtccagccgtgggctttgcgcggtggaccaatgcgagtcattgcgttacaaattggtcggagggctcgccgtgcgtcgtgcgtgcgacggtgtgcgtgcctccatcgtggacaggaatgcccgtgggtagggaaagtgggggcagagggaagagaataagagagagaaaacgggaggaaaaaagagagaggacagagggatggacgaggacaggctaaggatagcgcgcggcgacatcgccgaaggcaccacgaacgaccaaaaggcgggagacacgcgacagaancgagcaagataacacacagacgaggaagaccaacagcaacaagca

SEQ ID NO: 50752 - DNA, 418 bp, Heterodera glycines
cttttcccgttcttttttgtttttttcattttaccagaaaaaaatatcattttaataaaataatattatttatttcacctatgttaaaatttggtctttttcaataaaaattcagattttttcttacaatggaaattttttgcctttttttccccctattttttacaattttattccgttttgcacaccggatcattttgaaacaaaatataatgttccaaattttcgtcaaaactctcaccgggaagaccatcacccttgaagtcgaggcgagcgaccccatcgagaatgtgaaagcgaagatccagggcaaggagggaattccgccggaccaacagcgcctcattttcgcgggtacatccgcttgatatgccaagatattaaatgtttcacgtaatccttgtttttaggaaaacag

SEQ ID NO: 50753 - DNA, 491 bp, Heterodera glycines
cttttgtaaattctttatcgtccaacactaaaacaattcactttttgaagaagtatttacttcttgcacacaattattgcactttttcgcgcgaatggtctgagatggaatatgaaaggcgcgctgaggacactttggtggcactcactgagtatttggacacattgccggaccgtgtcgattgtgaatctgccttcgatgtttcatattcaatgggcgttttgaccgcgcacataagcccacgaataggcacttatgtgatcaataaacaaactccgaacaaacaaatttggctttcatcgccagtttctggtccaaaaaggtacgacctcagcgacaaaggccggtgggtgtataagcatgatggagttacgctacacgaattgctcgagaaagaatttagacacattttcaaaaacgatcaaatttcgttacatcagagttaaagatttatcgttttttataccgatataaattttatttggtaaaaa

SEQ ID NO: 50754 - DNA, 530 bp, Heterodera glycines
gatcgaatgtggagctgtacacttgcacttcttcagagtgctcttccatcgactttctctttctcgtgattacatgggtggtgtatttctccattccaatcgcgcttccgcgtccccatcctaagctgatggcacgtgggcttcccccttcgacacagatccttatatgatcgtggagtgcccatcgtccgtatcttaagctctccacaaatttcgaaccgtcaaacaaataaaacttcggcactgtcaatgccccggggcacgaccaaaacggcggcacagcgaaggggcgggcggagaccgcgagaagcggaagatcaccagctaacggatgaggacaaagaccgacgggcgaagcgacgcgagcgcaacaaacaagcagcggcacggtgccgacggaggcgggaggagaaaatgcaaagtttgcaggaagtgagtgccaacaacgaaaggaaggcaaagggacggaaaagtgccactttctgtcattggttttttgagcaggtggacgaattgcggaagcaaaatga

SEQ ID NO: 50755 - DNA, 481 bp, Heterodera glycines
tttgagatttgtttttgtgctttggtattccacgggttgttctccactcaatttgtgaagaaactgcacagcaacagcagtgaaaatggcctccggcgtgaaagtggacggcgagtgtaagcaggcatacgacgagctgcacaacaagcaccagttctcctttctgatcttccgtatttcggacgacgacacgacgatcattgtggagaagaaaggcgagaagaacgcgccgtactccgattttgttgaggagatgaagaaagtggtgggcgacggcaaacagtgccggtacgcggcggtggacgtgcacgtggaaattcagagacagggcaccgaagggtcgtccaacctgtccaaagtggtgttcgtccaatactgtcctgatgaagctccggtgcgtcgtcggatgctttacgcctcttccgtgcgggcactgaaggcgactttggggctggagagtctgctccaaatccaagcggcc

SEQ ID NO: 50756 - DNA, 487 bp, Heterodera glycines
tttgagtgcgattaacccccttttttgaactgtttgaattttctgatcagtttgtttttacatcattcaatggacatcgttgacgaccctttgtccgagccttgccatgtttgtggtgacaaatccaccggcacacattacggcacggtttcctgcaacggatgcaagggcttttttcgccgtactattttacgaagtcagaagttcacttgtcgtttcaacaagcaatgcgtcatcgacaaaaactatcgctgtgcgtgtcgcttttgccgcttccaaaagtgtctgagtgccggcatgaaaaaagaagcaattcaatttgagcgcgatgcgattggttcgccgcttccgttgaaaaggcggcgcgtcgccgacgacggccgggccgaccattccccgtcaccgaccggtggacggacagcgaccgatggcattgggacggcggtgggccgacccgtaatggcacaaggggacggaaagggtcaga

SEQ ID NO: 50757 - DNA, 623 bp, Heterodera glycines
attatatgtgggtcctttttatttatcgatgataaaattgggcgaagccgcaaatgtcgggccgtaactgtccgaatttggcttgggcaacgcaaatgtccgtaggccgcaaatgtctggacaccaaagtttacattgtctagccccttaaaactttttaatattttatttttgcgtcgatgtttgtggatgcatctcccctatttcctgtttataaatttccctcctaatttgtaagggaagtgtaccacaccccgcggatgcaatatgtgctgtccgtcttgtggtcttccgacaacaaatttgtgttgtccggcagtgatgacatgaacattcgcctgtggaaggcaaacgcagccgaaaaacttggcccgctctgtccacgcgagaaagcggcgatcgaatacagccagaaattgcgcgacactttccaaggccatccggaagtgcggcgtatcgtcaaacatcggcatgtgccgaaagctatttacagtgccacgcgggagcacagaatcatacgtgaatcacagagaagaaaggacaaaaacaggcggaagaacacgaaaagtgccgcaacagaaccatttacgtcggagagggcgaaagccattgtcagcgaaggg

SEQ ID NO: 50758 - DNA, 535 bp, Heterodera glycines
tatcgtttaatccacataaatcaattgcgcaaacgaagtccaaatggcagaagtcggaaactcgtacagaccgccgctaagcgaagagaaacaaaacgaactccgcgcaattgctcagaaaattcttcagccgggcaaagggattctcgctgctgacgagagcacaggttcgattggaaaacgcttcgatactattgggttggagaatacggagaacaatcgccgtcgctaccgccaacttttgtttaccacaccgagctttggacagaatcttagcggcgtcattctttttgatgagacattccgtcagtcaaccgacaacggagtccgatttgttgacgtcatcaaaaaggcgggagccgttgctggcatcaaagtggacacgggagttgtgccattggccggcactctcgatgaggggacgacccacggactcgacaaattgtccgaccgctgtgccgagtacgaaaagggcggctggggctccgccccccggcggtgtggcgtgggcgccgcgcggcccgaaccacgccat

SEQ ID NO: 50759 - DNA, 326 bp, Heterodera glycines
ctaaagcctgccgctttttcattgttgtttcaaattctgtaaatctcttcaagcagaaaatgacgtatgacctcgagaccgctgaaagggctgcctatgcgccattctttggctacattggtgctgcatcggcacaaattttcaccgtgttcggcgcggcttatggcaccgcaaagtcggcggtcggcatttgttccatgggcgtgatgcgtcccgaattgatcatgaaatccgtgatcccggtcatcatggctggtatcatcggcatttacggcctcgtggcggcgagggcgctccccggcagggcgacctgccgcgtgggtgga

SEQ ID NO: 50760 - DNA, 475 bp, Heterodera glycines
tgaaaactctgcaaccagcaaccaacatcattttgcacatcggtgctcgcgcaatgagctcaatgtccgccgctggcggtgccattgccgcatccgtcgaacaacaaccggcggtggagccagatcgatccacattctaccataaagatttgtccattgtccgtgccactgctggacaaatgcagcccaagccgctgggaacggttgatcagatcaaatttggacatcacttttctgatcacatgatggaggtcgattggtcggacaccgcgggatggaatcagcccgaaattagcccgttgcacagtgttcagcttcatccgggcgcaaaagtgcttcattatgcgattgaactgttcgaaggcatgaaggcttaccgtggcattgacgacagaatccgattgttccgtccagaaatgaacattgcacgcatgaagcgtaccgcggcacgtgcggcacttccggattttgatgc

SEQ ID NO: 50761 - DNA, 410 bp, Heterodera glycines
aaatgtccccttctctttccgttgccaactcaaatgtctctcgaccgcttggccaaccaaaagtagcgggcttcaaagataaggataagccggaaagtgttcgtactagcaacattgtggcagcaaaggctgttgcggatgcggtgcggacgagtcttgggcctcggggaatggacaaaatgatccaatcgggcaacggagaagtgacaattaccaacgatggggcgactattctcaaccaaatgtcggttgtgcatcccaccgcaaaaatgttggtcgagctgtccaaggcacaggacattgaggggggggatggtaccaccactgttgagggggtaggcggggcgagcatcaaccctgccgacaaacttcttggcgaaggagggcgtccgaacaccaatagcgacgcc

SEQ ID NO: 50762 - DNA, 436 bp, Heterodera glycines
ggacactgtccaagtggtggcggtcaacgacccgttcatcgaactcgactacatggtgtacatgttcaactacgactccacccatggccgtttcaagggcaaaatttccacaaacgccggcaatttggtggtggagaaggaggggaagagcgcgcacaccatcaaagtgttcaacctcaaagacccggccgaaatcaaatggggcgaagcgggcgcggaatatgtgatcgaatccaccggagtgtttaccaccattgagaaggcctctgctcatcttaaaggcggtgccaagaaggtggtcatctccgctccgtctgccgatgcgccgatgtacctgatgggcgtcaacgaggacaagcacgacccggctaacgacgacgcgatcagcaatgcttccggcaccaccaactgcttagctcccgtggccaaactgttg

SEQ ID NO: 50763 - DNA, 430 bp, Heterodera glycines
atatgccgccaaaaacctcgaagaaaactgacccaaaagggggaaaagcggcaccagcgaagaagaaagagggcggaggaggagggaaggccaagaagaagaagtggtcgaagggaaaggtgcgcgacaaactcgccaacatggtcttatttgaccaagccacctatgacaatttgtaccaagaaatcatctcccgtcaactgatcactccccacgtttgtctcgaacgggtcaaagtgccccccttcctgggcaaggggggcctgaaaaatttgccccaaaggggtgtgtcaatttggtgggagaaacccggttcccatttgttgtacccgggggccccccaacgggaggaccttaaaaagggggaaaaggggcgattttgtttcctctttttttaaaaagggatttttgaaaaaagaatttttttttt

SEQ ID NO: 50764 - DNA, 457 bp, Heterodera glycines
aagataaataatcacaagcgaaaatggtcaacccgaagggataccgtcgcggcactcgttacatgttcgcccgcccggtccgcaagcacggcgttgagccgctttcaacattctaccgcgtgtacaagcggggcgacattgtcaccgtcaagggcaacggcgccttccagaagggcatgccgttcaaggcgtaccacggcaagaccgggcgcgtgttcaatgtgaccaaacatgcgctgggcgtcgtcgtcaacaagcgtgttcgccatcgcatcatcccgaaacgcatcaatgtccgtgttgagcatgtgaaaccgtccggctcccggctcgagtttctgcagcgatgcaaagcgaatgacttgcagaagaagcagcacaaggagggcaacgcaccgtttgtggcgctgaagcggaagccgaaggagccccgggtggcgcacttggtcaaagtgaa

SEQ ID NO: 50765 - DNA, 529 bp, Heterodera glycines
gggtgcctacaaatacatgcaagaattgtggcgcaagaagcagtcggaggtgatgcgctatttgctgcgcatccgctgctggcaatatcaccaaatggaggccatccaccgctgcacgcggcccacgcgtccggagaaggcgcgccgcttgggctacaaggcgaagcaaggctttctcatttaccgcgtgcgcattcgccgcgggggtcaaaagcggcaagtgaccaaagggcaagcgtacggaaagccgaaaacgcgtggcgtcaaccagctgaagaacacgcgcagtttgcaggccgttgcggaggcccgtgccggccgccgattgggcgaacttcgagtgttcaatacgaactgggagggccaggactcgacctagagaatcctcgaagtcattatccgcgacccatcggacaaaaccattcgtcgtaacccggacaccccatggatcaccaaaccctgtgaggagaatttcgaagaggggggactctcgtcggccggccgcagaggccgagggctcggcaaagga

SEQ ID NO: 50766 - DNA, 509 bp, Heterodera glycines
gccaaaatgtatcttccttctaatgatccttttgtactacttatcacaccgaggtgtctgccttttctagccaaaggccgcctattcggccttactttggagtggcgtgtgatattacacctgattgtttacggtgtcgggcacaaaatatcagggaccacctgacgaagcttttcggcaaaaacgcgaaaccgggcgaaatgcaagtgttcaaaaacacactgtcgaccaacaaacagttatggaagataatttatctgctcgaaatacggccggtaacatttccaaacggagagccggggcaggaagatgcgacacatttggagataatggcagatggacgctgtgtaatcagccggcaaagtttgcctaatgtcgacgactttcaactgattgactacagcaagcaggtcagcccgcgttatttggcttctccactgatggcaaaggacgtgaccaagcaggacgtggacgaggacaccggctaccacccagaaaatatcacgctt

SEQ ID NO: 50767 - DNA, 449 bp, Heterodera glycines
attcacactccgtattcaatcgatatacctttcaatttgtctttactatgcctcttcattggacttctgtggacactcgcaacgcacttttgtgcgccgccgttccttccattggcgccttcgtgggctcgacgatggccatcaaagatcagaaattgcttaaattccttaagaatcaaaactttccttctttcgcccgttgttgcaaatacaattatttgctggccaacacttccgtcactattttgttcggttacgcttcttatttggtctacaaaattggaggaggtgtcagttgcaccgactcaaaaatcgcattgggactgtacggtgcgacgctgctcagcggctgttttttggtgccaacgctcaaaaaacatgataccaaggcgctgactgccaacgctgttgtccttgccggactttccgtcgccacttctgtggctttt

SEQ ID NO: 50768 - DNA, 466 bp, Heterodera glycines
tcgcatcctgctccgtgcaattcggctcattgaggacttgatgacaccgcgccaagacatgacgactcgacccgacgcgaggatttatatctgcaatgctcttccctatttggtctctactgccattgaacttttggatcttgccgagcaacaggatgaggaaggagcaaacgttgaccttgatgcccactaaacaaagtgtgccgtcatcagaacatccacgcgtgccacttactttctgcccgttgttggtcttgtggacccggaagaaatgaaaccgtccgatttggttggcgttaacaaggactcttatctcatcctggaaaaactgccacccgagtacgactcacgcgtgaaggccatggaagtggacgagcgtccgaaagaaacgtactcatacattggcggatgcgatagtcaaatcatacaattggttgaagcaattgttcttccgatggataaaaaa

SEQ ID NO: 50769 - DNA, 223 bp, Heterodera glycines
tcttccgccgcaaagaccaactgacaagccgttgcgtttgcctcttcaggatgtgtataagattggaggtattgggacagtgccggttggacgtgtcgagactggtgttctcaaggctggaatggtggtcacttgtgctccgcaaggcatttccactgacgtcggatcggtggcaatgcgccaccagggcgtgccacaggggcttgggcgacagagtgggggg

SEQ ID NO: 50770 - DNA, 223 bp, Heterodera glycines
cgagtcggcctcaaacagcgattgggcccggtggttttattatttgggacgcatcgaagcgttgaagggcaccgacgccgagacgtacaaagcggcagagaaacattttgaggtcgcacttcgaaaggcaccacaaaacggcgccggcggcttcttacatgatttgaacaaatgggtcgtgctgcgcagaggggtcttttttcaaatccccgagcgcggaatc

SEQ ID NO: 50771 - DNA, 394 bp, Heterodera glycines
caacgctatccatcaatgcgcgagttgcgaagggcaattgacgaacaaaggctgttccaaattttcggctccggcaccgcctgtgccgtgtctccggtcggtcgtatactgtaccgtgagccgggcacgggccaaatggaggagctgttgattccgacaatcacttctagcgcccatgtgatgcaaaggctttacaaaacgatcactgacatacagtatgggagagttatcagaagtgattggacgcggacagtggcataatggcataatgcctatcattatttaaaatttctttaattattttagaatcattgtggttgcaaattatatgtaaaaaaatcacaaatatatgtaagaaatatgtacaaaaactcaataaaaatattttaatgtg

SEQ ID NO: 50772 - DNA, 436 bp, Heterodera glycines
gctttggaaaaattgtttatcaaaagcactaacaaaaaacatttgctcatttttttattgaaaatggattttgtcggcgttaaaaatcacacgccaaaagttgttcagccccaaaagagtgacgcgattgacaatggcacaatttcgccgttcggcaacggctcggcaccgcgacgaaagcctttttcctggattcttccactgagaaatcccttcgtcggttccgcgtgtgcaaatgtaaaaatgtgttggaccgattggtgctcaaattggacggccgacggattttgttggccattcccgccgccttcaatctgaggtaaaagtcgtcgtcctccaggccccagccccaaaattcgttggacattccgttcacctttttaaaatcgtccaaagtgatcaccagcacactgccgaagaaatttttgtagtcata

SEQ ID NO: 50773 - DNA, 574 bp, Heterodera glycines
aagcaacaagagcggcggattctacacgaagaagtttttgttggacctcccatccggcggaactgctgctgcagtctcaaaaaccgctgttgcacccatcgagcgtgtcaagctgttgttgcaagtgcaagatgcttccattcacatcaccgcggacaaacgctacaaaggcatcatccacgtcctcgtccgtgttcccaaggagcagggctttctgtccttgtggcgtggtaacctggccaacgtcatccgttactttccgactcacgcgctgaacttcgccttgaaggacacttataaccgagtcttcacgctaggagtgcacaaggagaaacagttcgtgaaattcttcaccatgaatttggcttctggcggtgccgctagcgcactacgctgtgtcctgggtacctcgatggactttgcacaaacgcctctgggaaacgggtgctgtaaaggtcctatgcccgcgcagtcgaagggttgggctggactgcctcatgaacaactctcagacggaacggggcccattggtttctacgggggacttattccactccccccagggattgatatt

SEQ ID NO: 50774 - DNA, 488 bp, Heterodera glycines
tgtgcatttggacaatgagcgggtattgaaagcactgtaccatcttttacaaggcttttcagccagtccaccgaacattttcgtattttgtggcccttttctcggcattcaacgggcgcacagttacatggagcaggcggccaacgcgttcaggcattttgcaaacattttgtccgaattttcgcacgcttaccacgccaccgaattcatttttgtgccaagtgctgacgatgcgcctccgttgcaaatttttcccaggcccactttgttgcagttgatacaaaaatgctttaaggaggctaaaaatatgcattttgccaccaacccatgcaaattggtcttcaaggaccggcacattgtcatctttcgtgacgatgtggtggagaaggtgtgccgttcagcagttttcatgccaaaaaacgcgatggccagccgaataccaaaattgttctgtgacacaatttgggcccaacgccatttctcgccgt

SEQ ID NO: 50775 - DNA, 259 bp, Heterodera glycines
gcaaattgtccctgaagtaattcgtcagcaatttttggccgccgatttggaagagtccgtccgattgagggaggaggcgaaaaaaggaccatttcaaaactcaaattgttggcgaaatgtgcttctctttgtgctgctccatttcggtgcccttgtcggtttgtgccatttatttcttcttgcaaattgggccaccatcggatggtgcatttttcctatggttccccccgggggcgtttggggaattatgggggggggg

SEQ ID NO: 50776 - DNA, 675 bp, Heterodera glycines
atgtatcacatctatcggcagctgctgctgcacgaacatccagccacgcatctgcgcctgagctgctactgcactaacaaccgcgactgtgcacacctcacacttctacccctcgtgctgctcatgacaaaggggcggtatgattttttaaaaattattttcgatttatatatataataatattattcgataaacattgtctgcttcatcaaattatcaaaatattaaaattaatttacttattacaaatattaaaaatctgcatttgatattcatttaaaagaaataaacttttcaaaaaagtattagtataaatattaatacaattaataatatcatattgctttgttagattcaactttttatgcttttttgatttgattttatttataaatttatttaatgatttattttttaattaattggcgtttattcgtagatgtttactttactattttaaccttttttttatcatcgccatatattatttttaataagatagagataatttgaatttaattttttattaattaaacgctgtgaacgaaatgttccggcaacatttcggctgtcgctatacattagcaaataagttcatttaaaatttaataaatataatttttttagttccttttttaatcattctgtcaatacttttcttatctgttaaataaa

SEQ ID NO: 50777 - DNA, 1447 bp, Heterodera glycines
atgcacagtgtgccaatgctttggcaaaatttgtacttattcgttggcacaaccgccgtctcatatcgattggaatttggagttatgccgagcttggaacgtgagaaatatgtcttggcattttataaatgtacaccgaaaaatgatttttcagttattcgtgcgtctggagtatccgatttttttaaaatgtttctattgagagcaaattttttccttttaaaatttctttagcaatttttgttacaataatttaaaaatgatcaatatccaatatgagtttgtccacattttaccaccgccactcaattaattaattaactactcaatgaattcataagcaaaacgttctgcagttgcgccaataagacgttgggttttgagtctgctgcagaagaaacaatacagaatttgtcattaattttcaaattcaaggacatgattatgaaaataaaggattaaaaattgttgtctgcttgataaaagaaggagaaaatcattaaatttaggaatttaaaaatgcatgggtagaacatgcataataaaacaaaagcaattgtatcttaaaatatatgcaaggccaagatttttaacctacctaaacgaacttaagacattatattacaagctaaaagatttaataaatttttaacaaaattctatcaatatagcggttttaaaagcagtcgcacatccgtttttatgacttttctatccgtttttagcaccttcaaatattctcaatcgatcggtgaccaagtgtactctagcggtgatctgctacatttgccaaacgtcagtttaacttacgcgcaacaattttacttcatcgtttgctaattgcaggtctcaaaaatggcactttgtttaacctgatcaatatttatactaaaaacatttatcaatcttaaccttttaaaatttaattttactattttttttatcaggagctccaataattctccgtaaattggatgttattgtggctcctgcattctgccacaagccatgttttcgatgtcatggaatgcgtctttttcgcaaaacagtttggtagaaactcagaattggcactattttttcggactgtttccttccattttattaattattcattgttttttatctgtttattacattcaatatcacttaattaaaatgaaaagctttattaaaaagcatagccaaatttttagaattcaatgaataattgtggaccaggttgacgatttttttaattttgtaaaaaaagaaactaaaaacttaatcatatacaagaatttaatttccaaatcttaatataaaaaatttttatgaatgaatgtaaacactgctcataagcaccggacaaatattaactaaaaataattttattacttttgaactaattccatccacatgagcaacattttacaaccttaaaaatttttaaaaatatttaaataaa

SEQ ID NO: 50778 - DNA, 4831 bp, Heterodera glycines
atggataatgagaaacagcaccaatttcttcttttgtgtttcctcgagaaacacgaaaatgacgaggacaaattttcggcttttgaaaaattgaaagaaaaatttgggtcagcaactacacacagaaagcaatattttcgttggtggaattactttgagcgcggcgattttacgtttttttcagaccgtggaagtatgtataatgaattaattaatttaaaaaaaataaattaaaaaaacattataatacttagagccaactccgagtccttctccagcgcgaaatgctcgagaaaaatgtatttaaaataatttaattcattcaagcaatattaaataatgcttatcaacaatattaaaaatcacgttttaaggcacaactctaaaaaatacgcctacgtcttcatatggaaaaggcaaaacaattatttgacttaaaattaaaaaattaattataaaggctaatagtacataaaattgatttaattttaaaaaattttaaacttcaaagtgaaaatggatattacttattttgttttgggaacttttaaattgaacattaaaattgagaatgcattaaattaaaaacggctgatcacttcaattctgcatttaacagcttttccaacaaataattgaatttaataataaattaatttaaaaagaggtttaaaattcttaattgctttgaattcatatttcaattaatttatataaataacaactttatttatatttcaattaattttgaggcgttttggtcgattattcatctgaggaatcgttttgccatgacgattatcccgcctttgatccttatggaaaagggattttggacggcaacgtatcggacgaatcaatttgctttgacgattatgccgctttcgatgagccaatttacagttctcgtgaacatgacaacgatttgggaattgtgagagcacgtatgaatcaaaaaacattacaaaaacattttaaaaatattttagcggaattctcacagccactttttgagaaaatgccgtcgttgcttgaaaaattcacaaatgttatggatttgtcggaatgtgagtgaaataattaactgtgaattaaaatggtttaaagaaagacaacccaataatttgactttttcttgactattagacttatccgattagcttaaataatattcaaattttttcaaaattttaaagtagcacagttaaaacacccgttaatgctaatgatttttaaaaccaaaatggtctcgccaaaattttataattatgaattgtttttcgtattcgtctaatcagaatgatctctagcctcaacaaacaagcagccacgtgatcagcgaactcagcagtttgttgcaaaaaaaatttgcgttttttgtgctcaacaattgaaagtaaatgacgaacgtggcgtattggactgtgggcactattttcatgcacaaaagccatattatgattggtaaatttattcaattaaatcagttcttttaaagaaatttaaatttcagtatttcagagaatttttttattgaacaaaaaaaatattattaaaatatttttcactttacaataaacttaccattcgagattttttggttgccattagatttagtcctaaatgaggcattttaaatttgttaaatcaaataaaaaagttaatttgtctgtaagcgactgctgccggcaaatttgaggaatttttattaatttgttaacagattttgtcctaaagaagggccagtggctttttgtgtaaaataaatcatttgggaaaatgtcaatttccaacaaattgccaaaaaattgtattttcatcaaaaagtttgacaatcgaaagtcaacaatcgacattaagactcatccctgatcaactattgctatgtaaattatatttttaacatttaagggtcgccgatggagggtttaagcgatgcccaaaatcgacttgccgaaaagctgcatacaaaaagtgcgttaaatgcagaacgggtttgggaaatggcacaacacttcatgtgcgctgtgattgcaaggaatctgctgctactctattatgcacatctgatcaacatcgaatgtaaataataatgcttaatatgcaatagtacatttgaatttttattgcaaaaaataatgggtttaaatggaaattaatgtagaaaatgattacagattgtgggaaacaaatggaagatgccaattttgcaacaagccctactcagattattgcaaaatttgcaacaattttttttcatttgatcacaataccggttcaatgccaaagacggtttatctatattgttgcgcaacacgtttccactattcttgctggtcagttatttatttaaaaaagtttaaagtttatttttataatgatttggtctatgtttagttataatttacaacaaaaaataaatttcaaaaaacaaaattgaataagcataaaataaaagctcattttactatcttttatgattttttaaaaatagtttataaattttgtattggttttataatttcaataagatttaaaaataattcccttaatggacaaatatttaggtttacgcccgaaccaaaagattgttgtccattcgattgcgaaaatccttgggaaggatatgatgtattgctggataagtaaaatatatttaattaaaatattaaatattgaaagcaaaaattcgggacggaatttaattgaatttttaaaatatagaatgggttttccgtccagaaaagagtttttaacattctcacagaatttttttttttattttagaaattgtaaattgaaaatgtaaacattttatgacaaaaatataaaaaatgaaattcaattattaaaaaataaattttttatacttatgaaatatacttttcaatgatttgttatgcattgatttgttagagcggcttttttttcaaaaacacatagaaaaaagagattttgtcaataacgatgtcatattaaataaaatataaattagaggaaaaacaaaagttttaaaaattcaatttgattcatgattaacaaagccgaattctatccattccgagtaaatataatgaaatttaattgggtttttatttaaattggtaaaataaagaaataaaaaattattattatttagccaatcttgctgtgtgtcagctccattgagtccgaaactcattgaggccgagcggaaatattgtgaaagaaatggccaacattttaaacctgtctttgccaatttattgaccgatgttatcggaaacgatccattgttcaggtctgtatgaaatattttaaaaattaagaaaaccatttaaataattaaatgaataattttgactaaaataagaccggtaccggtacaatttagagtaaagcataaattaaaaaaggaagtatttttgacgaaaatttttaccggtttcagtttggtgaaggtcttagtgcataaaagcatattttgggagttttaagaattaattcatattttgcatttttagaaaaaatttcggccatttttgtaaattttcatagaaaaatgaaaacgttaaaaacacacccccccccccccctaaggatgaattttttgggaatttaaaagtttgagcttttttctgattttatatacaatttttggcgaattttatgattaaaagccattacattttagttcactcagtttggttttttacaatgcatgttctgaaaagcattgcgccaatttgcgtaccgtttacgccgaaaccattcacatcttatgctccgatcccgcttctgcaggcgtcaatttggaactgtgcgaatctaaagaaaagtttttggagaaaattgagtttggcctttgcgtgaaagccccagaaactctttttgaccatgccacaaaaatggttcaatcaaattactccaacaaattttgcgcacttattttggccattgcattcaaacgcccaatcatttggattgagccatcagcaaaaccaggaagcattgtcagaatgtcgcgcgaggatgccaaaagacttcttcctcaatgggatgatcagagccggccaaaaacagtgtcctattatttgccaaatgggaaaataatggtaatatatgaatatattaatcttttcataaattttcctttatggattaatagtaaatatggggagctttattgattaaacaattttgtcaaaattaatttaagaaatgagcacaaaaaagtatttccgcgcttaaatttttaaatttcagtgtcactatctgtcacttacaaattttacaaaatacaccctttaaaaatgaaaaactttctcaaaaattcatttcaaaaatttatcattttattctgttgacatttttggttttaaaaataatttaatcacaatacagatttggcttaattttgttatttaattgcacagattttgtcatttttacaccctaaatttgagttaagagattgaaaattttttttgcttaattgactgaaaattatgccagcatatataatttatcgcatttttttcactatttttggcactgttttttcactattttagttaattatttcgagattttcataagtaaaagttgctgccttaatactaaaagttccaaataaattttaattattttttcaaattttaaggaatccacgttgcatcacccaaaaaataaaaagccacagcgagcaattgaagagctgttttggacttttcaaatgaacattcaaaaaacgacctacacggtccaaaatcctattttgatttggcataatggctatggcctagcttgtcctattgttttgtctcgtcgcacacctccaaaaattatttaa

SEQ ID NO: 50779 - DNA, 517 bp, Heterodera glycines
atgaacactttcccaacttcatttgaagacccatccaaggtgggaacagttccaaaatttggtgctatatttatagtgcccaatttataaaaaataattatttgtaggtattcaataaactttttattggactctcaaaacacttttttataaagaaacatttcaaagttttccgtcttcagaatttattcaaaaaagaaataatgcataattaagttagcattgttaagcatttgttaaatttcaaagttgattaaaaaattataaagatgcaaaaaataataagaaattaattaaaggtcagattttaagacggaatacgtatgaagagtaaagaattaattgaaatatgagttaaaataaggcatgcaaaccaacaacaaatgtcaaacaaatgatggatattaacttggttaattaaaagtttaaaaaaatgctgatcgagttaaaaattgattaaatatgaaagaagaaccaacaatcgagtatgaatttgattaattataaaagtataaaa

SEQ ID NO: 50780 - DNA, 1067 bp, Heterodera glycines
atggataaaaagtgaataattaaaaacagagggaaacaaaaactactcggaaaatcagttggtggaatttgttgatttaatttatttacgtttaaacacattttttctggatgtgttttacaatttaatttaataaccggaaaatgcgcactttccggttgtgtttttgttttgaattttatttacttttaaacccaattttttccggttgtgttttacaaatgttagttaataaccggaaaacacttttttgcgtgcattttttaaaggttatatagtaaccggaaagcacttttttaaaatttattaataaccggaacacatttccatttagttttttccggatagtttcaacggtttaagtaaaatgcggaacctgtttaagtacaaaacctaaaaaaaatacatacaaaaatacaaaagcatgccgtcttaggaatttgatcaaacatattgacactttttattccttttaaatctttggcattttgttttttaagcaaacaattttctcctcttttttaaccgtcgatgactgaacttcaaacatttatccttttgcaatttaatagtttttcatgtttcaaaacagggattgcacagaattccgacttcagacattttggggtcgaaattcagatttcaaattgaaaaaatgtgggaatttttttaatgttttctgaattttttgccatatattttttaatttttgtgtatagtttttactttattcacagttattttagttcaatttcaattctttttatttcgttttcgcgcactttcgcaaatggcaaattcgaagcgtgacagagttggtcagaatttattattcttcagccaaatttgtcgataattgtttcattttgttttttctttcagtttctctcacaaaaatgaagaagagccgcgagggcaaacaaaacactttgaaagaagcaagaaaaaaaaatgcattttttgtttgaaaattttaacaaaaattttcagggcagagaatgcgttgagcagtacaaacattatttgtcttctcgacgaagagtttgggctctgcaagactggtggag

SEQ ID NO: 50781 - DNA, 934 bp, Heterodera glycines
atgagcgcactttttagaggccaaaacggactgacgttcaccaatgcgaaagcaaacgaagtgcaaaggtcggcgggggaaaattccaattccttttcgtacatttatttctttctgtttttggtgggggcgcattttggtggaacatttttttaaaggtttctacgaattcgaagcacttcccttttttacatttttgtttgtttttcccgttccaatttttaaaacagaaagtttatcaacttttttctttattttttttcaaattttttaattttccaatttcggcccggcaaatggaatgttttttactcacaaagcgacagaaattttaaaaaaatcctaaagttttgaaggtgttcaattgcaatttgttgctctattttttgcagtttggcgtccaatcgatgccggattttcattttggttggccataccctttctttttcctatttggtcaatccataccaacggtacaccccaaaatacagctgtgacataacactgccgggtctaatttttttaaaaatttatccaaatttttttttcaaaaattccttgaattcatcattaaatttagaaaaaagcacgtgcaatttttttaaaatttattccgggctgtgttttgtcattttccgccataacaggcccgtagcctggttaattcaaaaaaaaactgtttttttaaatcttaagcaattttcttaacaaatgttttaaaatttcataaaaaattgacctgtgggcaccgcacttaaagacactaccggacctccattttacttttttttaaatttagatgcaaaaacgaaaatattttggtgaagaaaagttctttggattcgcccctctgaaattttcttttttctgaccgctggtattaaaaaatttaaaattttctaacgatttttcaaaatttcatcatgaattacta

SEQ ID NO: 50782 - DNA, 965 bp, Heterodera glycines
atggtaaaatatttaaaattgaaatgcgttttttggtaatagtttagatgctatccccttttttaaaaaaataaattcaacttttaaataagtcataaagaaatgagtgtctttgattttttacagaaagcaactacaatagttttccggtttttgttgccttttaaaggattgtttccggatatgcgaaatctaatgtattttttctgtttttttattcaattaaccaaaagcagaaagtgttttccggtaaatgtaaagtcaaaaacttgaaatgttttccggaacaatagaaatagttttttggaaaagtaaaaatcgcaaacaaaaagtgttttccggaaaagtaaaaaccacaaacagaaagtgttttccggaaaagtaaaaaccacaaacagaaagcgttttccggaaaagtataaaccacaaacaaagagtgtttccggaaaagtaataatcacaaacagaaagcgttttccggaaaagtaaaaaccacaaacagaaagcgttttccggaaaagtaaaaaccacaaacaaaaagtgtttccggaaaagtaataatcacaaacagaaagcgttttccggaaaagtaaaaaccacaaacaaaaagtgttttccggaaaaggaactaaaatatgattaaattcataattttttttgctgtttattaactaaaaagtgttctatttttttaattgacaaaaaaaaatttgtgaaaaaggtttgcatggttgtttaacaaatgttatttaagtgccggaaatgcgcaatttcaggttgtaaatccacattttccggttgtaaatgcatatttaccggttgtgttttacaaattaaatttatgtgccggaaatgcacattttccggttggaaatggacattttccggttgtgttatacaaatgtaatttaagtgccggaaatgcacattttccggttggaaatgcacattttccggttgtgtaa

SEQ ID NO: 50783 - DNA, 327 bp, Heterodera glycines
atggaagacgaattgtcattggaagtgcccgcggcagtggcagatgccgacttgtctttggaagtgccagaggaatggtcagatgacgatttggtgttcgctccagatgccttggcagatgccgacttgtctttggaagtgccagaggaatggtcagatgacgatttggtgttcgctccagatccattggcagatgccgacttgtctttggaagtgccagaggaatggtcagatgatgatttggtgttcgcagttccagatgcattggcagatgccgattgctttgaagcggaagtggtcttcttcgaagttttgacagagccgtaa

SEQ ID NO: 50784 - DNA, 1877 bp, Heterodera glycines
atggaccgacggtaagaaaggatttaaaaaattgcaagttttcatttacccaattttcttatgtttcagttggatttgtggcgacgtgtggatggacattctcccatcttttgaccatgctcaactcggactcaaaatggcattgctttccgaccgtttcgatgttttggtggacaaacatttcgatggaaaaagcgaattgacaatttggagacgtatcagaattcgcaaggacaaaggaccaaaagcgaaactgtctgtggcgatcgatggcaaatttgtgggatttccattgccggaccattcgctgccaaacaaaatccgttttcgtttccttcagattcagtagatcaaaaactatacagaaaccaattaatatggttggtcatcttcatcattgttcccccttttcagctacattgaccattctgtgctcacatttatccgttcaaacaagccaatttgggacagaatgggcaccaaatttgagttttttgcgaaaagcattcgccagttgggctttaccagtggcgatgcctttgacaatttgcgtcgtctgatctcgccgacaattctcactggtcttgaccaattgaattcaattgattccaatgaactgttccccgatggaattgctgacgatggaccaaatgcaactgctggccaagctttggtcaaatggcttcacactccgagcaaaaatggccaaccgaagcgattgtatcgcaataattattttggtccacagaatctcgaatgggtcaacaacttcaaagaggtgtgtctagccatattttctataaattgtttttgtttttccaaatttgtttagacatttatcagtgccaccacttctgtcagttacaatattcaactttattttcatgtgaacacaattccaactgaaccatttgaattggtgaacaaacggacgaatgaaaagctgacactgaaacaggagatcgacgaattcgacgtaaatgtgtataattggctgttgcaacggtgcccaattggggagacggcgagggtgccagcaattaaatggggagacagcttaaatccgagtgccaatttgaacagtatcagatttgatctgtggagtttcgataaatccattgagtgagcagcagcaatagcatttgaattttatcgaaaaataaaatatttaattaattttaggccattgtcgccaccaacggaagaagaaaaagaagaagaagaagcggataaaagcaacggaaatgtcgtctgctgattaagtgtacggaaatgaataattaaattgattaattgtatttgagaaatgaattttcgattgaaacgattatctagagaatttggaaatccattaagtagttaagggttcactcatccccccgcttagaaaaaaataattaaaaattcactagggtaataagaaaggttgcgatttttagtgacgaaaaatctcgagagtttttctaaattttctcgcatgagagtcaatttcaagtacgtacttgccattcaagtacatacgaatccgagctaacaaataagcaagcaacattcaaatcaaaggcaagctttcgtgcatttgaacgtgcatcgatcggtgagaattaccaaatccggaaaaccccgatcagagagtccgcctcagtttcctagcaattaacaatttttcaatcatcgatattagcagggaacggatttttaggttttcacctacttttttggggggataacatatgctgagataagcgcaaaaaacacattttcttcgatcacttttcgatttagagcgacttttaaacaattattatgacttgtgaaatttttaaaaaacttttaaaatatttctgctttaacagaaacattattatgaaaaagca

SEQ ID NO: 50785 - DNA, 600 bp, Heterodera glycines
atgaacagacggtaaggaaaatttttaaaaattacaaattttccatgtttcagttggatttgtgcggatgtttggatggacattctcccatcttttgaccatgcccaactcggcctcaaaatggcattgctttccgaccgtttcgatgttttggtggacaaacattttgatggaaaaagcgaattgacaatttggagagcaatcgaaattcgcaaggacaaaggaccaaaagcgaaactgtctgtatggaccgatgacaaatttgtggattttccgatgccggaccattcgctgcccaacaaaatccgctttaaagaccttcagattcagtaaatcaaaaattatatagaaaccaattacttaatattagggttgcaaccccgaaccccgacatttttggccattttcggggaaaaccccgaaccccgacgcttccaaccccgaaccccgatcggggtcggggttaaatatacactcctaagaacggaatttttgtgggggaaaaagcaaaacatttatacaaaaattgatttttttaaccatcttgacaaatttttatgaaatatagtaaattttgcttttttaaaccaaaaataccta

SEQ ID NO: 50786 - DNA, 3957 bp, Heterodera glycines
atgccaattgaatcatttgaattggtgaacaaacggacgaaagaaaagctgacactgaaacaggagatcgaagcattatccaacggaataatttataattggctgttgaaacggtgcccaattggggagacggcgacggtgccagcaattaaatggaaagacagcgtaaatccgagtgccaatttgaacaatgtcacttttgatctgtggagtttcgataaatccattgggtgagcagcaattaggatacggagaatccaggaaaaaaatatatgcatttacaaaaataaggaagccgtgtaaattatgtatgtattgaacaaaatcagcaaaacacccttccccattactctctctttatatacgcataaattaatgcgttatggccattattttggccaacaaatcattttaatctccccccatccgttcatccgttttcaaatctctcacttttattttggtagatatataaagaggtcgaaaagacatttttgatgcagaatagagaaaaaatgaacagacggtaagcaatttcttttgaaaaacagcatgggtaaatgaaaatgaaattcctcaccgtctgtgcatccaaaaagtctttttgacccctttatatattcagtagttcttaattgttgtgcgtaagaaagcattttggtaacctttcaaaaagacgaagaagaagcggataaaagcaacggaaatgtcgtctgctgattaagtgtacggaaatgaataattaaattgattaattgtatttgagaaatgaattttcgattgaaacgattatctagagaatttggaaatccattaagtagttaagggttcactcatccccccgcttagaaaaaaataattaaaaattcactagggtaataagaaaggttgcgatttttagtgacgaaaaatctcgagagtttttctaaattttctcgcatgagagtcaatttcaagtacgtacttgccattcaagtacatacgaatccgagctaacaaataagcaagcaacattcaaatcaaaggcaagctttcgtgcatttgaacgtgcatcgatcggtgagaattaccaaatccggaaaaccccgatcagagagtccgcctcagtttcctagcaattaacaatttttcaatcatcgatattagcagggaacggatttttaggttttcacctacttttttggggggataacatatgctgagataagcgcaaaaaacacattttcttcgatcacttttcgatttagagcgacttttaaacaattattatgacttgtgaaatttttaaaaaacttttaaaatatttctgctttaacagaaacattattatgaaaaagcaataaaaaaacaaaacaaaaaattggcgttactttttttcaaaaaatgcacccctcagaatcgatttttcaaaaagcaaagatcctggacccatgatttggcggacgatcgaacatttttacgcttgaatactacatatcttcaaatttcagtacttcttgaaagggaaaagtgtgctctaaaattgcagcaaacaatgaacagacggtaaggaaaatttttaaaaattacaaattttccatgtttcagttggatttcggtcggggtcgttttcgcgtggccattttcgcgtggccgttttcgcgtggggacgttttcgcgtggccgttttcgcgtggggtacgttttcgcgtgagtacctgtttaggactgaaattggtcggatttgtgcaaaacatctatgtttcgaatcccgaacccgaattcggacaaatttcttaacttttttatttcttgcggctagtatcttctacaataatttgtcagtttggtcggatgtgcgtcaaacggaaaaaataattaaaattggttctagtcggttttacgcgtcccatgacattttacgcgtcccataacattttacgcgtcccatcacattttacgagtcccaacaacactttacgcgtcccatgacattttgtgtccatggcagggatggcattccgaggccccaaaaattttcggaaatcggaattccgtgccatccctggtctcatggtattatagttgtcctaataactaagagaaaaactatttttttttgttaggtattcagtaaagtttttaactataaatttcgttgttaaacctaaggttatcatgacaactcatacacaggcaactcgaacaatggcttattgttagactaggcctaagtttaggcttttgtaaatttttttttcttatagttgaatttctgttgacatcaataagtgtgcttagagttgcttttgcacttctcttttatatgcaaccacgcgaaaacggccacgcgaaaacgtcctgtcccgtaatttatagacgtattgaacccaattttattttctttgaataaaaattcaattttttgactaaatcatgaaaatttacaaaaaaaagaaaaaaaataaaaatttaccagaaattcataaatttttggtgaaaatatgttacaaaatagaccttaaatttcaaaattcacccggcgctgcctatcggcatcgccggcgccacaaaaaaacctattttttcttaaaaaaaattggcccaaaatcgaaaaaatctatcattttttggacaaaatctgttaacaggcccatccaaattttcaaaatttttcacggcggcgcctatcggcaccgccgaacccatttctcctaaacgtctttagataaagagcgccgcaaaaaaaagaccaaaaaaaaaagatttatacagattttcgctgaaaattggccattttaaatgctttaggtatgtgtttttaattaattctatacaaaatatttatgataaaaaaaatataaaaagcacataaaattattattacgaaatttaaatatttttaagcaaaaatttataaagttttttgactatttggcataaggcaaaaattgaaaaaccccgaccccgaaccccgaacgatttggcaaccccgaccccgacacttccaaccccgacgtcggggttgcaaccctacttaatatggttggtcatcttcttcatttttccccttttcagttacattgaccattctgtactcacatttatccgtgtcaacaaacaaatttgggacagaagtggcaccaatttggagttgtctatttcaaatgaacaaccaatttgggatgttttcgcccatgaaatttggccaatttttgcggcaaacattcgccagttgggctttaccagtggcgatgcctttgacaatttgcgtcgtctgatctcgccgacaattctcactggtcttgaccaattgaattcaattgattccaatgaactgttccccgatggaattgctgacgatggaccaaatgcaactgctggccaagctttggtcaaatggcttcacactccgagcaaaaatggccaaccgaagcgattgtatcgcaataattattttggtccacagaatctcgaatgggtcaacaacttcaaagaggtgtgtctagccatattttctataaattgtttttgtttttccaaatttgtttaacatttatcagtgccaccacttctgtcagttacaatattcaactttattttcatgtgaacacaattccaactgaaccatttgaattggtgaacaaacggacgaatgaaaagctgacactgaaacaggagatcgacgaattcgacgtaaatgtgtataattggctgttgcaacggtgcccaattggggagacggcgagggtgccagcaattaaatggggagacagcttaaatccgagtgccaatttgaacagtatcagatttgatctgtggagttttgataaatccattgagtgagcagcagcaatagcatttgaattttatcgaaaaataaaatatttaattaattttaggccattgtcgccaccaacggaagaagaaaaagaagaagaagaagcggataaaagcaacggaaatgtcgtctgctga

SEQ ID NO: 50787 - DNA, 1482 bp, Heterodera glycines
atggaccgacggtaagaaaggatttaaaaaattgcaagttttcatttacccaattttcttatgtttcagttggatttgtggcgacgtgtggatggacattctcccatcttttgaccatgctcaactcggactcaaaatggcattgctttccgaccgtttcgatgttttggtggacaaacatttcgatggaaaaagcgaattgacaatttggagacgtatcaaaataagcgaaactgtctgtggcgatcgatggcaaatttgtgggatttccattgccggaccattcgctgccaaacaaaatccgttttcgtttccttcagattcagtaaatcaaaaactatacagaaaccaattaatatggttggtcatcttcttcattgttcccccttttcagctacattgaccattctgtgctcacatttatccgttcaaacaagccaatttgggacagaatgggcaccaaatttgagttttttgcgaaaagcattcgtcatttgggctttcacgatgccgatgctttgaacaacttgcgcagtcgcatttcaccaacgattctcactgatcttgatcaattgatttcaatcgattctggtgctctgttacgcgatggaattgctgacgatgggcaaatgcaactgctggccaagctttggtcaaatggcttcacactccgagcaaaaatggccaaccgaagcgattgtatcgcaataattattttggtccacagaatctcgaatgggtcaacaacttcaaagaggtgtgtctagccatattttctataaattgtttttgtttttccaaatttgtttagccatttatcagtgccaccacttctgtcagttacaatattcaactttattttcatgtgaacacaattccaactgaaccatttgaattggtgaacaaacggacgaatgaaaagctgacactgaaacaggagatcgacgaattcgacgtaaatgtgtataattggctgttgcaacggtgcccaattggggagacggcgagggtgccagcaattaaatggggagacagcttaaatccgagtgccaatttgaacagtatcagatttgatctgtggagtttcgataaatccattgagtgagcagcagcaatagcatttgaattttatcgaaaaataaaatatttaattaattttaggccattgtcgccaccaacggaagaagaaaaagaagaagaagaagcggataaaagcaacggaaatgtcgtctgctgattaagtgtacggaaatgaatgattgaataattctatttgagaaatgatctatctcaatttgttgtgcttttttctctcagaaatgcttttgttaattgtttcgttccaattatataaaacatttattttattggcttttttgttgaacatttattaattatcaatgaaacgattatttatagaatgtggaaatacagtagtttttgtttccttcctcctcgcttagaaaaaaattcactagggta

SEQ ID NO: 50788 - DNA, 324 bp, Heterodera glycines
atggaagacgaattgtcattggaagtgcccgcggcagtggcagatgccgacttgtctttggaagtgccagaggaatggtcagatgacgatttggtgttcgctccagatgccttggcagatgccgacttgtctttggaagtgccagaggaatggtcagatgacgatttggtgttcgctccagatgccttggcagatgccgacttgtctttggaagtgccagaggaatggtcagatgatgatttggtgttcgctccagatccattggcagatgccgattgctttgaagcggaagtggtcttcttcgaagttttgacagagccgtaa

SEQ ID NO: 50789 - DNA, 924 bp, Heterodera glycines
atggacttcgccgacatcgctgaagaggatgacggcagcgaggaattcgagatatcatccatcatgttgtacgaccactgcgcgtgtatgctctgtggacgtatcagattcttttatctgatcgactacgctacgccacacgtcgttacgaagtggggcgggtcctacttaaaggacgaaaatgtcctaacgcatgtaaaattcctgataaagccataaattaataataagcataatttctaggccggcttctgcctcggcagactgctcacctttgtgaacgccttcgcaatggatggcaaccggcttaacgcgcaaaaagcgcgccaagtgtaggagaaaattaggcataaattcgataatttacaaaaatttagcgtttttgcaaaaaatggacgtgggaatgaggacttttccttatttggaataattgatggccagcgtgttgatgtggtaatgtgccaaaaaatttagcgcaaaatgagtgctcactcacatgttcagaatcgcctatttgccactcccgtcgccactccggaccccacccccgtcccctcaccggtggttgaggttgaggtggaaacaaccgtcgttgtgagcatggatgaggaggacaccaacgaacagcagcagcaccagcagcaacaattgacacattgcgccccggcaacacagcaccaacaaccgccgccgatgctttcagctgccgtccaacaggcgatcagcactttgcaaatgcgcatgccaccactgcccgtcttcccaccattcgcaatgcctttggtacttcctccgctacagttcgcttttcaaccgcatctgcaacaccagcagcagcagcagcagcagcagcaatttgcgcctccggcactccaaattgtcccgctcgatgatgccccggcgcctctgccgttgtgcgatgtt

SEQ ID NO: 50790 - DNA, 4356 bp, Heterodera glycines
atgtcgttggaagatcacaattattgcggcgagttgggccgcaacgaagaaacgcccacaaagagaagaaaaagaaatgatgatgatagggaacagaaatttcaaaaaaactgcattcgcactctgagcgccgacaaacagtacaaccaaaagttcaaagtgcagagcgtaaagtcgacttttgtcatcgaaaatttgcccgccaaccccgagtcaatgctgcgcgcattgttcgctcactgcatgtcaaccgccctggacgagtcacagcagaacgggatcacaccggatcaattgggcgctacaatctcttcagatctgctaaatccgagcatatggattcccatacgccgcatttccgacaacaccgccgactcaattatgaaccgcttccttgaggtggcacagtcaaaatcgcgggagggctctctgtggggctcgccgttcactgtgaccatcacaacgttggatgttgcgcagctacctcatcggcaacaggtgcgtggcagtgggaaaaggacagcaaattcagtacaacatatcatcaaagaaagtgctcttctgcggatcaacaacaacgatgatgcatattgtcttttttacgctttggagacaagcaggaagtaccacatcaaagagatgagccgacagaccttttctaaatatattaatcggcagaatgggcgacgactggaagacgtgtttggactgatgagcagcgcaaacattcgcaccgatctgagagaatatgacgcggttgtctatgtgccaattgtcgtggactattggaatcggaaatacgccacagcaaaccagcgatttaaggtgttcatttttggcgctacaggcagctatcggccaaaatttcaatatgggccggacaattacaacgtcgaaatcccgctctaccatcacaacggccatttcgacggaattcgaagcggggtgggcaaagcggtgtttgggcgtgactactactgcttttcgtgcgagtgcccctacgataatgccaatgatcattcactgcagtgtaaagcaaagtgcataaactgcggtcgcataggagtggggcgaccgtgccgagcggatgacaacaacgacaattattacagagaatgcacagcatgcggcaaggatttcatgagccaagactgcttcagtcaccatttgtcgagcaatgtgtgccgacaattcaagaaatgcaaacagtgcggagttgtgtggaatgtcaaacaaaaccgacgaaaaggacgcagcggacacgtttgcggtgagaaattctgctacacctgcaaatgttaccataagccggagcggggctgcttcatacagcagttgaaggcgcgccgccccacaaagtacagactgatcgcctttgactgtgaaacaacacagaacacgcgaattgagggcgaccgcagacttcattccgtcaacttcatctcatgctatgtcgtctgcaccaagtgcataaacgaaaatttatggcgaaattccctacaagcgccatgtggcatttgcggtcggcagcgcaccgtcacattctcccaccgcgcctatgaacgcacacaaaccgatgcccaattcatcactccttgtccaatggcggcctttgctcaatggctgctcagcgaattcgatccgcgctatcccacaatgctcttcgcccatttcgggggtcgctttgacaacattatgctgtttcggcagttcttcctcaacgggttttgcccgcaaatgatccgccgtggtaacaaattatacgaaatgaaaattgcgaggggcgaaaaaaacccggaaatcatcgtaagagacagctggaaccttatgccggtgccactcggcgctctgcccggagcgtttggactcaatgtgcaggataaggagttcttccctcatttggcgaatgttgaggcgaattatgggctcattctgcagtcgctaccgccaaaagctgactacttatacggcggaatgacgcccgaccgacagcgcagattcgaccagtggtacgcggaacaccaccatcagcagttcgacctgtgtgaacagctcgcggcctactgcaccaacgacacgcgcatactaattgaggcgttggtcgcttttcgcacggagttcttgacgatcagtgacccgctggagcggcatggatgcttggatgacgacaacgacgacgaagatgaagaggaggaggtggatgacgacaatgcatttgaagtgatcggcggtggcattgacataacgtgggagccgatgaccatcgccagtgcctcaatgagacactttcgactcaatcacctcaagcgggatcagctcgccattgtgcccgagtgcggctacgacactacaaacacgcaaagccttgtagcgctcaaattcatggactggtacgccaaaaagaacggggtgagcatccagacggcacactcgcccggcggagagaaaaaaattggccagtacactgtggacggatacatcgcggcgaccgacaccgtgattgaggtcaacggctgccactggcacgcgcacgaccacccgcgtcaccgctttcagccccaaacagtgatggcgaatgggaaaacggcgcagcggatacgggaggacgatgcgcgacggatggccttcatcacatcccaggtgcaacaagtgctcgtattttgggagtgtgaaatcaacgcggagaagcgcaacaacgacgaaatgaagcgcgcctttgcgcagtacaaggacagcggcccaattcgtttgaaggactgctaccatggaggacgtgtgggtccacaacgactacactacgaggtgccagaggggtggcggatgaaatattacgacgttcgttctctctacccccacacgaatgccgtgacagcataccccgtgggtcacccaacacgagtgaacatcattggtgaggcagagcaggcggttgactggcgacgcgccgaccaggtgccggtccgaggcattctcaaagtgttcgttgtgccgccccatcacgttgatgtgcctgtactgcccgtgaaatttgatcagcggcttcttttcccgctgtgccgtacctgtgctttgcaacatccgcatggagccgtcaatgaagactacgagtgcacgcatcgcgaggatgatgagcgggggtgggtgtccactgtgacgtcaatcgagttggaggaggcgcttcgcaacgggtaccggtgtacggcctactatcgctccgtcgagtgggacgatacgcggtggagcgaccgcgtttttcgaggctacgttgcagaattcatggccatgaaaacacatgccagcggcttcccggacgaaattggtacaaccgaggaagatcagcagcaattcatagaggaatgtgaggacaaattcggaatccgaatcgagcgggaaaagatggtgcacaacaaggccaagcggaccatcgcaaaactgtgcaacaactccctgtgggggcgcttctctttgcgcaatgggttgtccaaaacgattgtgaccgactcgcccgcggaactgcgcgctctgcttgacaacccagcggtggaggtcagctccgttgaccagctcaccgacgaatgcgttctggtcacctatgcggccggaaacgaatgggtggaggaacacgagtgctcaaacattgtgctctctctttggacaacatcggtggcgcgcctacacttgttgcggctaatgcagacggttgcgcgcgcaccaaactctgtgctcatctacaccgacacggacagtgtgtgtttcgcccatcgtgaggcggacgggtgccctctggagacgggaccccatctaggcgacctttcggatgaatggccggaccacgaactcgtggaatttgtttccggtgggtgcaagcagtacgccctgcggatgcggcaccgccaaagcggggaggagaaaacggtgctcaaagtacggggcataacactgagcgccgatgcctgtcagcttctccactttgacacattcaagaggagtgtcctacgctacgcaatgtgccattcaaatgaggatgatgaagaaggagatgatgatgatgatgacatttgttcaattttgattgagtaccccaatttcctgagacccaacattaaggacgggactgttatttctgttaagctgtcgaaacgctatcgccctattgtaactaagggggttgtgggaatgaatgcaattgtacatgattttggttttataaaggcgtaatttatacggactgcactttttaaaaatgcataattaacaaatagaagattacaatttaaaataatgaagcgtgagaagttgcaaattttaggtagaaaaatgcataatttagtaagagaagtagcagttttggaaata

SEQ ID NO: 50791 - DNA, 865 bp, Heterodera glycines
atgcagtggattaaatttaactgcacgctttgtccgatcggtctgcattgtttttatccgcgcaagtacgcaaagcctgtgctttgtgcgcatcccagcgtccgtaacatcacggactttttgagcaccggtcagcttgacgaagcggcaacgacaacaacaacaacaaccgcacttccgacaactgcggaggtgtcggcggcggcggcagaatgcgcacctccgcccgcgcatttgaccgcgtggatcgcggtgtgcacagcgctggtggcgcttttggtgattgcggaggtctgttattaattttggtcatttatccgctaaacccctattcctcaattaagcttgtgcgcgccggattcaaagtgcgcaaatttttgaaggaccgcgccttcaaaaaggggatgctgcgccgacatcgccagcgtgagtttctcgctattacattttagcaaattgtaattaacaatttgtacaggaatgagcgccgcaaggcgcaaccgccagccggcaagcgcgccgactccgctgattttgccggctatgttggccggcgtttctctgcgcccaacgggcgtcaatttgactgtggaccgggtgggcaattttaattaaattaaaatctttatatattttaatttctcactcattaaaattacaatttaaatttaaaggcagcggggcagcgccgcgcggatggtacggacgaagagcccgtgtacgatgaggtgccgcttgacaccgtggaacaaaggcgtgatgaagaaaatggggaggaggatgaggaagatgatgacagtgatttttagtgattcggcaagcgatcactcaccatttaactaatcgatcgatttttcactttaaa

SEQ ID NO: 50792 - DNA, 676 bp, Heterodera glycines
atggtcaccaaggagggaatcaccttatggtgcacacgcatagaaaaagctcagtttgtcccttttgatgttgtctacgagcttcccggtcattgttttttccgcgtgaagaataaggcaagggtgttcagcgttccatacagcgaactgtcgtcctcagacaggtgcgcccagcctctaccaccaccaccaccaccaccaatgacaacagcaaaacatcaacggacaccggacgacgaggaggagaagaatttgagacgtaaggcaaaggtggcgcttgacttagtggaagctggtctagcggcagacgcaatgatgcaggatgggacgcgttggaagaaagccaaaaccgcgatcaatgtgctggccaatttgcttttggcggaatcattaacagatgtctcgccaacttttgagcaacaacaacaacaacagctatcgtcaaaagaggaggagaagagggaggaatgcacaaacaacagcagtgctgcagcaacaactgaatctgctcccgatggtgatgtaatggacgatttcgtcaatagcattcaagcggcgacaagcaatatgcaatagcaaaaaaagcgcaaaactcgctctgccctatatataaaagttgattactgctcgatttgtcataattttttgaaaatgttaaattctcaatcgttcagta

SEQ ID NO: 50793 - DNA, 534 bp, Heterodera glycines
atgccggaccacgaactcgtggaatttgtttccggtgggtgcaagcagtacgccctgcggatgcggcaccgccaaagcggggaggagaaaacggtgctcaaagtacggggcataacactgagcgccgatgcctgtcagcttctccactttgacacattcaagaggagtgtcctacgctacgcaatgtgccattcaaatgaggatgatgaagaaggagatgatgatgatgatgacatttgttcaattttgattgagtaccccaacttcctgagacccaacattaaggacggaactgttatttctgttaagctgtcgaaacgctatcgccctattgtaactaagggggttgtgggaatgaatgcaattgtacacgattttggttttataaaggcgtaatttatacggaattgtactttttaaaaatgcataattaacaaatggaagattacaatttaaaataatgaagcgtgagaagttgcaaattttaggtagaaaaatgcataatttagtaagagaagtagcagttttggaata

SEQ ID NO: 50794 - DNA, 472 bp, Heterodera glycines
atgccggaagaatctaacaacaacagcacaaactacaacaataataacatcagcaacatcaacaataacaatgagaatgctcaattatggaagcttgtacgtaagaaatatattctgaccttcaatctttgttacggctgttctcaaaaacttttcgagtccactaaaaacaataacaacaacatcagcaacaacaacaattatgcttttgaaactgatcagtttggaggcgttaaggtgcaatttcgcatgtgtaagggatgtgtttggttgaacatgaagctgagcgatttaaatagtgcacccaaaagtggtaataatcatatgaaaacaactcgcaactttccaaacacaaacaatgcaacttactctactgacaataattttggctccttcttcaataacaccaacccgcagaataacgcaaatgaatggatttgacaaaatttagagcagatcaaaattgtaacaa

SEQ ID NO: 50795 - DNA, 960 bp, Heterodera glycines
atgcccctacaacagcattatgagcatcagccttgggaactggacccaccgatgcccgaacagcatttggaaattgggccacagctcccggatgcgtgggaactggttccctatcagccaccaccacaatgggctcaagttgtgcatgtggaacaacagcaacaacaacaacaacaccaccagcaacaacaacagcagcagcaaggcgcgtgggacgagggatgggaggagcagctttcgccaaatgcgttagcgcagatccaggacgaggcggatgggttgcgccaggatttgagtaagaatttcgggtcggggtccctcccataaaaggaaaattaagtgattgagagatttgttcgtgtggggcagccgcagcctacgtggcccggttaccatagatgttcggaaaattttttttttattatgcactaattaataattaatttagcattttggctcgacgagggcacggcaggcattcctgaccaacaacaacaacagcatccgatgcagggatgggaaactccgcgcacccactttgagcgccccgtgccgcagagaacgcccagcccttcgggagattcgccggcggcactgatcagagaattaaatttctccgatcagtgcctcctgtgcatgggtgagcacgggttggactgcgaagtgaccgttcgcggcaacaactgcgggtgtgtcacaatttgtgacacgtgctgcgaaaatggctggtgggcgaggtatgcggatgctgcgcgcgagcagtccgcgcggcagctcgaggacagcctcgacccgtggactgggctagtccgcttagatgaggacagtcagaggcgttgggtaaacacacaaaacattgattttctgataaaatttaatttggttcatgttttcaggtcgaggggcacgatgtgcgccctaagtgtctcggctgccagacgagccgaatcgactacttga

SEQ ID NO: 50796 - DNA, 405 bp, Heterodera glycines
atgagcgccgcaaggcgcaaccgccagccggcacgcgcgccgactccgctgattttgccggctatgttggccggcgtttctctgcgcccgacgggcgtcaatttgactgtggaccgggtgggcaattttaattaaattaaaatctttatatattttaatttctcactcattaaaattacaatttaaatttaaaggcagcggggcagcgccgcgcggatggtgcaattgaggagggcgaggagcccgtgtacgatgaggtgccgcttgacagcgacattgtggtcgagatgcgcgatgaagaaaatggggaggaggatgaggaagatgatgacagtgatttttagtgattcggcaagcgatcactcaccatttaactaatcgatcgatttttcactttaaaataaa

SEQ ID NO: 50797 - DNA, 779 bp, Heterodera glycines
atgtgcccggaccagccgcttcacccatggcgagttcccttctcagctggtgagtccaaccaagccattcgctgctaaattcaccgcgccaaacaaagtttactccccaagggttgcgcaacagtatcactctatgttggacagagacagagatattttagactttttcctaagttaccgatgcccatcgctggtttggcgaacatccaacagcgaataggcatgttccggcgacagtccaacctgccgatattccgcctccccaataatgcgttcacctttaattctggatttaattttcacagtaaggacattgtatttactttggaaaatgggacaacgaagggtcgaaataaatttgcaaaaaaactgacctgcaccacaagaacatgtcatcaaaaagaacagctgtctcgcacttaacagcttagcccaaacgatgtcaaagtcggagtcactcaaaaattcaaggtctataaaaagggttggctgcccggtgagggttgaaaatcctaaaaaaaggcatgtagtaaccgcccaaaccactaaatttatttataccttctgaaattagtccggatttcaggatggcataattgccattatacttcgcaagtgccttctcaattagcgacacccaaagttggcctctcctccccaccgcaaaaatttggcgtttagttgaccgatgacaagggaaaaaatcgtcgacgataatccgccgccaaattccgtgaatacaaagccttaaaaccgattatcggtatgatcaaaataaa

SEQ ID NO: 50798 - DNA, 2372 bp, Heterodera glycines
aattgggagcgcagggacctcgccatagtttggttacggcccaaccaattcacccgtgacggtcaacagcccccgtggtccgtgttcaacaacccccaaccgacggacattgagcaaggtcaccctactcccgcttcaccaattcgcatctcgtcatgtgccattgtttaggtctgcttggaaattgctggcttttgtctgcgttggctgtcatttctcaacggcccgacattctcgagaagttgttcattacgaaagagtacaatcatagaggggtctacgaagtcaggtggtgacaactttattttgatcataccgataatcggttttaaggctttgtattgacggaatttggcggcggattatcgtcgacgattttttcccttgtcatcggtcaactaaacgccaaatttttgcggtggggaggagaagccaactttgggtgtcgctaattgagaaggcacttgcgaagtataatggcaattatgccatcctgaaatccggactaatttcagaaggtataaataaatttagtggttttggcggttactacatgcctttttttaggattttcaaccctcaccgggcagccaaccctttttatcgaccttgaatttttgagtgactccgactttgacatcgtttgggctaagctgttaagtgcgagacagctgttctttttgatgtcatgttcttgtggtgcaggtcagtttttttgcaaatttatttcgacccttcgttgtcccattttccaaagtaaatacaatgtccttactgtgaaaattaaatccagaattaaaggtgaacgcattattgaggaggcggaatatcggcaggttggactgtcgccggaacatgcctattcgctgttggatgttcgccaaaccagcgatgggcatcggtaacctaggaaaaagtctaaaatatctctgtctctgtccaacatagagtgatactgttgcgcaacccttggggagtaaactttgtttggcgcggtgaatttagcagcgaatggcttggttggactcaccagctgagaagggaactcgccatgggtgaagcggctggtccgggcacattttggatgcctcttcaacaatttgcgttctatttcgactcggtcgaaattgcgcagctgagagaacattttggatggacagcgacgcgctatttgatggacatcggatgggaccagcaaaattcatggtgaccaaaagcattcggtgccaatgtatatgttttcatttagcatgattcgaccgataattgatgaacgaaccgaactctgtgcgactcttttccaacaaaatgctcggaccacggtggaccaagttgacattatgttgctgctccataaacaggaagatgggacaacaacacctggtaactttggacggcatttttcatcgactgccattcatttctttattatcaggtgaactgatttgccggtcaccgcgtcgaattacgccgagtgtgcgaatcgaggacacttttttgccgcctggagagtatttgctctgtgcccattcattttcaaaatttggaaaacaaatgattccggggactattgtcatacacaggtgacaaaaatttagagtatttaaaaattaggataccgattgatttctcttacaatttaagttcacgagaaatttttacaatgaaacttcggaccacaactctcgacgacttgcgccagtcaatgtgttctttgctgctcaaagaaggcgtcctccaaaatgtttgtttttggttatttgactgactttattattagggcttatatttatagttgctaaaaactgccgaaatacttaattgaaaacagtttttttcaaaaatactagaaaaatagcttaacaacagctaaaaaaacgtttttcgcgcatttaaggttacggggagctcagaaaaaaaatagtgaaaaaattaaaatatcagccctatttattatatattgtcctattttgagttttctgagtttatcacacatgttctccatgatgatgctggtttggcttacatggtagacaatcacagccgggacaattatttaaaggtcgtgttttggattatgaattaattcgttttgtttatcttttttgctcaaagaatccatttcttcctatttgcgcattatttttcgaattaattcccatatttctcatttaaggtccattccgattgtcaaaactcaacaaatgttctttccactagctcttctttgcttgcgttcgattccatccctccgctgcatcgacaggtccttccttccctttctttatcaacttgccaatatttggttttgccggggactccaaattattgtttatggacaatgatttcggtcgggtcacttgcccaattgg

SEQ ID NO: 50799 - DNA, 929 bp, Heterodera glycines
atgatttcggtcgggtcacttgcccaattggagcgcagggacctcgccataatttggttacggcccaaccaattcacccgtgacggtcaacagcccccgtggtccgtgttcaacaacccccaaccgacggacattgagcaaggtcaccctactcccgcttcaccaaatcgcatctcgtcatgtgccattgtttaggtctgcttggaaattgctggcttttgtctgcgttggctgtcatttctcaacggcccgacattctcgagaagttgttcattacgaaagagtacaatcatagaggggtctacgaagtcaggtggtgacaactttattttgatcataccgataatcggttttaaggctttgtattgacggaatttggcggcggattatcgtcgacgattttttcccttgtcatcggtcaactaaacgccaaatttttgcggtggggaggagaggccaactttgggtgtcgctaattgagaaggcacttgcgaagtataatggcaattatgccatcctgaaatccggactaatttcagaaggtataaataaatttagtggtttgggcggttactacatgcctttttttaggattttcaaccctcaccgtgcagccaaccctttttatcgaccttgaatttttgagtgactccgactttgacatcgtttgggctaagctgttaagtgcgagacagctgttctttttgatgacatgttcttgtggtgcaggtcagtttttttgcaaatttatttcgacccttcgttgtcccattttccaaagtaaatacaatgtccttactgtgaaaattaaatccagaattaaaggtgaacggattattgaggaggcggaatatcggcaggttggactgtcgccggaacatgcctattcgctgttggatgttcgccaaaccagcgatgggcatcggtaa

SEQ ID NO: 50800 - DNA, 263 bp, Heterodera glycines
attgttgtgtatttgctacaacaataaaaatgtttggtttttaaccaaaacaaatgttgtccaataaataaataaataatttattaaacaaataaatgaggaggaggacagcaggaaataaataataataaaataaaataatgaaatggtggaatgaatgggagaatgcccggagtgagggaaagggagacatatttatggggctggtcaaggggcggggcgagagacaataagagagggagtgaaagggaaaatataatcaa

SEQ ID NO: 50801 - DNA, 1833 bp, Heterodera glycines
gctgttttgaaagcatcagcggaacaaaacaacagttctgctgcattagcgacatcaatcgatgctcgcctttcaacatttgagtatgaccctgagttagggcatacattcgacgtttggctcaagcgctacggccagatcatcgcccaggacggacacgcactcagcgaccagtccaaagtgcagctattgattggcaaattgggcgaagcggaatacaagcggtactgcgacagcatcgcaccaaagacgcagaacgacttcaattgggatgagacgaccgcaaaattgaaaaaattgtttggagaaacccgatcattgtttctccgtcgctttgattgcttccaaattcgtcaagaagcgcaacaggacgttccaagtttgattgcacaaatcaactcgtcctgcgaaaacgcagatctttcgctgagcaaagaggagctcaaatgcatgattctcatcattgcattgcgcgacgaattcaccgatctgaggcaaaaatgccttcagcgtttggaagacagtcgaacgagcggacggtcaacctcactgcaagagctaggagaagagtgtcgcaaataccaaattctaaaggaaagcgcgctctccctcggctcaaatccctgcagcaccagtgccatccgagccaaaccgcagcaaatccgggacaagcagaagtccaaatcaaggccacagcaaagccagaaaggacatttccagccgaataattcaacggctattgaaaaggaagtggacctgcctgatcagccctgctattcatgtggaggcaaaaatcattggcaaaaagactgttggttcaaaaattcgacgtgcgaaaagtgcggacgaattggccatatcgcaaaaagatgcaaaaacggcacagaaacccgacgtgttcgtgccgtggccacaaattctgggaatgacatgcacattcacaccgttttacttcagccaacatgtaaggctattgaaggaagtagtaacaaatggtggagaattgtcaccgaaatcaatgggatggaaaacccaatgaatgtcgacaccgctgcacaaatcacggtgatcacaactgattcgtggcaaaagcttggcaagccaaagctgggcaagaccaccatcgcagtcaaaaactgcaacgaaaaggcattcgcaattaaaggaaaattcaattgccaagtttcgtacaacggacgaacagcgaaactgattgcgtacgtcagcgacgaaatccatcaggatttgctcggcatgccttggatcgaagagttggaaatcattccgaaggaacttatgtttccaaattcttcgcaaatcaccaattcggtgccaatgaagcatcagaaaatgccggcagtcaatttcaaaaattttggtaaatttcaacagaaacaccaaaatatggaacggcaattcaacgacaaatacggcgccaagcccatcactttccaaaatggagagccagttttcatttggaatttgaaaggcaataaggcaaattggttgccggcgacgattatcgagagagttggcaactctccgacttatcgagtcgacgttcagacgctccgtcgcgcagtacatcgtcatgccaaccaaattcgccgtcgtttcccaatggaaatggagacatcgcaaattggccaagcaaatggaaatattttggctgggaaccaaccaaatcggacccccattaaggagattgaaaaagccaaatctccaattggccaaaatcaaaatgcgccgcgaagatcaacacgcgccaagagggcacctcagcagctgaacatggacccgtcgaagcggaagtacgatgtattccggccatga

SEQ ID NO: 50802 - DNA, 663 bp, Heterodera glycines
atggcttcagcaaccggcggaaaagtcactttcaaaattactttgacaagtgatccaaaattgccgttcaaagtgtgagtgaaaagtataacaatgcaattcggccaactttgcttacgtttgtctgttcagactgagtgtccccgaaaatgctccgttcactgccgttttaaaattcgccgctgaggaattccgagtcgacccatccacaagtgccataataaccgacgaaggtgatttctttcagaaagtcaaatccacatttatccagctcgggataaaattgaaaaaccagccgaattcgaattagcgactgattgaaacataaaatcaaaagcaaaatcgcattttcattatttttaggcgttggagttaatcctgcgcagaaagcatcggacattttcatgaagtacggctcggaattgcgactgattccgagagacagagttggccaaggcgaatgaaagaggaaatgggtctaccgacacacgcggacatatcatttggcaaaaagggaaactgacaggaccgtctattgagactattgtgattgtttctttgttattttttggtagctaattattcggagaggctgggaattttaaaatatgtttaaattcgttaaggaaattgagattccgcttctaaaactcacataaagca

SEQ ID NO: 50803 - DNA, 1899 bp, Heterodera glycines
atgctcagtcgaatgttgtcctcggctgttgccgtccctcggatgtgtgaatcaaacaaaaaattgttgaggaaaggcgcgactttcgttggtcttctccgtggggtcagtcactcgccaattcggcgtccctttttaattgattctcctaactcatttcttatcaaattttgtgttttataatctctagtatatattgtatttcattacatttcctttatcacagttaataccttttatgtattataattcaaattcaatcccaaactacttgcgccgatttaattcaaattagcaaataataaataacgtaattaatatttatttattcaaataaatttatatttgcttcgaaaatacaatttatttttttttttttgatttcaccgttttgttaattaccagattttcccctattagtgaatgtccagctcagctttcactgccacagttgcgcctcctcatcggcttatgcgttcgttgcatatcaacgaaaaaaaattgttcggacctggtcccagtatcatgccagcactcgtccaggagggactcgttcatccgttgctcggacatatgcatcccgagttattcgaatgtgactcatttgatttcttacaatcaatcgcttttctttcagattatggatgatgtgaaatccggcatcaaatacatttttcaaactgagaatgcgctgtccttcgctgtttcgggcactggccatgccgggatggaatgtgccattttgaatctgctggagccaggccagaccattttggtggtgcaaaacggagtgtggggcttgcgggcagcgaatttggcggagagacttggcattaaagtgcatcgattggtcgtaccggagggagaagtgattaattggacgattttgccgaggttcgtaggaatttaaaaatctgcagatgaattatgctgcctttcccttaggctgtggataactaccgtccccaagtggcattcgtttgtcatggtgaaagttcgaccggagtcgtccatcccttggagcgttttggcgatatttgcaatgcatagtaagtaatttcatgtcaaactatcaaatctctaaaaccatttacgtgtatccacactttccaatctgtcccccttagtgacgttcttttcctcgtggacaccgtcgcctccatttgtggtgcccctttccatgccgatgcgctgaaagtttctcccttttttcgaattttcttgcatttttatatttgaaaggttgattgtgtgtatgccgcaactcaaaaagtgttaaactgcccgcccgggttggctcccatttcattcagcgaaaaagcactgtaaaaattagtcatattaaggaaaaaaagtttaattcagggagaaaataacgaagcggaaaacgcgagtgccctcattttatttcgacgcgttagagttgggcaattattggggctgtttcgacgagccgagaaggttgcaatttttattgcaaaatgcaaacaaaaaacggaaaatttgaggacgtttaataaaccattcaatttatagataccatcacacggcgcccatttcgttggtttatgcgctacgcgaaggtctttcagcagttgcccaggaaggaattgggcacatggtaaaccgacacaaaatcaatgcaaaacttttgtatgacgcgtttgaccaattgggactggaattgtttgtccaaaaagaggtaattaaggcagttaattgttttgctatatatccgaaaaaaattgtcaagaataatcgtttgccatgtctcaccaccgtacgcgttcccgaaggtgtcgactggaaggcggtgcaagacaaactgatggtatatccgatggtttactatattgctttatcaaaaaattcaaacaggcccaaggattgaaattccgg

SEQ ID NO: 50804 - DNA, 91 bp, Heterodera glycines
ggattatttttcaaaacacctcgtagactgggggataattggagactgcgggattaatagagactgggctataattagagaatatacggta

SEQ ID NO: 50805 - DNA, 176 bp, Heterodera glycines
atggtgcacaaggcgctcaactcgttggaccagcccgagcagaagcagttcattgagcgctgtcttgagctagacccggcccgtcgtgctaatgtcactgaactgcttgatcgtcttggccctcctgagccggacccggacgacacactcgctcaacatccccaacacgaagacgg

SEQ ID NO: 50806 - DNA, 1625 bp, Heterodera glycines
atggaattctggggaaaaaagaatcaagaaaatggcattatgagaccggctctgatcgtttcgtcctttcctaacgactttggaatggaaattgccaatgttgtttatgttgctcctgacgaggttgcataataataatagaccgactttaaattaaacatttccatccttttgtttttagatcctttaccctgtccctcgttcgttgtacactttggatccgcttcagcatgcgtacatgtcaaaatctcagtgcaataagatgaccactgttcagtcagaagactccgttgtcactgtccaagttgattcgaaagcgtcgaaagtcacttgtatgatgaagggcgggactggcttatttggactggataagcgcgggtcggattggatggtaagcggtgacaattcgtcgtaatacacttaaaataaattccgtttcgcagatggatgtcgatgtggccgtctccgatgagcaacctcgtcaagtctttgtttgttctccttttttgccgggcactctgatgaagactttgatcaacttaaacgacgtaagtgggcagtaaatatttttgtttaatttacctacaaaatgtctccgttttaagtacttgccaaacaaaccatatagaggcactgtcaaattaaatgtttttcatggaactattgcaagctgggcttctaagggaatctgcagttttgtttggtggcaaaagcagttcaaagaggcagacaggtacacagtcatatatgaaagccttttgagctaaagatattcatggtagcctcaagtttgacttaggaaagagacccaacgatggatccccggcggaactgtcactatttaatgttttctcctagggcttgtttcgagttttctctcacaaacatttacgaaaccgatgagccgaacattgccgttgtatatgaagcggtaatatattttatatactaactacaaaaaaggagaaagcttttagtcatggcaaagtgtaaagcgttcaattgtccttactcccgcgcaagttggcgatgttccagatgacgaattgaatttattgctgccggtgggacatgtccatcccattgataactgtcaagtaattctattttcttttacaaataaccaatcctttttaagtcgaaacaagggccgtgtgtgaaaaagtttattgaaaatattggcaatcaacagggaaaacagccgggctccatcgttacttgcgttgtcagtgaaagcaatgggtcggacaaacaacagaaacagaaagattccgtgatggcttgtcatttgactgatgactccctcagaccagtttctgagattctttcggctggatcctttaagcagatcatgaaggttgtcaacggggattccggtcaaaatgcgtagatgaaaaaggttaggaaatttgtatacctcttacagttagctatttctctcaataagtcattttctgttttaaacaaattattcaggtatccacagtgaaattggatgggaaggatggaagagattacactgattcgccttttattattatataaccttttgccattttattggttgaaacacattcacacaaaatacaacaattggaaagtgaaatgaaaagcaccatggcaaa

SEQ ID NO: 50807 - DNA, 1030 bp, Heterodera glycines
atgaaattattccctatattatttctaattgtaatttttaatattaaatttgatcaaattggagcagaaaagaaaaagttgcaacaaaaatcatttgatgaaatatttggagaaaaatgggaagaaaaagaagaaaaaaaactaaatgaactcaaaaaaagagaaataattggaaaattttataaaataaaagagaaaattaaggaaaaaggaagaaaatattcaacaaaagaatggaataaaattgaagaaaaaatagcgaaaaaattggggacaaatcgcaaatatatttatgaatggatcaaagaatttggtcttcaaaaacaaattcataaaaactataaatcaacaactgatgaagaaaaaattgtaattgtgcaaaaatttattaaaatgacaaatgaatataagcaaaaaagaaaatattcacataaagaatggaagcaaaattatgcggaaatttgtaaggaaattggagttagccgtagaacaatttacaaatggaagaaacaatttggcattcgcggtaaaataacggatgaagaaaaaatgggaaagatgaaaaaacaatttggagaagaaatgtttgagaattgaaaaacggatgtagaaatttcgttgagtccctctccgatattttatttttattttgaccaggtgctagcgcgtttgttaaaactgccaatgggtttgaaaacaaaaaatgggtaaaataattaaattaatagcttggctcaaattcaaccaaattaatatttcgtggtatccattcaatagctttaattgctctctttcataatataattttcttatatttttaacttaagtataaaagaagttatggtcacaaaattgcaaaaaatcttaattcagcattttttgttcattaacttttttgaaactcaatgaaattttccaaaaatttaaatatccatatagaaatcttacgtctatcgacatatatattaatcttagattaaattacattttagagacataaatattttagattgattattatcataataaa

SEQ ID NO: 50808 - DNA, 679 bp, Heterodera glycines
atgcgttcagtttccttttgtgccaacaatcaccagcagcaacaacaacaaatgttgccccatttcgacatcaccggccccgaaatgttgcagttcgtccacagcagcaaccgatgtcctgacgaacggctgaatggccaaggtaaatgaccattttgagatttatattaggggccaattttgaaaaaacaaacaaatcaatttttattatctgagtaaacgttttgagattctctgaaacccgtcgggggataaattggaatttttgacagactagccgaaaattggcaatttttagatcaaattttaaaaattttcggggaattgagagcgatgccgcttacttttactgatctcatcttatcaaacagtttcagatgaacggcatctggcggagaaatgtcgtaacaaaaacatccgcaacggcaccaacattggtaatgatgaacactttggcgacgctgatgccggcatgtcggctgacgctgttgagcggcgcggttggtgccgttttgcggccagtttcggcctgttggcccgacttcggcacgcgcccaccaattttcaccgtgaaattcggcacctcgacttggcccagagccgtgaagtgcataaagtgacggtcatttatgtggccaaggaccaaccagtaaacggcggggagatcaaagggctataa

SEQ ID NO: 50809 - DNA, 1531 bp, Heterodera glycines
atgaatggttcaattcgttggccaacccccaacagaatgacggtgccattccgtcgcttcagcaagcgaaggcggccagcgttcggcaaaagtcgtcctcattcggtgccccgattgaccagtttcaggtaacagcgaccaccacatgctgaccgagacggaatcggagagggagggagggggggatacggaatgagtgccgaaaaaaaattttttttttggggggggggatttgccacgtccgtccatgcggctgtttatttttatttcgaatttcacatcatttttttgttgttggatcaccaattttccttactctgaccattccccccccccccctcccaaaggtgttggagcgtgccgacgcgccgctcttcgagcgactgtttgcgctgatgttgggccaacagagcaccaccaccgccacgcttttgcccgttttctgtgctatctgtcctcctccatcaccttgggcttccactctcaacttgtccattcactcatccaatcactggcgcgggtatttactgtttccttttttcagggatttcttaatttatgggattaataagtttcgaaaatctttcaattttggtcggtccttaattcgagtttgattttttttttcattttaattttaattccaaaaaacatcaattatttttccaaaaagtgccaatttttccttgtttcaaaggtaaagcatttgcgcattgccaacgagctgaaatggcatttgtgtgcggtgttcgcacggcactccatctcgctgcactggtccaacttggcggacaaatttgtggccaccggcgacgactttttcgagggctttgtcattcgactgtccggccaatggccattgcccggcttcccggtcacccaatggaattcgttgccaccctcaacaaccgcaacagcgacaacggcaccacatgaccaccagcaacaacaacagcagcaggcaaatgttggggacggtgttggcggcgaccaactgcaacagcaacaaatggtcaccttcatggagacggagggtgccgtgctgaagtgagtgggggggggggggcagaaacgctggcaaatcgggcagcaaatggcacaggcgtattgtatttattgaattgaacaccaatcaaatttgaggagttttgaaactggagtaattcgtgtttccccaccctgttgtttcataaaattttataaaaatactttgttttttacgtaaaagtttaaaattcaattttttaaaggaaagtgtaagagacaaaagaaaattaaaattttgtagatgaggttttctttcgaaatttaaaacaattttttcggcaaaggctttaattgggaaaatgcccacccaattgcattcgttaattaattgttgttacacaatttttcagtttggacaaggacagcaacagtctttggtcgcgtacccatgtcggccgacactgttaccgtatgcagccaatttgcatggaggaggagacggagtcgcccgtgtaaaacattaattctttttgctaaaattaaa

SEQ ID NO: 50810 - DNA, 300 bp, Heterodera glycines
atggcaatcattaagaattggtgtcccgacgaaaaaaatgttaaaattttggcaggtattttttctaggcttaaaaaatgcgctgatcacgaatctgagctcagattttgaaaatcattgatttttatctaagatttttcgtcaactacttgatttttttcaattttttaaattatttttaaaaaatttttagcaatgaattttgggttaaaaaatactctgatcacgaatctaagctctgactatgcatgaaccttcattttgtctatgatttttcatcaagtgtcataaaaaaataaa

SEQ ID NO: 50811 - DNA, 637 bp, Heterodera glycines
tgggaatcgctggacggattggcccgtctccccgatttggccaaactcattctccgaggcgctccgctgcccggcgcccgcggcgtggacagtcgcgagatgatcatcgccaaactgccccaaattgtgtgtaagccagcttataatcaacaaaattaattgttccgttctatgtaaccttgaaaccccccgcccgtcttcagactgatttggaccgttgcgatgtgtcgccggtggcacgacgttccgccgaattgctttttttgagccgattcggtgccgaccccatcccggccgaacaccgcgcgacgatcgcacggctggcgaccatttactccatttcaaatggtaaggttcggttccacttaaacaaggggtgggcctgcatttacacatccgtttttgaccaattgcccccatatcctccttttatcctcccctttttgagatggcgacccctccagcgccgtttccgtccctcgccctgcccagcccttctccaccattcactccaaaaaggtccgacttgagcacgcgggtcgcagcatggagcgcagtctgtcccttgcgctgcccatccacaaagtcgtcggtttgggcgcccgactgttcggttttgctcccgacacattaacag

SEQ ID NO: 50812 - DNA, 158 bp, Heterodera glycines
ccccccctttcgcgtgttaacctaatacattaagtgttgtttgtcgtctcttaatgaattaattgcttcttttgattgtttgttctctcttgacaatgcattttgttccaaatttgcctgtctctctcaagtgatattccttttaaacgattctttgt

SEQ ID NO: 50813 - DNA, 2234 bp, Heterodera glycines
atggcaaataaatttgtgcttgtaccacaagaaatttaccggggtctcacctctgcgacggacacgggtgacatcaatttggatgctgtacgacacgatttgacgcgtgccagggctgaacgaacaaacccttcagctaaaaatgtcagctacaatcaacagcttaggcgatacttgcaaatgagacgggaggtcgcggacaaaccagcacgggttgagctagtcaagggattgagtgttctgatgaggcgaggcggtgctgatgatgaagcagaagttgtagatacaccaccccgccctcctcgtcctcctcctccaccaccgcctcctggtcagcatcctcctcgtcgtccaccaagccctccaggcccaggtccgtccccgccggggagtcctccgccgcgtccacagcgtcctccgagaccacctagagctgctgcgccgccctctcggagagatgggcgtgtggaggaatggcgaaaaaagagaaacgacatacaacaacggcagccggttgtgcgggaccttcttgctgaagcagctgctgctccgctacccgaaagtgacgaagaggatgactacatgttggagagcggattcgctctgccagcaccatcacaatattatggcgatttgcccgttctgcctgacaacgcggacgcaattgaggagatggacactgcacagcacaggattgcaaccagaagaaaattacatgatggcgatgacgatttgcatcgcaaaaaataccgggcctattatcctcctcccccttctcgcccacccccgtctcgtccacagccaaaaattgaaacacctcgacctccaccgcgtcctagcctcaagaaagaaccacaaccactgctcgatcctcggccatccacatcacaacaagttgatcgcaaacctaaaagggagccaaagttcgatctggatccgcgaccatccacatcacggcaagccgggtacaacccccctgcggaaccaaaacatgaacagaaaccgtcaaaaaagccacctcctcgcgccacaccctatcatattccgaaaagagagccaaaaattgaagaaacagtgccacggcaccagcaacctcctcctgctgccccacaagtgtcgtctgttccgccacctaggagagggaccaaacgtcgccaccccccggaaaatggtgatgagagtggtgagctgcgcatacgtaaacgagtgaggcaagcgcgaagagtacgagtgtattactcaccagagccgggtccatcaacatcagcacaaagcgatgaacaacaacaacaacgtgaactgtttgccattccgtcaaatcagctgaccatggcacagagaattgagctaatatacatcaaatgcaaccgttatgccgatcgtatgggtgtccggggaaacgcaattatcaacactcaaaatgctcagccattggtgcgaagcaatttgcgaacggccatcaggtatataattgacagaagagcgggtcgacctaccattagaccaccgggagcggaccaattggaggagcggcttaggcaggacccaattttgtattcattaacggctccaccaaagagaccatcgcagagcacaagcagcaggacgtcaataaagaaggaatttcagccgaaaaaatggaaatgatcaacaccactcttgacaagctgtacaacgatccatcctctcctgctgcgtttgccggtgttagtgcactgtggaaggaggcgcggaaaaagttaaaacaactacggaaaaaggatgtacaacactatttggagggacaccgcacgtacaccctgatgcgccccaggcgggtacgatttccgagagcaaaaactgtagctgctggcttcatgaccgacgtccaagtggatttggctgactttcaagcgctttctcgtcacaatcgcggtcaccgatacctgctggttgcggttgatgttctctcaaaacgcctgtttgtcgttccactcaaaaataagaaggccgaggagatgctggatgcattcaaagagcttgtcaagcaaatgccaatggtcccacaccgcattttctccgacaaaggcaccgaattcaaaaacaaattgctcaaggaattctttgaggaacgggagattgagaaacatgagcccgtgcattcgtcagtgaaagcttcagttgctgagcgggcaatccgaaatgtgaagcagcgactgtacagatactttgccgaaagggaaacgctgaattgg

SEQ ID NO: 50814 - DNA, 780 bp, Heterodera glycines
atgtcatgcactttctgctgcttctttggggcgtgtacttttttcagttcggtaaatttgggtcaatttttaaaatgaaagaaaaaataaaaattataattcgacaaatttatttagcaaaacgaaattttgcatcactgtgtgtttgatctacagtactgcttattcaatctttgccaattatcgacctgcattacgctattccatgtgcttgcaaaatttgcaaaccttttttccaccagcaatgattaccgtattttattgtttttttatttataatttaaatttttatcatttaggaacctgatttaattacttcactaattctgacaattggtactgtattcttaacaattactacgttaactcctcccatcctctactgtatttgtgtcatttatatggtctttggtatagttaagaaaggtaaatattaatttcacgggatttaattaaaattaaaataaagaaaaaaatgaaaaaagaatataaaaattgcaaaagagattaaaaatttttctatttccgcaattatttttaaatcattgaacttttgttttaatgaaaatccttcgcttaacggtccaacaagttttataatttggtttttcagcgtttttctcctccacggctaattatccgcctccagcatcaaataatgccattgaccatttgttgcgcgaacggacacgtttgtatcttatttgtcttcttggcactttgccaccatttattctgttcttacttccaatcgtgcaacaaatgctggccattcagtag

SEQ ID NO: 50815 - DNA, 611 bp, Heterodera glycines
atgaagaaatgtctgtggattgtgctatttatatacagggatgaatcttttgcgcttacaactttcgattttgcctcaaattgcccctataaaaggagcatattttggctgaccattgcatttccattcgctgtttcgtcgcttccttttcactgtaagtgccttcgccccttgccacttgataacacatactgctgatggtacccccccccccccgccactttttttggcagaaaactttttgtttttaagaaggatcagcgatcccaaaaatccttacaacggagtccgatttgcggcccgacttttgcggccccagcatttgcgcctatgtccaaaatcggattcaaactaaaattttttcaagccctgctcttcatggcttatttaaaaaaaaattttctgccaaaaaaggggggatgccatcaagcaatatcaccgcgcccgttcgtcattttcctccattctgtcgttcttcacctccattcatttcagcctttttgctgcaactcaccagtgccgagaacacccgccgccgactgctgtttttgtgtgtgccacttttttgtgttgtgttcgttcgctgccgagccgagacgactccgtcctga

SEQ ID NO: 50816 - DNA, 448 bp, Heterodera glycines
atgccaaagtttaatgagcggctttcgcgggattggtcgataacaaaagcggaagtgccggtagcacaatagatttgttttcgatttttatttttaagctcaattacagggaatttcgttggaatttttcacattttgggctcgcggggggccaagcgatgtgacaattcaggcaaaataataataaattaaatatttttagttaatttgtttttttccaattaggcccttgtccatggcattgacccaaagttcaaattctcccgaatctgtgacgagtcgtcgtttgtgtccgttttccaatttgtctcaaagtcaaatgaccacaaaaaggaggagggcaatgaaaagatacagcttgaacttcacgcacagtgcttcaacaccacgttaacaggtggaaaatgatttttcaatttattgaaaattaattttttttttaaataaa

SEQ ID NO: 50817 - DNA, 1128 bp, Heterodera glycines
atggtggacaagcacgagcgccggatccatgagctgctcatcaccgattttgtgcgatggtggactctgaataacactgacggaggtggtggtggtggtggtggtcataacggcggcggtgagaacagcacggcaacacactcgttgaggagcaactttgtcgggtttttaccagaacaaaaaacggattttttcattgcggccgaccatgtgtacctgatttggcgtagacgtgtatacaagttccgtgttgggcactacttcaatgatccttcctcgcagctacagtttttgaccaactccagtgacattcgcttcaacttcctcatattcgagagagatgatgacgccaaattggaagacagcactgatcgtagaaacagcagagcagcagcagaagcatccgcaggactaacaccatcatcacagatgatgaacagcattgagcggctcctgctcgctttgatgtacctctttgatgtggcagtcatctgcattgccgtttgtgtgatccgactactgcgccgtacaacatcaaattcgggcccggacaacaccagccaagctcgcagcaacgatgtagtacacactacggaaatgatggcactgacaagtggtgaatatggtctgatccagtcactttcgttacctaactcggggggcggagctttcgcctctgtctacaaataatccagtgtacgctgtgacgcgtttgtcgacagcgaagctatgtctaaccagtcaaccactatttaagccgagcattttgtaccattgacttgccggcttgtttgatgattgttagtatttgttctgttgttattatttttgttgcctttctttctattgctgccccggctgctatttaatgcaaagagcaataaagcattttctacaaacatttgcgctccaaactgttgaagagctgtacgcatattttaaagaggaaattttgagctccccgggcgaatattacccaaacccgctcgcagagttcgtttgtgtgcacattgccaacgaggatcacgctgaccaaccggtgcttgtgaacggcacacttgacctgatcgaaggcgtagaactctactccacatgttatccgagaacggaaacggggaccatcgattg

SEQ ID NO: 50818 - DNA, 3003 bp, Heterodera glycines
atggctcacatcagaggcccgcacgccaactggcgagatggacactggctgtgggactggcgcactctggcccagctctacaccatcacgttcaacaaccgaatggaggcccaaaaagtccagtacatgaagcagctgcagggaagacgacgtcttgtccttccaggctcaatcatcaactggctaagcgctctcagggacaacaaaggtagggcaaacatttcgagtttaataatcaaatagctgctatttagggtacaagggcgacattggccgagtctacatgaccgacgagcacttccgcgggtcccggcagtactaccagcgcgagtacgccaactgcatgaccatctgcagagaagttggaaagccggaccttttgatcactctgacgatggatcccgaatgtgatgaactggaagagatgctgccaactgacccagatggccaccgccagcagtggtacgaccgtccggatgtgatttgtcgtctctttgtcgacaaattcaaagagctgcgtcatgaccttaccgtcaaggaggtcatggggcccgtccgtggctggttctactcattggagcatcagaaacggtaaactgagtcctttggttttgaatatttatgagtcatttttagtggcctcccgcatgtccatttcgcactgattttggactgggacagaatccgaagtggcggcaccatcaacacgccagaagactatatcgagcagtacatctctgcagaaatcccggacaacccctcgggccgctcatccgaagtgttgctcaagcgagagctttacaaaacactgaggatgaagcacatccacacgtgctcagctcgaagatgtttggttgacggaaagtgcctcaaacgttttccggttagtcaatattttacttcacttttatggttgtcaagcatatcaatttagaagccattctcgtacgacaatgtctacaacgaacacgcttacccgcggtaccggcgacgtcctcctgcccctgacgccagggcagcagctcgacacccagagcaatatggacgcgacttccagtacacggacaaaagcggcaagacgattcgggttgacaaccgttacgtagtccccttcaaccccttcctcacttccaaatacaaagctcagttagtaaatcaaattttggttgaatctttttactttttcaccttcatttagtatcaacaccgagtttgtggctggagaaggctgcacaaaatatctgtgcaagtacgtgatgaagggcgccgacatggcgttcatccaagtccaaggcggacccgacgtccgacagaaggtggactacgacgagtttcaccagattcgtcttgcccgctacatcacctccatggaagcgatcctctcgctttggggcacaaagcttgtgggacgctctcatgaggtacggagtttgcttattacacccacatgttatgggattgctcctttaggtggacgaattggacgtgcacggtccgagcgggcaccggattgccgttgagcagggctttgacgatgaagaggagaatttgaacgccatttgcgaggcggcccaggccgaagaagagcgaaggctgaggggcgaagagcgcgtcactcagctgaccgcatacttcgcgttcaacgaagcgaacccgccaattggcctttcgtatgccaactgctacaagaagttgcgctatgacagagccaagaagcagtggaagctgtatgttgatgcgccagtgccaaagttctgccggctcaagaccgtttcgcccagcaaccgcgaactcttggtagaacgccaagcacattaacaatttgatctttttttttctattataggcaattcgactgcttctgttggttgtgcttgacccaaagggatgggagtcattgcgcaccgtcaacggcaacgtgttcccgacctttgttgaagctgcgcaagaacgtggactcctcactgacgaagacctctggatgaagaccatcgatgacgccttcagaatgaagaagtccatccggcagcgcattcgatggcttgcagtcttctttgcgacagcgaacctcgccagtccttgcacaattttggacaaggttcttgcaaatgcggacaagtggctggtaaacacaagcgttgcgagagcctcggccgaagagcagaagcagtacgtcctcaatgccatggaatggttcctgctcgccaatggcataacgcccgactcggagccgagggaggatggcacctatgagtccgcttgcgaacacattggtctgccacgtcctcagggccttgtgctcaccaaggacattttcatgaaggtactgcaactgttaccaattatgtgaaaaccatatgcctttattagctcgccttcttccgtgatgatgcgcttaacgagcatcttcatgtggacttccttccggacggtcaacgacgcggtgaaatgcgccaagactaccttcaaaagtacatctccggtcccaagcccaatgaagagcaacaacagctgattgatgctgtgcaaactgcgctggagcacgtccaacaagtcatcgatggacaatgcccagacttttcgccagacatccagcgtctcttcatggtcaccggtgaaggtggcgcgggcaaaacgttcacgtataatgtgagatcacttccttatttttccacataaattcctttttctttgtagaagatcattgctcgcgccaagtccgctggcatcaacttcctgcccatggcgtcgaccggcattgctgccgaactgctgtacgagggccagactgtgcacaagcggctttgccggcttaagcaagttgattcgtcaacttcgcccaatgttgacaacgagagcaactttgccaacatgctccgcaacatccacggcatcctgatcgacgagatcagcatgcagcacagggatgtcctcgagtttgtcgaccggcttctgcgttctgttgccacgcaacagttcaaggacttgccttttgctgggaag

SEQ ID NO: 50819 - DNA, 2918 bp, Heterodera glycines
cccaggcggttccgctggaaaaacaacaccaaacgccgcaggagttgcaagctgcaggcgacccaactggtgaaagcgagccgttacgaactccaacgaggaacgaagaacaacatgcattcctcctggacttcttcaaaagaagtccagagcaaaaacaagaagcattcaaagccctgaagcaacgctttggcaagagtgctgtttcaccgcaagcttatggtcgatggtggaagaattttggactcggacagatcatattgaaccaatgcggaagtgagttttttatttgtccgctttcaagctatattttctgtttacctcattaggaacatcggaacgcagttcgtcagcccgtgaaagcgtgtcgccagcgcaatcggctcagtcggaagaaccactgcaagcgccgcaggaactggaagctgctggtgatccaactggcgacagcgagcttacaagtgctgctgtacgactgaaggaactggatgagggcttcggtaaaagtgtaaccaatattcacttatctttattcccacattatagacactccatcatcgaaacaatcgagaagtaccagaagaatacagaagtcgaacaaatgtgttttttgcacaattcctttgaacgatgctgatggctatgcaatgttgaattgcggacattcgtgccactttgaccagccctttgccgaatggtacttaaactattacttttattaaattaaacgattcataggtataccgatgtgccgaataagaaatgcaaatttcgttggtgcaaaaagaccacatttcttaaatgcggtgactgtcggcaaaaaattggcatgggcatttatgaaaccggctgttattgcacggacgcatctgcaccagtttatcacgcggatgaattggaagcgaggtgctctttcataatgcaaatttgttatttttgttttattataggctcaaagcaagtggtggaaaatgcccagattgcggcacgcaacaccctggcttctgcattttgtgtcagcggctgttcaagctgcaggcaaatgggcttcgtcagagcaaggtgttcctgccttgctgtgactcttacactcacttcgaatgctggtagtgtttaatcatttcggatttttaccccatttccttttggcaaattaggtattcgcccgcaccgaagcagagctgcccagcaaagtgcacaaagccgtggcaaggccttcaggacatgcattaccagtaagcgacgactcatacatttctttcactagtatttgcatttgtattttagtcaaatttgtggtgtcgaaaatgctgctccgttgcgtgcagttccaaagccaagaggcatcattggtgcacgcccgctgaaaaatgccaaggctgcgtctcctacagagtccattccatctactgttgacacgacgacggccgcggcttcggatgtttccgccaatgaatcccaagcgctgacggactcgcatcttatgccaccaccatcgttggctcctcgccgcagcacacggatcagccgacaagcgtccatcgcaagcaatcggcccagtcctgtggcgccgaagcccattgctccagtgacgcactgttgcggaaccattcggtccgctcactttggatatggctgcggttcgaaaaaggcaaaccatctgccttcatattacaactcgcttcgggaccaagtcagttccaaatatgaattcagtagtcatgttctttctttataggcacaacacaattgccctcactgcaatgctttgcttttgccttccgaagcgattggaccaaccgcctattcaaagtgctgcgcaaaaggacgtgtcaacttggcggaccgctacaaagcgcttcgtgctcggccagccgaattggacaacatactccaaaacccggcgggacaatacaaaggctggagggattcgctctttcgcaacgtgctaagatacaacaacaacttggcattcggaaacatcaagatcacccgaagcgaagagcgcatcgaccaccatcggatcgtgaagtgcaacaacatgataaactacatgttgtgggatttcaacccacccgatggtggcaaaccccatctgcacggacaactgttcacgattcctccagccgatgcacgtactcgcctgggtgaaatttctcgggaacattcactggacgtaagattaatttatgcttcaaaaatattggttttatttttatactacttcaggaagaactgatggaggccctttacagcgtcattctcgcaaaccacaagcttgctgtggtttacgagacggcagcggagacgtaccgtcagctgccggaagaagaccgagtgcagtttcgaatgctattggtggatactaaccagcggggcacagagcgcaaattgaatgcaaatgatgcgccggcaccggacaatttgcatgttgatgaccgggccaacctcaagcacatccatcctggacggcttgaggcagaaacggaggctggaagtcgccttctggctcaagtaagcttcggcgcttgatttcatcatataaacagttcccaatttttctagatttttttggactgcggtgcgaatatcatgccgccgagcgtgtacgacgtggtgctcacgggccgagaacgcaccaaaatcgtgtacatgaagtggtggaacaggaacattgatcctgcaaatttcccactgattttttccttcgaacaatttggatacggtagagtattttttgtaacggttaagcattggtgcaattttcctttatagaatatggaactaaattggcgttgcgggagcacgaacgtttcgactcaacgtacaagcaaatcagggacaaaaacaacaacgtcctgcttgatgccgccgaagaccttggcgaagaggaggagttcctcggctctgaactctag

SEQ ID NO: 50820 - DNA, 1066 bp, Heterodera glycines
atgtcagagcacatcgacacgtgcgcattggcccgccttcgtcacctgattaaggagatgaagaagtttgccgctggtgccaaagacaacttggcccactctcgtggcgtcggcatcgccgtccaggtgccaaagccgtggccggtggcagaggaggatggttggacgggcgtcaccatcccgggctgtgaggaaaaatcgcccgttgctgagccggctatcgctgaactgtgagtgtgtgcaaaaccttctttttcacaaaattctttccttaacccgcatttttaggcgtaagccgaagaagcagaagcttccaaaggtggtgactgacaagcgccagccttggctctgcaacaatgatggccggccgattccgggactggctccggtacattcagtcattttcttttttcaaaatattggttccttttttaggttgcgaaacagttgccggtggctccgcttcgcaagttgccaactgacatgccgcgtcccaaaaacgtgtaccatacgatcgttaagggcaaggtgaactgagtgcgaattgcaatcctttatttttttgcctattattttcaggctgtcgcgtcaagcaagcttttggagctgtcgaagatcgacaagccacgcgtgccgatcggctacgcgccaattgctcgagccgaaaagccagcgcttcaaaaccgtcctgttttgaacgctgtgccgaaaccggtactccgcgaaccgagcgaggaaatgttcgtcgttgtgggaaaggtgtgttctgtgttttttaaatcaattatcgttactgaatttttttcactttaaggccatcccaaaatcggccatggagaaggccaggaaaatgcccgacgtggtgaagaaagtgccgccaaccgtccgccacagaagaactgtgtggaactcctcttcggtcagcttcgtcgtcccgtgcttttatgtgcttcaacagtacatcaaagcaacgacttccgcggttgcgtcttctgctcccgctttgaagtcgtcatcgatgagctacgctcaagctgtaatcatcattctttctttttgcaaatag

SEQ ID NO: 50821 - DNA, 1831 bp, Heterodera glycines
atgcgaattgctcatttgtttttagcttcgaatgatttccgagccgttggtctacggaatggcactttttcaggtctctttttaacgaaaattcaaactccaatttttggcataattgagagtgtttgatcatttgttggatcaggtgatcagcgagttgctcgacattcgtaacatcggtcgtcgccgatggcttcacattttggtggctgatttttcttttattcgattcgcttttccgctctggtctcttctcattgctgtttttctttatttatctgatcgcttcttcttttgttgctttaccccccccccattcttttgataatttattcatttttatgctttgttcctcctcttattttttccttcctcttttagtcatttgtccatttttatgctttgtccctccgcttattttttccttcctcttttagtcatttgtccattttgatgctttgtccctcctcttattttttccttcctcttttagtcatttgtccatttttatgctttgtccctccgcttattttttccttcctcttttagtcatttgtccattttgatgctttgtcccccccccccttagacttcgttcccctccaaaattttctacaaattggccctgttgctggtccttctcattttgcccgtccgttttctgtgtggcgttgccgactcaatgcttctgctggacaatatgttctccgtcgccacagtcatcctcacttctctccattttttggcactttcatttcagcgtttgtctgatggcttttcacctcccttttcagtattattgtcgcgccgttaaatttgttgggccatttgtgttgatggtaatattccaatccgattaatccgctatactccttattcagatctacaaaattatcacccaggatttggtaggtccaacggcgatcacttcaaccgcaaaacaatcggcgttttgcttttcagttccgcttcttcctcatctacttcatctttctcatcggcttttcccagggtttgtcccttcctttgtgccaaatttttgccccgcgggggtcaatcgtctttcatccgtttgccaatttgtcccttctaaggctttttcgtgatttttcgcgcctgtgaaagagcgcggattgccgccggttcgcaaggcgacccaaacgacaacaaagagaacattattggcaatccggtggaggcactgatccgtctgttcataatgacagtgggcgaattctccactttctaccaggatttgcacacgtgccaaggtcacacttttgccatgctcattaaaccaattataataataattatccactttttgccattttgttttagcccctcttctcggaaacatcggcaaagtattcattccaccgcttattctcatttatttcagcttcccattcgatgtcccccacagattctgttcttcatcttcgagctgctggtcagtctgatgcagttcaaccttctgatcgcgatgatgacgcgaacttacgaaatgatttacgccactgaaaaggaatggaagagacaggtggccaagggattaagcggctaattagggggccaattagggaaatattagtcggctaatcgcaattgagcacaataaattgggttgggtttaatttggcattctttcagtgggcgcaagtgattctgatgatgtgagtcaccggtgtaaatgacaggcaggttaattggtaattttatttttagtgaactctcaatccatccgaaaaagcgtttgatggctctgttgggatattcgcgtccaatcgggacaaacaaacgcaaaagggcatttgttgtgagcagaaag

SEQ ID NO: 50822 - DNA, 1365 bp, Heterodera glycines
  unsure (1)..(1365): unsure at all n locations
atggctgtcgtcgacacaaacattaataattcagtaagagaaagtcattttataataattgggttaaaaaccaaacgagtaaattcagctgtatgccgagttcaaagatgctcgtccgagttggcttctcatcggttgtgccctccctttgggaattgtcgccgccttcggaatgcttttcaatttttgcgttatttttgtgacaattcgctcaaagtccgcatttatattttaaattccgtttcaattattctaatcctttttttggggctttgaatggcactgccaattttctgctggcactttgctctttcttcgaactgctccatcagcatggccattttctgtttgtgttcgtcgctttttcgggcttaaatttcatcgaatatcaaacggccgcacttttcgcggcactttccgtctttggaatgggtgggacaaatttaaaagtgaaaatcaaaaatcgtgccaattttaggtggcattgccatttcaatgtttttcactgggcttgaccgactcatttgtgttcttttcccggaaaagtaaggcataaaaaaacatcccaaattaattgacttaattatccaattaaaaaaggcactccaaaattaatttgcgcttttatttgggcgcaattacttttgtctgttttctgttctccgctgcgttactttacacactctttttgactgctaaacagctcaaaggactgatgatcagcggatgtatcgtcgacattgtccaagtccaaaaaaaaaaaattatttatttaaattgaattttaaaatggaattcattaaattttagggtccatccgttgcatttttcgctccttccaatttgctcacaaatctcgtgaccactgccatttatttggccatcggaatcgccgtcaaagccaaaactggtgatgatatttaataaaaacgctttttcatcccaattaaccttcattttttgcttcattttcagcttctttcgccgcccaagcgaatctttcccgccgcggcgaataatcgccgcncttttngcgttcgcttttcgccnatcgtcggcgtcaacatggggcggctatgggtgcttctgcgcccctccattccatcgccgatcaccgcgtggctttggcaagtgatcaccggcattccactgaatgtcattgccgcatcgaacggaccaattctgtactttacgaggggagacaatagcaaaaaatgaaatgaaaactcaagcgtaatggcattttggcgctaaattcgggactgctgcttaatgacaccgagtcgagaaaaacttcccgttttttttgagcttggtatcgacttctcgaggccaattacaagtctctgatgatagtcttgcaaa

SEQ ID NO: 50823 - DNA, 1151 bp, Heterodera glycines
catcctcaaattcttcggttggtggcacttcagcgtcagcggatgatcggcgtaaaacatcgcgccgaaaccgtaccgcgtttagtgagctacagttggaggtacggtaggactggcgcgtgacaaatgggcaaactcagacaaatgaaaattgtttgaattagccatgattaaatttgactaaatttctttaattttaaaatgaataattggaaaatgccaatttaaaaattatgaactaattcgcaatttccaggaactcgaaaaatgtttccaaagctctcattatccggatgtgaacaccagggaccaattggcacgacgaattaatttgcccgaggcgaaaatccaagtgatcaaacgaattaatgttaaacaaacaaatttaaattaaattaaattaaatcgcaggtttggttcaaaaaccggcgggcaaagcacaggtgaaaattgcgattatcataaggcgagggaaaaaaggccgaattttattgccaaattacctcaaaatgaaaaatatttagttcaatgttattcaaagtcattacgagaaaaccggaaaaataaaatttcggcgggttttcggtatccgatcgaccatttaatacccaaaactacccctccgtcccgctgtttatattagctctgttatgtacaatcattacttttgggattaaatccaaaatattcgaaataattttttagtttggtaatttttttaagtaataaatttaaaaaattttaatttttatgcactttcttatgctttcaattagaagattttgcaccaagatgggcatgtagggggagggactctctctgttcgtgccgtggcgccgctggaaaaagaattttgatgttttaatgaattgggattaattgaacaaatttgtcagaattttctgaaatccgattctgaaaaatagaacatcggaaccctaaagagaaaaaattcgcagattaaaaatttgctgcaaaaaatacgcctcctaaatagcggaaactaaacttaaaatttaaataaattttcagaaaatttttgcgcaaccaaccagcagatgatggggaggaagaagcatcagcaacggccaacaacaacaatatcaacaacaacaatggacaacaagaagcggagagcaccaccgtcattt

SEQ ID NO: 50824 - DNA, 1230 bp, Heterodera glycines
acaggaaaatcatttgttcaatctgctatttttcattttcttacctgggtttaaaaaaagtgacaaatatggcttttagtgctttagcagcaacattgttaaagaacggtcgaactgttcacaaccgcgtttaaattaccattagatttaaatataaattcatcatcgtcgattgaaaacaattctaaagaagcaaaagaagttagagaaacggatattttcatttttgacgaggcaccaatggcacctaaatttgtaattgaaataatcgataagaaattaagagagatacataagaacaatattatttttggtgggaaaattatgattttaagtggtgacttccgtcaatgtttgccaataaaaaataaagcaacaaaaaccgaaattttagatttaacactacaaaaaagtgagttgtgggttaattttaaaatattccatttgagaaaaaatatgcgaacggaaaatgaatcacaaaattttgcaaaccaaattttggaaatagggaacggtaaaggtaatgatgaaaacggtatatgtcttccaaaaatttgtgatgttgaagacaatgatttggttgatgaaatttttggtgaaataattaaaacaaatgattattcgaaattatgcagccattgtattttagcaccatataacagagaaatcaatatttataatgatcaaatttaaaaaaaatttccgggtgaggaatatgtttttagaagcattgatgatgctgaaagcaagggtgcgcctattcttccagaggttctcaataaacttcaaacaaatagtcttcctgaccatgaacttaaacttaaaattaattctgttacaaaattaataagaaacattaatgtaaatatgggcttatgtaatggaacacgtgtacaaatacttgatattgaaaagaatgttttaagagtaatgattttaacaggagaccgaattggagaaattgattttattccaagaataactttaatagaagataaaaaacttccttatgttcttaaacgacatcaatatccattaaaattagctttttgtatgacaattaatagtgcacaaggacaaacttttgagaaaattggtattgatttaacacgagatgtttttgctcatggccagttgtatgtagctttatcgagaacaagaagttgggaacgaattaaaattaagtattcgagcgaaaataaagaaaaaacagtcaaaaacattgtttgg

SEQ ID NO: 50825 - DNA, 1441 bp, Heterodera glycines
atggccctcacgcgaaaatggccacgcgaaaacggccctcacgcgaaaacggccacgcgaaaacgaccccgaccgtggaatgggtcgaagcgggtcagttccgtctggccagttccgtcttcaaaagtcatgaaaacatgttttagggtgattttcggttttcgggccctagaagccctacaaagcgctttgaaatcaattaaaaattgcaatgatcagtgatcactgactgatcaggtttttttgaattatcgccccaaaatatcgctatttggcattatgagtcattgtctaacactgacactgggtttgacgttttactcagttataccaacctaaccttttaaaaagtacgaattagaaaatgaaataggaaaatttatcatacctaatactaacaccaaaatttcttattaatttttaaaaattctcaatagtgtcgaatttactcactgtcgaaatggtccagtgtcgaaaatgctggaaaacagtgaaagtttttgaaatagttcagtgtcgagatttctctatgtcgaaaacgtagtgtcgaaattacttagtgtcgaaaatactcagtgtcgaatttacccagtgtcgaaattacatagcgccgcataaaatatgcactaaaaatccgccaaatatgcaataaaaacccgaaaaatgcccaaatatgcactaaaatatgccttaaaaacggtgctgggtcgttacttaaaaaaccatcattatgaaaatttttgtcgaaaaattatttataactttgctcgaaagcaaccaaatttttaattattgatatcatttgatagccctaagtgttctctatcagtctgcaaaatttcaaaaaatttcgttaagtttcaaaaaagttatagctcgaggaactcaaaaaaccttgattttcgacatttttggccataactttttttaaacttaataaaattttttgaaatttaacaggctcataaagaacatttagatctatcgaatgatagcaaggattaaaaatttggtctttttagagcaaagttataagcaaaaattttcattatgatggttttttaagtaacgcccattatgatggtttttaagtaatgacatagcaccctcgaaacgactgagcttttgccgctttctttttgagggttatcccatgtgctttatcccactttttcccatactccaattccttctgcgcgcatcatacaagagagaaagagaggggggggggataagagaagaaacagacgagaggagatagccgagtgactgttacgaaaacacggatttcggaattgggaccgggggaaagagccaaatttgcgagaccagcgggaatcaagtaaaagtcaacccgttaattgggggatattaccaaaatatatttatcccataattagttaaaaccgttaattgctttccacagtccattcaacgccaa

SEQ ID NO: 50826 - DNA, 629 bp, Heterodera glycines
atgtgtaagaatggaggaatgagaggccaagtgatgctttctctgatcagcaacttgaagaaaaatatgaggacggacttgagaaaaagagagtgataaaagccatgatttaatttgattataattactttttctgtgcaaatgcgtcatgtgagcataaataatttggatttacaaattttacactcattgtttcatcaaatcctcttaatcccgccctagtgaagatttttttagaatttctaaaatttgatgcttgaaataaaaatgtaaaaaattgcagcaaaatatccttggcttaagcataatgtcgctgtaaatgtttattgattttttttaagaatttgctcagtttaatggcttaaaatctaaggctttttccgcgaaatttcaattacactgaagtgatggaaatagaaaaattttccttttaagaacaaaaatttattttattttttctcgagcgttttttttttgaaattttaatattaaaattttcattttattaccgtttttcccgtgttcgtataaatttttgactgattgaatatatttttttaatttttaaaattaaatattttcaattaacgtctccgaaacatttaaaatatgaggactaatttgcatga

SEQ ID NO: 50827 - DNA, 331 bp, Heterodera glycines
aatcggcttcgttgttgcatcgtacggagagacaccggcgacagcgggcgcagcctccgctgctcaagactcacaattaacttgcgaaacggtggtgaaaggcccaacacaattaacttgcgaaccgatggtgaaaggcccaacttcatcagctcataatgacattgccaattccgaggctcgaccaaaggcgacgactacgagcagcgatttcgagcggatgaaaggcgaactcctggaactgttctcgaacgaactgcagaacctcaagcgggaacttgcgcaaacaatccgagacgaagtggccaaattgtcagccgatcggagatga

SEQ ID NO: 50828 - DNA, 1556 bp, Heterodera glycines
atgaagctggatgttaagatttaccaacattttataaaaataagagaggtcaacaagaaaagtaaagtgcatccaaatttcgatgagaacttgcaatcctctggattgacttccatcaatggacaatgcaaaaaggacttttctggtctgagcaatcgcaagaagagtaagttaggactttcccaattgtttgagtggttttgttgcctttcaggtgggtcttcttccagttcaatagtggctattgacaatgagaacagtgcacaaaaaaatggttgcgaaacatcgttacgggagacagacaatgggaaaaggtcattcaattcgattctcgtaaacaatggcagtattccggcaacgaattcttcgctttcgcctccggaaggaacagtcactaaaaataagcgcatctgtgcaggaaatcattgctcaaatacaccaaaaactgtgacttcaaactttcttggacatcgaaaacaaatgggaaactgtgtgattggaaatgcttctgtgaacaccggtgatgcaggtccgatttacgaaagaggcctcaaaagacacatttctgatgacaatgtgaatgaatttggagcaccaaacaaaatgcgaggtatttcatcgcgagtcagccttttattttttaaatttaccatacaaagagatcacagattttgatactccaaacccgaaattcaacaaagttaacctgaattgaaagaaaaagatttaaatcttgaagaaacttctacttttgcgtcgcgtttttctatttaaaaacttccccggcggcgcgggttgccactcccgaaatttttttctgttacgggcctggtccggaagaattttagaaaatttaatacaatttaacagtttcaccacaatttctaatattgtttttggaaaaaattttcgaatttttggtggatagagggtttggggcgggggtcttattctatttaatttcttctacggttttctttcattgagttaccaaacaacatttgaatggaacgtcctttgctacatcaatcgggcagaaaatttttcccaccaaatgcacaaatcactcgccgaatgtcattccatttaaccgtaagtgaagaaaaaatctcaatctttttaaactcgaaattaagctctgcacacaccggacaattcaaagaataaatgttcgactgaactgacaaccaaagacaatttgcaatgtgatttcattcagcaaccaaataatggcgaaactccaattttccagaacttttttccatcggttaacagggtaataatcgcgagaacacaatattagaataaaaaatttaaaataagtcttggaaaggccgatttttcatatattaattactgaactgttcgaatttcacataagccgaatgaatttgggcaattgtgaagatcattggtcccgaaattttttaatttaattttttttatcttaaatttttttaacaattttctaggggtgttttgaggcgctgagcacgaatccggcctccatttcgaccaattccgaatccctaacccgaacatttttcgagaattaa

SEQ ID NO: 50829 - DNA, 1101 bp, Heterodera glycines
  unsure (1)..(1101): unsure at all n locations
tccaatattttttaatcagctatattggattataaattattaggcagtanaatgtgagaaatcgtcgagaaggnnaggagaaaagtgatttctgatcatttttctgctgattttgcgtttgaaacggatgttgaaattgactctgagtgccaaaaaggggaaggcgaagggacggatggcacgacggtggaccaattggatggacttcgacgctttctaaagaaaaacagcatacagacgaatttggaagagaaaatcaaacaggaacgaagatggatctggggaaaagaacgggggaaaaaggtaatcactgaattcaaagggattttcacaaatttacgattggataagcttaagggatttttaattttccaagtcataatttttgctcgttacaggttgacaatgatgagtttattgttagcagtaataaatcccgcaattctgatgcgaattgcactgatttgtttgatgacggagagaatgaaattgagttgttgcaagaagctaccgacaaaacgggtgctttttttgttatttatttggtaactaatgaagagttaaatattttcagatcaattagatttgaaattgaaaaacaaaaagtcaaagtccgttgggtccgaccactttttcgatgtccgttcaaatcaaattgctgcatcagcaaattgtgctcatctctctttcaccgatctgaatttgagccgacctctgctcaaagtcggcctttcatccatttccaccttattttcccgtttagtccatttctgaggccggttttcaaaacccgaccccaattcaaacggcttgtattccggtcgccttagctggtcgtgatatttgcgcaagttctgcgacgggcaccggtaaaacagccgcttttatgctgccaattctcgagcgtctgcttttccggtaggaaacggatttacaaaattaatatttttctgttttgcttttagtccctcacggcgaacttctgtcactcgtgtgctcgtgcttgtacccacacgggaattggcaattcaagtcttccaagtcagccgacaacttgcaaaatacactcaagtggaaatttgtcttgctgcaggtcgaatt

SEQ ID NO: 50830 - DNA, 1060 bp, Heterodera glycines
tgtatctcgcaacagtgacaaccgaacgggagagaaccggctctttgatgattctgaccataccacaggcattctcgatgtttttcgggccaatattaggctcaaaaatcgccatttatacaacactgcgtttctcacaaattgtcaatggctgtgttatggccacacttctcatcccggtcattctgattttccttcccaccactcattcagtgcctcgccttgccacagcacgacttaggcctcaggcaactgctctctattttccaattccaaattcaaacaaaattcaaggattattggcctatgacaaccaaaaatggagcattgcgcgagggacttattttgcgcggtcttttgatcgttgcatatgtttgttatgaactgattgcgcggaattttgtacttcgttcgtacatgcacgcgactagtgacaacgcggaagtgatggtcacaatggggtaataataatagtaattaaacggtgccaatcagtgacggccattcagtgtgtcacttgtgctcacgcaattcatcattttgccatttctgcaaagacacgtaagcccaaaaacacttttgcaattggcatgctttgctcaactgtgtgcgtacgccggcatcacactgaccaactcactgtaccaatatttgctaataaccgcaattcacacgggtgcctatgccattgcttatgcggaatcgtctacacaaatcacgaggcaaatccactcaaagggaaacaagaatcacaatcagttgccaacaatttcagtgcagtccagccgagtgatttgggaaaggcaaccggactggcatcgatggtccagtggactgcgcatttccttgtgcccctgtacacctctcacctcgtcaattattggcattacacttacgccttttacacgaggtacgaagaaagaagcaccaacagaccaactaatttgaacaattaagtgctctaattatgctcattaccatcggctacatcagtgtgtacgcaaaacaaacgaacgcgcggctgaggacccttttgccaagtcttatcacaacatagaca

SEQ ID NO: 50831 - DNA, 143 bp, Heterodera glycines
ggggactggaccttaaggcccaggaggcggctcttcgccttggcctggacattgtcatcgcaacgccaggccgactgattgaccatcttcacaattctcccaatttttcattggcaaatatcgaggcaaatttgtcttgctaa

SEQ ID NO: 50832 - DNA, 2272 bp, Heterodera glycines
atgaatatgccggccactttacagcattacattcaccgagttggacgaacagcgcgggccggcaaagcgggccgctcagtttccctaatcggtgaacatgaccgcaaattaatgaaagaaatcacaaaagtgaaccaaatctctaattcctttcaacttatgcaacggaaaatcgagccaggttcgtctttacaagtcaacgtcggactgtcatcattaaacttttcagatgttatcgaggcatactgcaaaaggatccaggaaatggagccgagcatgaaaaaattaatggaagaggagcaaatggagaaacaattaataatggcggagaattcaataaaaaaggcagaaaaacaaataaaatcattgggcggagatggcacgcagccgaaggtattttcaattgaaagcaaagttaggctggtcgaaaacaaattttagttgtattcacggaaatggatcggtggcgcagaaaagggacagaacgccacagaaaagctccgaatccgatcaaaagggaagagaagggaggcgaagaaacggttaacggaagcactccctaaacgcccaactgctgaatttgcatccaaacaacaccaaaaaagcggaaaaaagagtgagcaaatacattcaatggggctttattgcaggattaattcataagatttaactttttttgaatgaagtttacgatgaaaatgcattcaaatttaagaaacgaacacattcagaaaatctcgattagtcccttgaaatttccaaaaaatagtcctgtaaactgcaatagagcctgcctttaaagcaaccttttaaaccaattaaagaatctgcgttcttcactactgaaatcgcgagtgttagtcaaagggcgataaaacgcgtgaggaatgggtgagaatttgtttttaatgtttgcttaaaggcttattttagtccggatgacatcgactttaagcgagcgaaaagagagaaacaaagggatggtatcattcagaagaggacaaaacggaagtgaaacgaaacggtcgtttataatgttacaatataaaaatcaacaattctttgatttggtctgttgttctatgctaattttctggataaaatcctccatttcttgatggtacacgaaagtgtctttgctgaaggcctcctttacagtcctcttcagaactttgaatccgtgcatccacgcgaaaataccttaattgaccaaacagtcagttgaagtatatttcagcattagttcacccgcaataactgcaattgtcgcaacatggggcttaaacggaattgcagaaatgacacgcctgacgatcatccttccgcctccgaacttcctcaacaattgcctaccaaatacagtcatttgctacaataagcaaatgcaatttatttaaaaggcaagggaaatgaaagaacaaaatttattggcgtggaagccaaaagaaaggatcgaaaaccaatcaaaaggacaaatgtttatcaaaacaaagcatcgaaacaaacgcaaatcagtcgtagccctccacaggcagaaacggaacgggcttttcaggattgtaagtggagtgattccatcgccaactcccgcgcaaatgcttcggcgcgtaaagaatggcagtgcacgggtgctgcccttgcatttcgcaaatgcattgctggcaatcaaagaaagcaattttgtaatttcgtttgggtttgtcaatgtaaatgtgttattaccctttcgcagtcgcagccgaattcggccgggttctcccttttgtaactgtccattttcattcgcttccgtacagtctctgtcatgcccaatgttccgattaatgcttcgcttatttgctccctcgtacggcactccaaatcaaaaacaacttctctgccatcgcctaaacatctttatataaatgcaggttttcctctaaaattgtttctgtcgaatcatttttacctaagaaagcttgcgcaaatggcgtcacacaaacatccacgagtttcacgaattgaacgtgagggttcttgaattggagttgggcccagtgccaaaatacgaattctttggccccttcctgggccacgtttgggaaattgtggaaagcaattgcaaagaccttaattcatttatttatttaaattaattattcgtctttcatattaaagccaaatgttaaaaaaaattaccttcacttcctcacgcaaatgtatttttccctgagtaaagaaacaaatatagaaattgttcggaacagtgacttaatccaacctggccaagata

SEQ ID NO: 50833 - DNA, 336 bp, Heterodera glycines
caattgttgaggaagttcggaggcggaaggatgatcgtcaggcgtgtcatttctgcaattccgtttaagccccatgttgcgacaattgcagttattgcgggtgaactaatgctgaaatatacttcaactgactgtttggtcaattaaggtattttcgcgtggatgcacggattcaaagttctgaagaggactgtaaaggaggccttcagcaaagacactttcgtgtaccatcaagaaatggaggattttatccagaaaattagcatagaacaacagaccaaatcaaagaattgttgatttttatattgtaacattataaacgaccgtttcgtttca

SEQ ID NO: 50834 - DNA, 758 bp, Heterodera glycines
ggtccttttatgcgtggcactatgccgctccgtcggactttttattatcttggccaggttggattaagtcactgttccgaacaatttctatatttgtttctttactcagggaaaaatacatttgcgtgaggaagtgaaggtaattttttttaacatttggctttaatatgaaagacgaataattaatttaaataaataaatgaattaaggtctttgcaattgctttccacaatttcccaaacgtggcccaggaaggggccaaagaattcgtattttggcactgggcccaactccaattcaagaaccctcacgttcaattcgtgaaactcgtggatgtttgtgtgacgccatttgcgcaagctttcttaggtaaaaatgattcgacagaaacaattttagaggaaaacctgcatttatataaagatgtttaggcgatggcagagaagttgtttttgatttggagtgccgtacgagggagcaaataagcgaagcattaatcggaacattgggcatgacagagactgtacggaagcgaatgaaaatggacagttacaaaagggagaacccggccgaattcggctgcgactgcgaaagggtaataacacatttacattgacaaacccaaacgaaattacaaaattgctttctttgattgccagcaatgcatttgcgaaatgcaagggcagcacccgtgcactgccattctttacgcgccgaagcatttgcgcgggagttggcgatggaatcactccacttac

SEQ ID NO: 50835 - DNA, 823 bp, Heterodera glycines
atgggaaattcctgcttaatttctgagtcagtaagaccaataaattcttcctcaaatggtttcgttacattcttccgtcaatcaagtaattaagtttaattacttatttaccaatattacaaaattaatcaattaattttcaggtgatagccaattattcgtaaaacgtaaattagaaaataaaaaacaatcgccgaccgaagctttccctaaacaaaagacacaaatgtcaattgctctgcctgaacaaaagaggagctataattttttgagctcaaaagaccgagaattgtaagtcattttgaacattttacaaaaaaatgaatctgcaaattaaattacacatttattaagcattattaaagttgttcttaaatttgttaccccattaatgtttttctgtcatatttattaaaatatttaaaaaaccggcggtaccgaaagcagcgcgggcgaaatttttgcgtgagattttctcaaagcttttatgtaacaaatttattttatttttaatgagagaaacatagaaagaattaatatcaaggatataccaagccaagccccagacgtccacaaacatttttttactgccaaacatgtcgggcacccaaccatgctaataagagatagcatcatttatatgctgaaatatttttaggatttttttatgttggcgtaatgacatagcgacaagccgaagagatttgttccacaagacaatgctgaaatgcattcagtcaagcccgaaaatgaacgaggttatcgcctgcggctattattgctacagagacctgacgaaatggccaaaactaaacagaatatg

SEQ ID NO: 50836 - DNA, 648 bp, Heterodera glycines
atggccaaagagatggaccaggacgaccgaatgattgaccaactttcagacggacactgttataggcaccgccgccttcgcctgcgcatcccacttttcaggtgagaattagcgaaatataaattctagggattagataaaattgacaagtcaaacacatatgccaaataaatattttcaaaaaattacaaaaaccaagaattcttagctagatcgttttaaccggtcaaaaatcgtcggcccggggccgtgctgacattttcaaagcattaaactaaaaatctctaaaatagataaatatgctatgaaaatcatatatttagtttaaatcattttgcaatttgccttaattgatttgtcgttcattttgtaatttttcccatcacagatatatcttcgttatcttcgtaatttatatttttatcgtgctcatttcggtaacaacgtataaaagtacaccgagaaacgttggcaaaaatcgaaaattgttgtccgtcccattcccaaaagcataatttgtgcagcaataatgaatgaatgcccttctctttccgttttacacaattaatttgaggcgtgcctttttgcacgcttttttgaaaaaatttgaaataacttcaacaacttatgttttcgatttttaataaa

SEQ ID NO: 50837 - DNA, 51 bp, Heterodera glycines
atgtctttctgtgccgagttcgcccctttcctttggcactttttttgccgg

SEQ ID NO: 50838 - DNA, 359 bp, Heterodera glycines
gtggactacaaggcattcgcgcatttgatcacgacttgcgcagcggaggagttggccaaagtgggctaagcggggccatggacggacgggggaggaaggagtggcggggccgaggccaacgagtgacctgccgattcgggggaaaaccgatcatccatcccgtcgttctttccatccttacgatcgatcacccttttccccctcgcccattgtatctccttttgttctctttctaatcgctccctctccaaaatgtgtgtcccggctggcgagaatggcagcaccttctaattctataaaatgcatcgtttgttttcgcttcactcagtgcacttccaaataaaatcgaatggatgggt

SEQ ID NO: 50839 - DNA, 548 bp, Heterodera glycines
atgccccaggcaatcgcaaaaggaatggacagaaaggatcagaacttttacaaggacagacaatcgagacggaatatcatggacatttgggcacacacaaaaaacatcgagaaagacagcttcgcaatgggaaaatttgagggtaagcgaatgggggggggatttggacaatttgacaaagaacggcggacactcacagagatatttggccgactcatccgattttacgaaccaaaagcattgctgccgaaggacgtggtgtttgagctgcactgccgcgatttcatcaatcggcatgccatcagcgacaagcattacttaagggtgagtaggtaggcaatggcacggaaagaacggcaaaaaaaagttaaaaatttaaaatttaaggaaattggcaaaggattgtatttggacctgtgcgcatacggtgggtcattagcgagtacggtagtcactcgccgattgtacagaccacagttgtcgtcctaatacggtgtacagttgtcgctcatttgtggccactctccgccccctccacgccaatgtga

SEQ ID NO: 50840 - DNA, 594 bp, Heterodera glycines
atgccaaacagcggcgtacaaaatcactacagaaaacgcgtcgcatattactacgattgtgagtttgtttcaattgctggtacaaatgaagttggtcccccatattggaataagtttttctgaaaatacagcatttgctggggtgcaagattccaaaacccatcatgcgaacttatttttatgacttgtaataaaacattttttgcgaactgtggggcgggagcagctttcctattaccaaattcccttttgcaattaattattttaagccaatgttggcaactattattacggccaaggccatgtgatgaaaccgcaccgaattcggatgacccatcacttgttacttaattatggtgtttatcgtcacttggatgtttatgtgcgtactttcgtcgttctttttgattgccattcatttctctgtttcagcgtcccttccccgcctcccttgaggacatgacccgctttcacagcgaagagtacatggacttcctccgttctgcaactcctgagactttgaagcagttcaacaagcaaatgttaaaatgtgcatttattttccgttttggactttgtacgttttccctttag

SEQ ID NO: 50841 - DNA, 812 bp, Heterodera glycines
atgagtaatttgggaccggaatttttgaaaaacaaaaccgggcataagaaatgccgaaaaagttgggatcggcactttgattttcaaacaaactctcaatttcttgtcgatattccatgttgtagcggagaatttccatcagactctgatcctgtcgatggcaagtcaaatttggagcagttgccgtgtaaatgcacgccttcgtctgtccaattggcaccatacagtcgggctcggcggcacaaagcaaagccatgcaaatttaaattattatattttaactttcatagggagaaaaattctatattttaaagggttaaaagggatcggaatcgacctttattttttgaaaaaacttgacccaaacatgaaaatatccgaatatcgggcccagtcctatggaaaatacaagccgggaccaaacttaatttcgacactctgtcaagtcgacactttataccgcctgtcgacaacagttggccgatcgattggaatgaaaccgcaaaatctaatcaaagtatccattatcataataataccggatattagcccaaaattgatgtaaaatggacgattttttaatgaattacaaaaaagttcgaagttttaattctcaatttattatccttttaccatttcattatttgccgcgtttgctcggatttgtgcataatcacaaagtttgtttcgaactgtggcggggtcaatttttgtgcttttgtcatatatttcagtcaatgtgtatgttctgttaagctccaaaatgggtgtacattggcaaaaattcggaaatttcctggaaaaaagcgaaa

SEQ ID NO: 50842 - DNA, 163 bp, Heterodera glycines
atggctttgctttgtgccgccgagcccgactgtatggtgccaattggacagacgaaggcgtgcatttacacggcaactgctccaaatttgacttgccatcgacaggatcagagtctgatggaaattctccgctacaacatggaatatcgacaagaaattgaga

SEQ ID NO: 50843 - DNA, 855 bp, Heterodera glycines
gtcgtactgggcgacatgggtgggacttggcattgcaatttgccattctgaggtcatttaggggtcggaaagacgagcattttgctgcgtcacgacggacagggcttcaccagtcagatgagctcgacactcggcgccagttatatctgttcacgatcgtcagtcactcgagacaaataattccctttttggcacttttacaggagggcgaataatgggcgcgaattcgaacttcaaatttgggacactgccggccaagaacggttcagatcgatggtaaatggtcaatggaggggacggggggggtggcacagaatttgtgatgatttgtccgtcccttttgtcccaggtccctctttatatgcgaaattcctcggccgcaatgctcgtctttgacatcacaaatcgccaatcatttagggatttggcatcgtggataaaaggtgagcctttcagtcgacggaagcccaaaaaaacacaaatttgttgttattttgtagaagttgaacgcatcgacgaaacgggcaatgttttgctgtttattgtggcaaataaatgcgacctgaaagaaatgcgaatggtcagcgaagaagaaggacggcaatttgcggaaaagcaaaacgcacattattgtgaaacatcgggtgggtaaagtaaaaggagcgacagacaaaaccaaaagggaaatcctttaaacttcgattggatgtgccaaattttcagcgctcagtggcaaaggcattgaaacggttatgtcctcaattgcggaatgccttttacaagtccttgtccctccggcttcgttcgtccgtccattgtccttttccaggaacagcagcgactgctgaaaagtgc

SEQ ID NO: 50844 - DNA, 924 bp, Heterodera glycines
atgcgcaagcctttgctttccggtgagccgaatgcaatgacattgttggaggaaatcacggagacagaagaaacggagaggggggacaccgatgaacaacaacaaaacaacagctcacaattcattcgcactgacaatgagcaggtgtggtttagtggtcaatgaaatgggctcccggtaaattggacaccagaaaattggacaccagaaaattggacactagaaaattggacaccaatggaaaaatggacaccagaaaattggacactgttgtaaataaaaatgaaaataaacaaaataaattactaaacaaaaattttggcttggcctaaaagatctttatcttaatctgccatatgttgtttataagcgtaaataatatggaaatgaatttgttattatttttgtaacttcaggagaagaaaaacatcatatcattcataaagaaataagttttattactcatttctggtgcattttttggcccattgatcaatcgtcacccatttctggtgcattttttggcccattgatcaatcgtcacccatttttggttaattttttggcccattgatcaatcgtcacccatttttggttcattttttggcccattgatcaatcgtcacccatttttggttcattttttggcccattgatcaatcgtcacccatttttggtgcattttgtggcacattgatcaatcatccctcatttaacccatttattctactcaaatttattttcacctaattcttgattttttttaaaaaggaaatcttagtgtccaattttccggtgtccaattttcctttagtgtccaaaattccggcggtgtccatttttccgcttggtgtccaattttctggtgtccaattttcttgtgtccccttttccggtagaataatcccccttcgccattttgaa

SEQ ID NO: 50845 - DNA, 177 bp, Heterodera glycines
gatcttttaggccaagccaaaatttttgtttagtaatttattttgtttattttcatttttatttacaacagtgtccaattttctggtgtccatttttccattggtgtccaattttctagtgtccaattttctggtgtccaattttctggtgtccaatttaccgggagcccatttcat

SEQ ID NO: 50846 - DNA, 767 bp, Heterodera glycines
atgttgtcgtttattttcgacttggccactgttattcttggtgccgtcttgccgatgttccgtacttggaaggttttgaagagtcgcaaatcaagacaattagtgagtgaacttcatttccttgggttattaaaatttttcgacagttaagattcctctctcaaaatattggattgttttcgcagcatgggtttccttcgaatctgtggccaatttgttttcgttgccctatttcattccggcttactcctttctgaagttttctgttgttctttacacttatctcgtcggttacgagcacatttaccaaaaagtaattaaacatattggcatttttaaattttagacttcttttagttcgtaagtccatttctccaggaatatgagccgaaccgagaagttttgatggcttcagctcaatattacgcgtcaaaagccactcaacatgcattagcttatgcttggaatacgatcacttcatgctctccaagtaaaattacgaaaatagactaaataatatcggtttttaaggatcgaaggcaattacaacccaggcgaatggtcaaaggaatgccgaatttcgctctgttgtacgaattgttgaacttgaggaacaggaggaggatttcgtcgatataatagagcaagatgagcaatttgaggacttagaggccgattctgacaacgaaatgacatctaattcgccgattcactgatttacgatctcataacaacaaaataatttatattttttgccttgcaataaa

SEQ ID NO: 50847 - DNA, 213 bp, Heterodera glycines
atggtgcgaacacgactccaaaaaacaaacaaatcgaaaaaaactggaggagaagcgaagagcaaacgaaagggagagaaaaaaatggaagaagaagaaaaccaggaaaaagaaagtaaagaagaaaaaagggaggaagataaggaaatgacaagtcaagaaacaaaggacatcacaatattgaagacagtttcaagtacggatttggaagag

SEQ ID NO: 50848 - DNA, 1367 bp, Heterodera glycines
gcgggaaatgaacacaactgccaaaaaacagctgaacaaccgaatgacgcactcgaaaatgacattgacaaaaaagtgaccgattttcaaacaatggtggaaacgacagaggaggacaaccgaagtggcactgccaccttcgaaagctttggcaacagtgccgagccgacaccaatggaaacgacaatttaccattcggcaaaagaatcctcggaaattggaacggacaatggacttctttcaaaaatggcggaaagtccgccgaaagtgccgccactcactcccccaagcattctgcgaaaagtgaactcccctggtggcaatggcgtcaaaaaggtagcgggaaagggtgaatttggtcaaatgcttcaatagattcgacgcgtccaattcaaagaagacgaacttggtcccggcagaattcgttttggtcgctccttttcggcgtcaccatacccaaaacgggtacaactgaaaacggatgggcagggcactcatagcattacagttttttatgcttttagctgcttgaacatctcgaccaaagcacaagcgaaggcgccgccagtccatcggctgacaatgagtcacccgccaagcgaccgatgaaagcgttcggacagatttggcccatcgccagcgccggtcgaccatcgacgaccactccaacgcgttggtccaagtcggccagaaggcttttgccaattcatggtgatgccattggccgttccaaataaatctcatttttcgtccattttagaaaggggttcgccttacgatgcgccggagagtgtgcaaaaggcgcagtcgtcggacaacaaatcggaccaatctgagaacaacagcaacgacaaacagcagcacgtggacgagcagctcgagaaactgccacggatggacgagcagcaaaaagacgatgaaatcgttttggttgggtcggcgaatgtttgcgttgtccttccggaagaggtgagatgaccccgatgatattataaaatcattggaaaatttttttaaaggaagccaacgaaaacagacatcagcaaaagcgggatttcgagcaaccgaacgaaacgatttcaaatgattctgacaaaacagcgaccgatttgggcaccgtttcgaaggaatctgaagagaatgccgtgcaaagtgaagcgatgtttcataagaaactgacgacggacaacaaatccgaaacatttgagagaatcaaaaacaaattggacgaacaacaagagaaattgaggcgacaaatggaggcattggtggaggagtcgacgaagcgaatgttggcaattgttgcggaagaattggcaatcgctgaaggattggccaacgcaatgccaacaaacgacggacaataa

SEQ ID NO: 50849 - DNA, 79 bp, Heterodera glycines
gaatgtccacgtgccacgaagtgactgtggcccggcagtgcggcatgcgcgtgttcggcttctctctgatcaccaattg

SEQ ID NO: 50850 - DNA, 590 bp, Heterodera glycines
atggacgattttcacatttccgctggaacaaaaaattgcaattattcaattgaacaacaatcattcagcttcgaagcagtggagaaataccacagcaaagattttgcgattccaatcatagcattaattgatgaaaacttcagcgaaatcgacgtaaaattgacaggtcattaattcattcattgtactgtagagatacggtacagccaacgaagatttacattttgagggacacaaatagcgaatgcaccaattcattaaaaaccacttatgactaagctttggctttagaatgaaccgaattttaattttaaaagttcattcgttttgtcggcgcatatttccatcataagaagtagacataaatattgtttgaattttaacaattaatatctgttataaaattttaaaagcatttttcagatgcaaataacagaagtttaatggaatttcacattggcacaaatcggtctctgaatgtcacatttcccgacgtaaaaaatggaaaaatattaatataaaatacataatatttatttttttattttaaacattattttaaaatataattatttttaataatattttaa

SEQ ID NO: 50851 - DNA, 247 bp, Heterodera glycines
atgattctgtgggtggcactgcgcaagaacagttacgaaattatgttgaatgacacggcgttggacaacagacaattttggccaaatgattggtgggaggggtcgggacgagagaatgtcacacatatcgtggtaaaaactgatttctacaaaataaaaatatttcataaaattacagattttttcgaagattccatttttgagttttttgggtattaaattctttttctactccaattcttaatca

SEQ ID NO: 50852 - DNA, 418 bp, Heterodera glycines
atgtcggaaatcggaattccgtgccatccttggtgtgcacccatttggacaacacttggcgagcagttgcatttggcctatcatcagcaatttgatcggggaacaggtcatcagattggatttaattcattggtcaagatcagtgaaaattgtcagcgaagtgtggcgacgtaaattgtccaactgattgccattgtgtcgggacacgttgaattttattttacgacaatttttttgtttgattcacttcgttgaattgatgatttcttcgccgaatttccatgcgatgacagtgtgccaatgctttgaatggacaagcggtggccaaatggcttttcacgccactgcaaaacaatgtgccaaaggtgttcaaatgctggttgaaggaggattattggcattttgcgtcatagattga

SEQ ID NO: 50853 - DNA, 1628 bp, Heterodera glycines
gttttggttatcaagcaacaaatttgtgcgcatttgcactatcagaaaattgaaacagcagctggtgttggatttgtgtgtctcgatgttaaggccgctttggaatttcggctcaattcggccaaggacaatttgatcagcttcgacgacgaattgttgatcaaactgagcggggaccacggccaagggtttaccaaattgaccatcagtttcggccaagcacttcgaaacaactctgcatccaaccatttcattgctgcagttttcccggccaaagacaccagggaaaatttggaacaatatggtgctcttctctggccccaaattgatcaaatgaatgcattgatcaacagaccgattaagtggtaaaaagggtgaatatttttttaaaattgtctgaaggtttctcggaggtgatgtgagctttgtgtgggcactgatcggtcattgcgggtcagcagtgacttcatttccatcgcctatctgcaattgtcatcgtgatcgattgctcaccgaaggacagcagtgtcaaacccggacaatcatgcagacaacacaacagtcagaacaattctccaaggccgtggaaaacggagagaaagcaacagccgcagttcggtccagcacgatgggaattgtcaaggcaccgctcatgaagacaattgaatttgatcggattattccagcaccgtttcacgtgttgcaggggttggggaacgcacttgtccgagaacttgagcagcaaactgatgccacaattgccgttcaacaatttctgcgacagataggggctcggagggaacaatttcgtaaaaaggacatgacgggaaataccataagaaaagtcctcaaacgtgcatcggaaatggaacatctctttgaatcgacgtggccaaagacaatttgccaagctctaatgcacttaggccaaatccaaaatttcacaaaagtacaaattttgagcaattcactcccaaatttataaatttaggctcaaccactttcgccaaatgacttggacgcatttgaacaccaaattgagcagttccgtggttttctgacccaagaacaacggatgcgcgacttcctatctcagaaaccgaaggcccacttattgctcaatcatttcgtcccatttgctcggcaacattctttcctcggcttgctggacgagcagggtggcagcaaacattaattaactcaaattttcaaaaacattaggggatgaggcacttcattcggtttggagaaggctggagcaatggtggaaatgcatgccggacgcggaccaaattctacaacaattggagcaccattttgtcagcaattggctccttgacaccggcagaattgctgagatgaagcaggcgagttttgagtggcgtgggaaggggttaattttcccagaaatcatttgaattttaaacattttagaggctggaagaacaaaaagaagacgacaatttttcggagcattcggatggtgaaaatgatgaagactcggtcatcgatgttattgggtgatcaaattttgttttgttttttaaatttacttaaaaaaattttagaataatatgacttaattattttttctttattcgttgagaaaaacgtgaaatattgcttaa

SEQ ID NO: 50854 - DNA, 1546 bp, Heterodera glycines
atggaagtcaatcgaattcttctccgacttcccattccacgcacaaagaattgcgaaccagaagaagactattgcggggagggcaaatgcatgtttagtcgtaagttcagcagaggccaatcataattacgaatgacaaatggcaaaactgtatatgtatttggacgataaacgataatttgtttttgtcgtaacgacatgttctgagaaaatgtgctaaatttgtcgtccgttttgtcgttcgtaattatgactggctcccctaattgaggatcgataaatttcgcctccttctaaaaatccgctcaaatttcagctgctgacggagaaggtgcaaatatcttcatgcatgttcagtattgtacgaatgaaacattgtgtgagaaaggggttgaacaggatattatcagtaaggaagacaacacggtaactggacgcttaacatgcgacaaaaggacttgttgcgagtggaatttgtgcaacggttcgcctttttttattagtgccgtggggggagcacgaaaatgcgatgccacaaaaatgagcaagaaaattttaagggttttaattaagtggggatcatccctgaaatttgaattttttattgcttttcgcacaatattgacagtgggcttagttcaaaaggaatttttgaaaattttgcttgaaaatctaaattaattacggaaaaaccctgaattgaccacgtgaatcgtgaccgtgaccgaaaaaccccctgaaattcacggtaaccatgaccgtgagtcacggcacatctctattatcttttaatggacattttttaaatatcgatgcggtatcgctttttcttgaaatcaaaaattttctcacggtgtcggattttcagggacccgtgctgcggtcggctgtcatttgcgctctttgtgctgggctttcgtggcaatgattatcgcattttgggctggtaagattaactttttggacatttgtttttaaatttttgaaatatttgatttttcaatatgtatttcgcataattatcaaataaataatcccatcattaagcatcatttgatcttcgctactaatgaggcaaacgtcggaaatgaaaccttttcaaagaaagaacgcatcttatataaaaacatattagtaaagaataaatttgtaaaaatttatcgcatcaaaaatcaaaatgatttacattttattttctgaaataaaatatattaataaattatatacccgccggaaggaacaaaacccgcgcagaatttttaattgaattgttctttcatgcatttttgtgggaaaagcaggaaaaggagtcattcagcaagagcagtggatttatttaaaattggagatttttgcaagaaatttttaaaaattaattatgattttagagcttgagccgaaaactgtgggtgattcaacaaactcacaattataccacttcgtttgaaaagaaaaaatattattttaagggtaatctaaaaaaatctcacgtgtttttagggaaagaaaaattttaattttaaacgataccaccaaaatttaaata

SEQ ID NO: 50855 - DNA, 1026 bp, Heterodera glycines
atggtgaggcagttcgcaacacattcaggtaaaaaattaaatttagatttaaatcataattttttccagaagggttctctctttgccgcttttgcctcccgacattatcagaagagctttctcaattatcgtggcggcgtcttctcctcctggaatgccagtgttcttcctttacttctctcgaacatacatcggcttgacacagcgccagttgttggatggtgttaacgcatttggagataatccactcaatttttcacccattggcaatcattgtttgtttaaatttatgcattttatttccaaaaatttaatttttagctgcactcgggacaacaatttcgaccatcaattcggaacacagctatgcggctaccccagtacagtccggcatcggctcaccggaaccaactcttacatggacaaccactgtgagtccacgggagcagcttgttcaatactcgttgagcacgctatcgacttcggcagcgccttcaggcagaattatttaatcaatcatccgtttaaatttaataaaaaaattcagttccagcgtgggaggacgaaatcgttcgtgcgccacattttccaattccgctttggaacatgcactcacagacaacatctgccctcgctcgtacaaacaacggactggaggcaactcatcttcattttatggtctttaatttattaaaaacaaattgaaaagaaacatttagaaaggcctctgtcaccaccccgccctttcggacttcatttgtggggttaatgaaagcatcgacagacaggtggacgctgcccgatctgctcgccatttcattcacaagcgacacaaacgatacatcctccaggatgctgtcattatgtgaattttggcggacgcgtcgtacaacagcaatggtgaaattagtgatctgatgtcggcgcttggtctccaagttgaaggatatgcgggaaaattgagagattttgaaaattacgatgattcaattgtccatgttccgtgatgattttattgaatgttta

SEQ ID NO: 50856 - DNA, 1850 bp, Heterodera glycines
tcttccatctatcgtcccccttactcttccttctatccctcacctccccctctcttccgcccattcatcctcttcccccctccctctcatccgtttcctcccttcctctccctttcccttttttcactctgtcccttttgcttctgcgcttttcaataagtttaatggcctttcgcgacacactttggcatcgcttcacttttccatcccaaaaagttcgtcgttcgctgcgaattacgtgctcaaaatggtataaagtgagggaaacacgcccaattacgcgtttcatgcgccagcccaatgggcaggcaaaacaaaatggtgccgcggcattttatgaaggggcggggaaattcccccaagttccctttccaaatgatggcacagaaaaaatgtgaaaaaacaaaaattggactaattttaaagcttttttctaatattttttaatcaattaaagatttgctgaattcttattgtgcaaaaaaacaaaagcaattagcaattcctttgcaaaaagcgttaagcgatgggaaacgacgttttttgagccatccctcaggggatttccattctcacgtttttcctttttattttcttccatcttctggactccgttccaaacaaaaaatctatgtttttagttcttaagtctcctattaccgtatttttccgcttccttacagtttccttctcttccgcgtcctttcctaccgtattcttccgcttcctacagtttccgtcccttccttgacctctttttgcgcttccatcggcggatggatggcgccgttcggtcgtccgccgcttcgtctccgtccctaagcgatgttctgctcaattttccctcctcaccttctcagccaagcgaattgcagttgttcatctacggatttatcctggtaacttctctttctcttttatttttttaaaattttatttgtaattttatttaaatgcttttccttccccaaaggttctcattccgaccgccactattctgggaaatggcctcgtcatcgtttctgtcctccgattcaaagctctccactcggccatcaattttctgattctcggcttggccatcgccgatttaggggtcgctctgtttgtcatgccatacgccgtctacgtttacgtatgcttcttcttttcttctatagaatgccttttctaattgtctgtttaggtccaaggcggtcgttggctgctcggttagtctgttttttgtcttttcccagtttgccaattctccctctccccaggcccgctgatgtgcaatctctacctgagttcggtccgtttctctctctctctccctccctctctctctctctccctccctctctctctctcgaccctctttctctctctcacgttccctcccctctctctctctcacgttccctcccctctctctctctctctctcacgttccctcccccctctctctctctctcttgctctctctcctccgcttgatcagttcacttttcctctcttaaggacgtcgcgtgcagtaccgcttccatcattctgctcgccctgatcagtttcgaccgataccaggcgatcagtcacccgattcagtactcgcgccaggcccagaacatcgcccgcgtggtgcggctattcgtcggcgtttgggtgtactctctgctcgtcgccagtccaatcgttttgggtccctccgcttttggcattccgccgagattggcttttcattgctccattaggtttcaacgaccctccgcccgaggaaagcgctttccggcgcctttgagcccttccagggccgcttctacaacccggggtctccctgttgccctccttccgcccccttccttctcccc

SEQ ID NO: 50857 - DNA, 397 bp, Heterodera glycines
atgagtaaacttaatgaatgtaagtttaggcaagccatcccacagccatgaattacttacataatttgaaagttcattttttagccaataatgggcctatggaaatgaagttttcggaatgattttcgagtccgagcagatgagggcaattttggaccattctcatggttcctgtttatagaaaacaactgctggtggagctgagtgaaggggggggggggaagaattggcccataaaaaagcattgggccgtctcttttgctccttccagcaggcattgaaaatgaggcagaaaagagcatatggccaaagggaggaaaaacaattttgctttttatctaagttttactttacaaacattttttacaaatcgaaccaaaattagttgaaattttca

SEQ ID NO: 50858 - DNA, 99 bp, Heterodera glycines
aagacggccaaatttctcagctttttggagcagttcacactgtgcacaatgttccgcatttttggccgtttcgtcggcacttatcccatcgcatttctg

SEQ ID NO: 50859 - DNA, 461 bp, Heterodera glycines
atggccaaaagtgatcggcaatcgaaaaagagccaaaaagtgatcggtaatgaagacatgatcgataaattggtcggtcgaagtcagctaatggcggcagagccaaaaagtgatcggccggtgatttctccaagtttgatcaaatttttaatttgttgtctttcgtgctgttgtttcgcaaatttacggcaggtggacaaagccaaaatttggccaaaaaagaaaagtgtgagatttgtatggccaaatggctgtaattataaagtattattgcggaattgagaatctgttgagggaaaatttatatataaatatattttttataacaaaattaaaaaaggcaaaaaaaatttcaaagaatgagggcgaattttagtcattgctcagaagtgaaattaaaatttaaaattcacacttattttatttagcctaagggttttctttttataaaaattaataaa

SEQ ID NO: 50860 - DNA, 845 bp, Heterodera glycines
atgggctccgacttccttcaggtgttctcctacttccttgccaatgtgtccgattttgctcacccctggggtcagtcattgtgtcaatctgtcgccactaattaagtcgcttttcctacccaaaataattcccccatcattcgtttcgctttttcattgctccttttacgttaagcctatcgcctgcactgtcacagctgcatgagtccctatttggaggatcagttccaattcatttcgcacctctaccgacggcccctcgtgttcagtgaaaagtgcgaccacggccaattcgactggcgatacatcgccacgaaaaactgttcagatgcatgtgtaacactgcgaatgaacgacagagtgggcggtgagtggagacggacagacagacagagacaaaaagggaattttagagagaggggaaaaaaggcaaatgaggaggcgaaaagaatgattgataattcacacagttttagtaattgcttctgttttcccaggccggcgccgtttcggctttatgcgcgggtgtctctccgacattatccaccacaatcgaacggctgtccgatttggcgaactcgccaggacagcaaagtcgggcgcaacaatatgctcggctatccgactaagggatttgttcatctcttcggacaggtcataggcaatttctgtcgaaattggcataaacttatccattgtttaggtatgccttcgatgcgcatgatcacatcgaactttgtgcttgcattcggtccaattgcaattccgccaccaaaaaatttggcattaaaaatgccattttgggagtgatcagcacaataatcagcttcatgtttttaataagg

SEQ ID NO: 50861 - DNA, 1206 bp, Heterodera glycines
atgaaaagaaaacaaagaggtggaggaagaagatgcgagagaaaaaggacgaaggaagaaagaataaaggaaaagaagagacggcaaagacaaaaagcaaaaacagacgaaggaagaaagagtaaaggaaaagaagagaaggaaaagacaaaaagagtaaaggaaaagaaggaacggaaaagaagagacgaaggaagaaagaagagcagaggacaagaagcgaaaacgccaaaccaagacaaagacgggtcgaactttgtaaaaagaagaagtgttatgttcaaaacctcaaaattttaaattgctaaatttattttcattcttttttattttcacatgaattaaacatgaaccagaatgtttaaattatttttgcgagtcacaataattccccacatcgacttccatttttcctttcttttcaaataatgaaaatatttattaaacaaaaaaaatgcaacaaaatattgtcaatgacttacgaaatcaaaggctgtgtgtgctttatcagtcctttggctttcatttttgggccccaatttttgcctttattgtcctgaaatcgaagcattccgatgaatttgctctttgggatggaatccggatgggtgctgaagttgatttcacacctaaaaaacatacgttcactaataataatcatggaatgggtcggtcggacttcgtttccttcgccaaaatgcgactgcgcggactgtcctcccccgcctcggccattcctttggctgtgattccgtttcgttttgcctgcaaaaatggaacggactgatcatttgcatcggcactctccgcgtgctcctctcacccattcacggcacacgtcccacagaaaagaggtcggcgcgtccgttttgactgcccgcggattgcagtgggagatggagcagcggaagcccgcgttgagcagggcggaccggaagacgttcattttgggcgaggggcacttcatgacgaccatcagctggtcgtgttcgtagaagaggggcacgtcgggcagttcctccgacagaaccgtcagaaggccctccaggcgttcacgagtgccaagtctcagctgccccgcattcgggcctttcaatctgaagccaatcgcatccgaattagtaattcattgacatcaccgacattgcgagcagtttcccgacgaattcggtgtcccacgtcggcgccacccaaatggggccgccc

SEQ ID NO: 50862 - DNA, 839 bp, Heterodera glycines
gcgtgcgcttctccaccgcccatttccagtccgaattggttcgtctccccgcgggacagtccgacgcgtcgatggacggacgaatggtggccaaatgcgcgcattgtggggggacggccattcacacgggcggccccatttgggtggcgccgacgtgggacaccgaattcgtcgggaaactgctcgcaatgtcggtgatgtcaatgaattactaattcggatgcgattggcttcagattgaaaggcccgaatgcggggcagctgagacttggcactcgtgaacgcctggagggccttctgacggttctgtcggaggaactgcccgacgtgcccctcttctacgaacacgaccagctgatggtcgtcatgaagtgcccctcgcccaaaatgaacgtcttccggtccgccctgctcaacgcgggcttccgctgctccatctcccactgcaatccgcgggcagtcaaaacggacgcgccgacctcttttctgtgggacgtgtgccgtgaatgggtgagaggagcacgcggagagtgccgatgcaaatgatcagtccgttccatttttgcaggcaaaacgaaacggaatcacagccaaaggaatggccgaggcgggggaggacagtccgcgcagtcgcattttggcgaaggaaacgaagtccgaccgacccattccatgattattattagtgaacgtatgttttttaggtgtgaaatcaacttcagcacccatccggattccatcccaaagagcaaattcatcggaatgcttcgatttcaggacaataaaggcaaaaattggggcccaaaaatgaaagccaaaggactgataaagcacacaca

SEQ ID NO: 50863 - DNA, 618 bp, Heterodera glycines
atggatggtgctgaatcagtcattttgcagtgcgcaactgagaaaggaaatggcgttggtccatcagtcgcggccgattgtgaggcgaacaaattggccgaagtcaccgagggattggcgagaatcaccgcgacggcggagggcggcgagactttctacaaccgagtgcaggagttcaaccgagacttgacgtaaggcttcaaaagccgagcgaagggcgcgtctctttccaccttaaggagtttagggtcgtcgttttgagggcattcgctgccgaaatacccaacgaaaaagagccgaaaacggaagaggagggcccaaaagccaaacagaggaaaatggacgagggaaaagcacccgaagcaaatgcagcgcaatccgtaagcattttttagtcattgaaagtgcccattttcgcctcccagcagccccgtgccttttctgtgctcgatgccttgtccgcttctggtctgcgcgccattcgcttcgcgttggaagtgccaaatgtgacgcgagtggtggccaatgacttctccgagaaggcattcgaagcaatccgtcggaatgtgcagctgaacggcgtcccagacaagtcgaggcggtcttttccgacgcaat

SEQ ID NO: 50864 - DNA, 127 bp, Heterodera glycines
tttttgaaacaaaaggggggacccttttgttttgcaaaatttttttaagataaaaaaccatgataattttttatccggggttttaaaggtcgctaatcacgaatctgacatgtattttgactaattt

SEQ ID NO: 50865 - DNA, 1100 bp, Heterodera glycines
atgtcattgtctgatcagatttcccttaatttgtatttcatttaccgtccagaaattgtttgcgggtgttccgatgggaggcaatgcattgcattagtgccaatgcgttgcagacgcggtttgactgggcagcggtgagagtgggcggcaaaatgaacgggtaaatgctaatgatctcttggagaagcacgctaaaagccgaaggaaatgcagtttcagttggaatcaaattggagcagcacctcactgtcccataagagaaccacaaccaaacggcgaggtcctccactccctcgcgacgtttgctgaacaaaatgtgtgattatttaggcatttgaaaacggatttttgaatttggaaaaaacaactaccaaattcatcagttcttttctttttatttatggatagtgggaactaaaattttattaataaaaacaaaaaactgttcacattttaacaggatgttttttattatgtcgcattcatccaaaatttttataaaatttgttttggcttttatttgacagagtctgccttaaattgcgttaaaaagaacggcaactccccaacctaaccttatctgcaaaagtgcattttctcgcttttcgtgctcccttagttcgcgaatccagtgacaaatttgttccgcgtccttttctttgctattctcttctttattattggacgacgctgttgctgaagttgtcgttgtcgaggtcgactgagcattggcaatatttggcgatagcaatttctccattcacttatacaaatccgctgaaaagaaaatggaaatgatttttactttatttaggcgatcaaaggctttttaaaggaagttgtttatgtcagaccatggggtaaacccaactcatccaaacccaactcatccaaacccaactcatccatacccaactcatccatacccaactcatccatacccaactcatccatacccaactcatccatacccaactcatccatatacccaactcatccatacccaactcatccatagcacgatacgagtcgtcaccgtggcatttaatgccacgactaagactgtacaaccaaaaaatgccacgaccgagaccgcataa

SEQ ID NO: 50866 - DNA, 593 bp, Heterodera glycines
atggcccttcacattctttccatgtttggcaattcatctcattttgtgcgtgttgtgcaccatttcaacattccatttgttagccatggctattcacaaatatttgagcatttgtcagaaaaagttggtttaataatgtttaaaataataaaattatttttatttaaaaatttaaattcttttaaattaatttttatattcaaaattgtaatgattatatatttttaaatttgaaaattttcaaataataagacttgtaattttatgaaaaattaaagcatttaaatgaatattcaaataaattgtaatagtgaatttttttttaattatttattaaattaattaatttaaataataaatccaataatttgtattgatccaaaaactaaaaaaataacaattttataaaaagaattaaaaatatcaattcgacaatatatttttttaattaaattatataaatacaaactgtaaactcttgtataagattacaaaatgattttaaattaaatttctttagaattgctctccagcgaagcacaatccgatcgacaaaaatgaagcgtttgcatttgttgatcatcggtttatgg

SEQ ID NO: 50867 - DNA, 304 bp, Heterodera glycines
atgggttatgaattgcatcattatttttgcttttatacatttatttttaatccattgtacatcggacggtgttcagcgggtccttgcaaacctagcaatggtagatccttctaccgtacagcaatagtagatcattctaccgtactttgtctggaccgttgggatgccattatataataattaaaagtttttaaaattattttgataaatattgaaaaagtaattattattttttatttagtaatatatctataagtttaattttcatttatatttaattttaattataattaattaaaataaa

SEQ ID NO: 50868 - DNA, 150 bp, Heterodera glycines
tgccattttccgcttgtgccgcctgtacaattgaatgaaagtgatcggattagagatggaaaggacggccaatgtgcacagttccaacggcgtataggtcagcttgaacagattggcgccccacagcggacttttaacacgatcacctga

SEQ ID NO: 50869 - DNA, 2181 bp, Heterodera glycines
ctgacatcaaaggaactggtcaccgcttacatcgaccgattgaaggaggtcaacccgctgatcaacgcaattgcgcacgaaaactacaaagcggcactaaaactggcgaaggaagtggacacggaattggcaaaaatggattcaaaaaagcgaaaatcggtaatgggtttaattgatcaaaattgattggactaatctaatggcattgtttagttggctttctcgaaaccgttttatggggtgccgttcacttcaaaggacaacctgaaaacaaagggatttgtgaccattgcgggcaatcgctatctgaaggaaggcggaaaagtggccacggaagacgcgctaatcgtaaaacggtggcaattggatgaaattaagccaattaatcaaataaatagccaactttaaatgcattaaacaacatttgatgctaaaaggttcccaaattgggttttttatggaaaattttccggtcaaaggatgaaggatgcgggtgccattcttgtagccatctcaacgctgcccaatttggcgatgagttacgcatgcgatgacaccgcttacgaaggagtcaccaacaacccacacgacacacgtcgcattccaggcaaaacaaacagcaaatgcaattaaatgctaattaacgagttcttaattaccaatcattcgccgctttttcaggcggaagcagctcaggcgaaggagcactgatcggcgccggcgcgtcactgtgcggaattggcaatgacatggggggatcagttcgaatcccggccaacatgaacggagtgttcggcctgagaccgaccagttttcccgaccgtaagtgatcattggcataaatgtgctgctgatcagtttaggttttgtcagcaatgctgcacataactgagtttcaattaacgacaatcagtaattacggaaggttttaacaaatccgtgacccttaatccgtcatgactgtgtccaaaaacgccgtaattccaatgaccagaaattgcttgtagcctttggtttatatagtgtacccattggttgaactgaatgaatgatattctagcaaacattaaaaaaatttctacacgtgtttatctgtttctgatcatcactcctttcccaatcagacgttgtgccagccgaaggaattgtgccggacagccttctctacaaaccagcgcttaacatgctcaccaatggccctctctgtcgctatgcctccgatttgccattggcacttgcggtaaaagaattataaatcaaactaaaaccattaactaaattaacaaaaacattttatacaaaagttgatcaataaagcaattccaaactgtctaattataaaagcgcgatcaaatgaatttaaatccgctttctttaatttcatttaaaaaaattcttatttttaatgtcaatgaattttgaaggtaatggccggtaaaaaggtgaacagcttccaattggacgtggaatttgcgaaggatttcaagctgtactacttggaagacctcaatgttttgatcactcatgagttgaaagccgagcaaagatttgccgttcgaagagtaaaagcattcactaaattatgctaaattaaaatttgcaaaaccatttcaggtcaaatcgtattttgagtcgaaatacaattcaacggtccaaaaggtggagttcactttactgtcgcgttttctcgaactgttctatgccgacccgtggaaagccggagttccggtgtgcaaatcactcaaatttggcactaataaattgatcgtaattaatttacataatttatttctggcagaccttcgatgagctgaaaacgacgtaccaagacattcaggcaggcgtggcaaacgacacttttttcgcgttgcaatttgaggcgttgaagcgatttgctgtgccaaaatcggaaaatgaacagaaatgggtgggaattttaacacaaaatttcgatctgttactgattagacaagttttgtgttccttcaggtgctgctcaaaaaggagaagctgcgcaaacaagttgcccaattgctcggcaaaaacggactgctgctgaccccggtttggccaaccgatgtgccattccatcacatggaaccgttcgtcgctttcgacctcaaatacacaatggtaggccagtgaagggtgcttgctataggtgccttcttcaatccgccc

SEQ ID NO: 50870 - DNA, 1124 bp, Heterodera glycines
atgaaaattcaaatattattatttattttaattctcaaaatttatgctggcggaataaaggaagaaaaaagctttgacgaaatatttggccaaagatgggacgaaaaatcggaggaaaatggagagaaagaaactgatcaacatggaataattggacaaaagaatgatcaaaatgagacaaaaaatgatgaaaatatcgcacaaagattatttgcagaacaatttgatcaaaattttgatgataattcggaagtgcatgacgagcagagtgtactattgtccacaaattgtgatgaattggaacaagcgccagtaaaatttggacaaatttgtgatcattttataatttttgaaaataaaaagaaaatagaaattgtggaaaaatttgataaaattaaagaaaaagttaagcaaatgggaaagaaatattcaaagaaagaatggaataaaattgaaagaaaaattgcaaaaaaattgggtgaaaatcaaaagaaaatttacaaatggaaaagagaatttggaatgatgaagaacaaaaattattcagttgaagaaaaaagaataatgttaaagcaatttgatcaaatatatggcaaattaaaaatgaaattaaatggaaaattggaaggaaaaaggacaaaatgccaaaaaataatagcaacacatttgggcataagtttaaaaagcatttataaatggaagaaacaattaaaaaatggaaaacctttgaaaaatcaacaaattgatgatgaaaaaagggaaattgttgaaaaatattttaaaacaaaaaatgaatttatgcaaaatgggaaacattcacgaaaggaatgggaagaatttagagcaaaaattaaacaaatatttggtgtgaattatttgacgactgaaaaatgggcaaagaaattaaatttcaatcaaaatatttcaaaaggtgaaatgttttttatataaaataattttaaaattaaattatcttaaattttatatagcgaaacattttgtttttcgatgcagttttaaagcaatttctgttattttcgtacttattttcttagttttttgtcataatccaaaaattgaaagacccaatctgacagatattacctcaaaatttcaaaaataaa

SEQ ID NO: 50871 - DNA, 622 bp, Heterodera glycines
atgaacaaattgagtgagaacgccgccttctcgaagcatcttggagtacagccgatctgtttgccatctgtagtcactgattttggatttggcgacacgattgaaaagttctcgaaaagcttttcagtcgtcaacaatcagtctttatcggcagatccggatctcttcaagccgaaagagggaatggtgaaaagttacgacaatttttgaaagacatcggaaactgctccaagatttcaaattagaagaattcgacaaggccaattcaactgcctcatgctgcttactacattgaaagtctcaaaatgattctgtcttatgcagtgaattttggccatatttacagcagatggggacaaaactcaagtataacaacattatggaagaattacagatttatctttccaccattgcgaggctattgaacagccttctggcgttggagaaaagagagggaatattctggggagggatttggggattgagttcggggatggatttgaggggaataatttccgaattcaatatcactttacgattaaagtcaaatgctaactgctcgtttttgtaacgacagctttaaagccaagggtaatcagaagttggggaatttatcaggaga

SEQ ID NO: 50872 - DNA, 1155 bp, Heterodera glycines
atggcactgaaaagaatgtttttggcacaaaaggcacttcgccaagaagcggcgaccgaagcagcggaagggacggaaaacggaaataacacaacgaaaagccgagtgaaaggacgccgaaaactgagacagcagcagcaacaacaacagtaccatcatcagaatgtgaatgcattccaatggatcggaagcgacggatgggccgaccgattggacgtggtacggtaggacacggttgggtaacagtcggacagttttgggttactgttggactggctttaagcagacattaagtatttgcccaattgaatgttcggataaatttttccctttaatgtggcaacgaatctagtcacttctcggatcaaacattcaatgccgccgacttaaatggtcactaattgcctttgctaattaggtggagggcgtggaggaggaggcggccggcagcttttccattcgaatccattcgccaaatgtgcgcacctttgagccctattactttgcgcttaacccacacaatcacacgcgcaacccgtggttccgcgagttttggcaacaaaagttcaaatgtttgctgacggtgccaaaggacgacacggtcagccgacagtgcaccggacaagagagtctggccaccgggtacgagcaggacccgaagctgagccaggcaagaaacagtagaattggggggatgacacaattggggaaggggcacggcacaatcaacgggggaccggtagagactcatccgcccatattattgagattaagatatggcaccaaaaataggcattaaaaagggcaaaaattaaattaagcaaattagccaattccatttttctatgatttcggaggggatttggcaatttttatgcaaaatcatttgtttccattttctttcgcttgtgctaatctctcattgctcaggtgataaacgcgatcagagttgtcgggtaagttctatttgtattaaggaaaacctattaatgaaatttcctcggaaaagctatgccctccgggagatgtacaatgacaagtgccattcctcgcggcaaaatgcgaccgccaacgcacttctaaatgcccaatttgggttgccatgccccgaaatggaaaccatcaacggcacacttttgtttaggcaaaatgaga

SEQ ID NO: 50873 - DNA, 372 bp, Heterodera glycines
atggccaagcttgccaagctgtactcgctgctgacggacaaggagttgagctcgctgtcccatacgctgcagttggcgcgaccgtccaccatcactgccgccagcgcaacggacgcgacgagcaccagcgactactgcacggagtcgtcgccaccgccgccgccgcaacagtcgccgactgtcgcctccggcgctggcgttgctgccgctgcatttgttcaaccgccgcaacacaggccaacaaagagggcatttctggaggacaaccacaacgactacaacacgggtgggcaaaaagggacataatttatttaactaaatggggcagggcttgcatttaagttgatcccacatgaaataatttgaaaaaaa

SEQ ID NO: 50874 - DNA, 183 bp, Heterodera glycines
ggtgcaacgacggatgttcttgtttgcagaaccaacacatcattttagtctctcgaaaatttcgtgaaattttatatccatttattgatacaacacacttttgtttttactaaacaacatatgtatgagggaggacgagggtgatatgatgatgatatgattaaatgattaattatcccccaa

SEQ ID NO: 50875 - DNA, 444 bp, Heterodera glycines
atggcgtccaggcggcacataataaaaatgagtggtgagagataattaaacaaaaatttaaatcgaattttttttaataattagcacattgtcgtgtcaaatatggtttattcgatcaactgaatttgatgttcccctttgatggagtggtgggtttttggcttggcaaaactcagggacaacaggagcccatttcaaatatgggtatgatttttgaggccccaaagggccggagaatttaattcttgccacatttttatccaataattcagacagatttgtaaacaaaccaatgccaccacaaagctcaaaaaaaaaaatggaatcagtcctttataattacattttgtgattgattgaatttgtatgttctttgtcaagaaaagaatgaatttccatccacaacgataaacacacataaaattcaaagtgcaatagaataaa

SEQ ID NO: 50876 - DNA, 89 bp, Heterodera glycines
aatgagtcaaaatgtcccccctctaaaaattagtgaaaaaactgaaaattatataattatatgccttcatacgatctgcttttaaaatt

SEQ ID NO: 50877 - DNA, 1693 bp, Heterodera glycines
ccagatcgaaaaagaagcattggctctagtgtttgcagtacagaaattccaccgaatgttattcggcaggaaattcaccttatttactgatcacaagcctttgcttgccattttcggttccaaaaagggaattccggtttattccgctagccgattacaacggtgggcgttgatcatggcaaattatgatttcgacatcaaatacacgaatacagcatcatttggacaagcagatgtcctctcaaggctaatagccaattatccaaagcctgaggaagatgtgttgattgccaacatttgcgtcgaaacggactgttatattaacaccattttacagtcgcaaaccgatcatcttccagtaacggcacaagaaattgcggaatcaacaaccaaagatgagacactccagaaaattgttaattttgttatttctggttggccaacgaagtgcagggaacccgaaattgcaccatttcatccgaaaagaaatgaaattttggaaattgggggctgccttctctacaaaagtcgtgtcatcattccaagccaattgcgtggccgaattttaaaggcattgcattttgcgcacccgggaattgtgcaaatgaaggccttggcacgccagtatgtatattggccaggaatggattcggaaattgagaaagtcgtacggcaatgtgatgagtgccaaagtgcacagaaatgcccgattaaggcaccattggccccatggacagtcaccgacaaagcgtttcaacgcgtacacatcgacttcgctggaccctgccaagatggatttgtttattttattctgatggacgccttttccaaatggccagaagtctatcaaatgtcttcaattacggccaaatacaccgttttcacaattcgatcgataatccatcgtcttggcattcctaaggaaatagtgtcagataatggcacacaattcaaatcagctgaatttgccgctttttgtcaagaattcggcatcaagcataccttttcaccgccatttcacccgcagtcaaatggccaagtcgaacgatttgttgacacctttaaaagagcaatgaaaaagtgttcaaaagacgataaaaattggaccgaaaaggtgctgctcgcttacaggacaacgccaaacaatgccattgatggctattctcccgatcaattattcttcggacggaaactccgaacgaaattggcattggtccttccgaaaggacaccgaaacgattcggagaacatcgacaaaattcagcgcgacaaaagaagaaaggactattcgaataaaatggcaaaacaattcgatgaacggcatggtgccaaagaaaaagtctttttccccgccgaaccagtcctccttttgaactacaggaaccaaaaaacttattggctccatggtacaattgtagagcgagtcaggaactcgcctacataccgagtccatgtaccagttcttggtcgaattgtccaccgacattcgaaccaacttcgtcgaaattgtgttttcgaagagaattcgaaacacaatcctggtcccgatcagcagccaattccaccagtcaacggacaagctcaaaatttggcgcatcaaattgctgatccggtcgatcaacggactgatcaacaagccgcaaatgacccgccgacaatggctcttcgacgatcgcagcgtaagccgaagccg

SEQ ID NO: 50878 - DNA, 3524 bp, Heterodera glycines
atgtcgagagtcttgacacgacaattccctgtcgctcaggcggacaaaccggcggttgacctggaacagttgcgccaacagttgcgccagcaacacgcgctgaaccaggaaattgttgcggagaagaacggactgcgcgacatggtcgtcgaggcgacaaaagttgcgcgagaactcagcagcaccctcggcggccaagagggccaagacgcgatgatggccaaggtggagcgagccaagcgcctggctgacgagacgatggagctgggcacggagcgggtggccgagttggagcaggtaaatgccgtgccctgtgtatgtcaagccgtagaattaattttgttacaaaaaacatggatttagcagggtttccatataatttttaaggcattttgccttctttctcatagttgctgattactgtatcactgataccccgatacagtatgctttaatggctttaattgctagcttttcatcagtgtcacgatagttaggagacggtttgaaatgtttacaattttatgacgggtttttatgaagacgtatctgacatgacagtttatgggcccactgataagaatataaattaaacactacgaattgatagatttttttggtccttgcaaaacttgtgaatttttaaaaatttcaaacgaaccctttggaaaacgaataaatgggggtaggggttataaaaaattttttaaatttcatccctaaatttgcttaggctttcgcgctgtgcaaagagttggacgccgaatacacggaactgaacgaatggatggacggggtggagaaggaactgcaggcatgcgaaccgatcacacttggcattgcagcgaaagcattgttggcacagcagcaacacaacaatgtgagggaattgtggaggttttgatctgatcaccactcaatgtgggggtacggtagaccaaacaaaattcattgttgatcaaattctcaaaaataggacgacaacctttatagacactccaataattagacactcaattggtatacatagtagactaaaaattgattgatcaaacactcaaaacagggagggatacgatagcgacttgaacaatttgggcaataatattcgccagtttaatttgctatttttctccattggcaccaaattttgaataaatttattgagaacaaattttatgatcaagagaacatagtctctggactcccctccctgaattttttctagtctcattttgaatgatcactgatcaattgatcataaaatgatcaaatttctttgttggtgcatattccagaaaaataatttgatcatttcattgtctaatgctcagacaataagtaatttgattataatttgctgattagtgtctaattgaaccactgtacggtgtttgttggagatgttaaattggcgttttgacctttttacttattttcatatctgtactttgttctccacgccccaaccctcctctttgtgtttataaggagaccattcccctcctttttttgactcttccctcattcattcgtttttattattatttgcatttgtccaccgaccgatcaataaatatttttattctttgtgtgttcaattggaggaacacaacaaattggcgcagtcagcagccatcttctctactgaagacactgcaattcatcgaaaaccaatagcacccaggtggtgtgaggtctgctaatatagcagttcaattcaactaaaaaccaaaagacacaattgtggtgaggttccgcaatacgcggttttatcttcaaatcttcaaaaatccttaacactcagcaagtgtagggagccaccaggtgtggttatttggatttcaacaatttggcaatggacgcggaccaactgaagcaaattctcgatgcagttttggcaaaatccgaaaagcggattcaacaaatgatgaatgcgcagcaaaatgttggaccttctgagagcctaagccatgcaaatttggcgagctcaatcgatggacgaatttcaaaatttcattacgactctgagtcgggaaatacctttgagcaatggtttaaaaggtttggaatcctgatagaagaggacggaaaggatttaccggagtcagcaaaagttagacttttgctcggaaaattggctgacggcgagtacgccaaatatagggacagcattagtccaactcaaccggacacagtcaattggaaagattccattgacaaattgaagggtttgttttcagaaacccggtcattatttgtccgccggtatgaatgtttccagattcgtcagcagccaaaccaagacgtgtcgacattaattgctcacatcaatgcatcatgcgagaatgctaatttgtcattgacaaaagagcagttaaaatgcatgattttggtaatcgcattgagcgatgaccaccatgacatgagacaaaaatgtttgaaaatgttggaggaggcagagaaaagtggcacacggatttctctcggacaaattgaagaagagttgaaagccatgcagcttattaaggacagtgcattggctcttctttcaccgccaatctcaacaaatgccatccaacttcgtccacaacaatggagagagcccaaatcaaagaaaggcaattacaattctgggaaaacgacagcaaaccagcacacaacgggaggcaaagcaaatcaaagaaagccgatctacccatgtggcgcttgtggaaattctgatcattggcgatctgattgcagatttttcagtgcaatttgtcataaatgccaaaaacagggacacatagcaaagatgtgtccccaaagatcagcttcgacatcaaattcaagacgtcaaaatcgggctgtgcacacagtcaaagtgacaagccattgcttgaatgtcggactgaatcgcggtcattggtggaagcttcaagtgaagataaatgacaatgattgtgagatgaatggggacaccggagcccaagcaacaatcatcacaatccaaacatggattaaattgggaagaccaaaattggaactgtcggacattgaaatgcataattgtaatgaggaaccatttcccaccgaaggaatgtttcaatgtgtcgtcagttgctttgacaagccgccaaaaaggctaactgcatatgttagcagtgctgtcaattacaatctctttggattgccatggattatggcttttgatctgatcccaagggaagtcatgtttcctaaggttcagcaaaaagagatgtgcgagccaatcagcatccatgccacattggcaccaatgccaaaggcaaacatcaaggatgaagcatcactgattgaggctttgaaaacggatttatctgatcctgaaacaggatgccaagccaattttctgcaaggcacggccaattccacacggtgcaactgaagccgtaaacgctgaattgtaccgacttttggaaatcggtgccattaagccaattgatttcagccattgggctgcaccaatactcgcagtgaaaaagaagaatggcaaaacaagg

SEQ ID NO: 50879 - DNA, 1106 bp, Heterodera glycines
atgacacattccgaaatgaacctcgaggatgttcttcaggtataattggatgtatgtaccaaaaagtaaaaagcacctgtttttcagtaagccaatggatttaacattagggagggatctattaatttttgttctaatcagggttcgaatttatcatgagggatgtcaaataaaattctccgataatacttgctttttcagttgttagaaaaggccagctcgcaatcatcaaaattggaaaaatcactaattgaaacacccaaaatcagcggcctttttgctgaaattttggacttgtttttggttgagctgacgaaccttttcacctccatgtgttttgacttgaacaaaagccgtacattgaattcggacgaccaagcaactctttgttccatcgtcagatgtgtcccttatttaatcacagtcatttggaaattactgagcagttccaacctttgcaaaatctgtgcgtccattcaaaaaagtgcacaattgtgcacaaagtaacgttgtagcctttattctctttaatttcctattttagtaaattgtccgccaggcgttccaaaattattcaaacggcggtggaatttgttgtctgcttttaccaatctttcgcttctttggagtttaaattcaaatttgttcaagacaacgttgacagaagcgagtaagcaaactgttaaaaaaagaagaaaaccatataaatttctgtaagatttattgtccgtttggatgaccgaattaaattagaagacgaattcgacaaatttgttgctggtcgtatttgtacagactttcaacgtatgtcaatgaaaagagcattggagacggcgtacgaagtgaaaaggcattgcataagggacacattggccaaacagcgaatgtttgaggcaaagttttgcccacttattctttttttctttataattcatttgcaattaactaaaattttcggatatttttcagtttattggtcacccgaaggagcgcgtaatagcagaccaattgcaagaattagccgatattatgcccgacctatccaagcagcagttgcacgtattgcgaattgtctttcgttgttccgttgcatttcgtccttttag

SEQ ID NO: 50880 - DNA, 102 bp, Heterodera glycines
  unsure (1)..(102): unsure at all n locations
ttanaggaattctatttgttttttattcaatttcgacctgaatgtcagctgcggtttcttcttcgcgtccgatggaagattggaaatctgagttagctatgc

SEQ ID NO: 50881 - DNA, 1042 bp, Heterodera glycines
atgcccaaatgcacgtagggcgtctttacacattattttaagtatttccagtgtaaaaaattcatcataattacccatcaacccctcagaatccctgcgtatcccccctaacaaaaaaagtaggcaaaaaaaattgtcaatcagatccctttttagggtatttcccgaacccggaccaaaacctgccttataccatctgaaagagcaaagtctgtagaagtgtcatcaactcttcttttttcgattgcaccgattttaaggcaggatatgagccatcaaacacaaactgtcaaaaatttttgaaaaaattttcaaaaattttctgaagaaacttttttttacgctaaaattgcaaaaaacgctttccaccaatcgatagagaatccttaaaaaatagttgtactcttttgttcggagccaatccgaccaacttgaagagagttattcaaaaaatttgccttcaggtgctagattcctcttatatagagaatatgtaaaaacaattttagctgtcttctccagtcaattatcactggtaaaaattaccatcgaaaagaagttgaggaattcatgaacatcattagatatgacgttctgcaactggtaattaatgaactttatataattaatcatttttcaacaaaaaatattcaaaaagcaaattttgtgtatcggaattctgttttttaaattttaaattaaatagaataacaataaattcgaaagttagatcggtaatattttatgaacaaatttttcagttgactttcggttccatttgcgccaacatcacatttgaaggtgaaaaagcaagaatggagtggtatttggggcgtctttccaaaaatgctcaaatgatactcgacaacgtggagccttatgtgtcaggcgaacttgtaagatgattcttttacattaatttaaaagtagtgacaaatttgtagtgacctttatttctacttaaacaatttatcactttttaaaaaattttatatttcctacaaacctagatcagccctattatggcacctttaaccaatta

SEQ ID NO: 50882 - DNA, 293 bp, Heterodera glycines
atgaaacttttcatttttcccttttacatacattcatttatagtatgaagtaaatgtttaccattttttaaattccatagaaacttttttgtgaatttttactgaatttgttgtttaattttaagctaaaatcattccccaaaattgaaaccgcgatggctaagcaagttattgatgatatgtcgtttactcaacccgttactgacaacgcgacaatcttccagatagctacaaatgtgttcgagattcttgatgaatatggcaataaaaagtcagcttgtatatttaaatag

SEQ ID NO: 50883 - DNA, 1246 bp, Heterodera glycines
atgaacactttcactttggccaaaaccgtgaggaaacgattactttgaatgatgtgcatgagcaacagaaacagagcgatgaagtaattgacagtggttatcgtgatgaggaggcaaaacggcagtttggaatcacttcccggatcgaaatcccggtttcgcttcaaaaattcaacaaattaattgataaggtgcgagtttttgcacgaattcatatgctaaccaacaaaccttgtattatgtattactagtatttaatctttcccgacatgggcttttacgaactgtttgcaaacttagtaaactaccgttttactctgttcaaatcctccgtttttacaatattttagctctctgaacaacaggagaagcccccctatgatgacagcattgaccaacttgaacgccaattgcgtctgggaaagcgtttgctgagccaatttaaccgcaaaaagacaccaaaattggctgatgaacacggagaagagcacaaagaaggggaggaagatgagcaacagctaaactcatcggaagaaaacaatgacgacgaattggacaatgaccagccccaaacatcaacagcaaatgccaaaaagaaacgtggaacaaaacgaaggcacatgcccagcagagttgccaaggtcagtccaacagacagaggggaaaagggatcgcactttttgattgatttgaaataaatggatttcccatgtcagaagagactttcatccaaaacgaatgcaaatcgggaaaagaagcaagacgggggagaatggttatcaaaagagagtgcaagtcgccgcgtttcatctgcggaccaaatcgaagaatcacacaaaacgacggaccatttgcgcgactctgaaaacgacagcgaatcaaccggcggcagtgaaaacattccgccgccaccgaaaatgacgagggcccagcaccagaaaaacttggtaattccatgtcattttattgttcaactaatggcgtatttaaattaaggagatcaaaaagcttttccgccaagcaaaccgtgcaatgattgaggacgacgacgaggaagaggatgaagagaatggacaaagtgatcggaagtcaattaagtcggaaagtgacggcgagaaaaaagcaaccggaagacaaattaaaaggtttttaaaatgttttggtctttttgaaaaatgatttaacaggcgagaatctctgaactcatcgagttccgaaattgttctcgacagtgaagaggatggaa

SEQ ID NO: 50884 - DNA, 402 bp, Heterodera glycines
atgccgtcttcgtctgacctttcgcgacagccgatcagcagcacaccgttccgtttccggctgaatttcgacgatccgtctgcatacagtgacaatggtacggattggatgtcctttctaacaacccttctaattttgatttggaattcagagaatcggccctctccagccaaccaaacttccgtctctctgcctgacaacggctgcaacgtttctccgtacgcgcgttacacgggcagcggagactcaccgaccagcagtcggtccggcaacggacggaagcggcgcccgcgcagaggcgacgaattgttcatggacagacggcacttgcgcaagagtcgagaggtggaggaggatgaactggacgaagtggaaaatgactacacaatgggcgacgactga

SEQ ID NO: 50885 - DNA, 624 bp, Heterodera glycines
ataatgcaatttctattattaaattgtttcaaattttccttgtagatttattgaggcaaaatcggaccgggtgactgtcattttcagcacgttgttcaaagacccggacgatgtggtaatcggcaaagtgttccttcaggtttgatgttgctgatttggatattcaaaattggtttttgtaattacatttaggagttccgtgaggggagaagggcaagtcaaactgcgccacaagtgctctattcggtgggcgaacctccgttagaactgaggaataaccccgaggcaagggttggggacaacgtcggatacatcacatttggtcagtcagttctctcattttcattgctgctcaatcatgcgcattcaaaagcacaccgaaagttaagttttgttcccgcgacatacgaacaaaaaagcgcgcgacaacacaatcagtttgatccacacatttcgagattatctccattatcacatcaaatgctctaaggttgcttttttcttaagaattaaaaaagaagtttaaaacaatcaatttccagcagtttttatggtaatagtgcagtttgtccccccatttttcgaaaaaaaataaaaattttaacaaagtcgtgtaaaacactt

SEQ ID NO: 50886 - DNA, 733 bp, Heterodera glycines
atggtatataaaaagagcaaatacggtaagttgtttgtttaagcaaatgtttcggaaattaaaacataaaatacaatgagaaatcaatttacagtaaaatccaatattaaacttaataagtaattttggttcataaaatactgaaaacttccatatacgtaattgagttatgtcctgatcggatctaacttttaaatgtccaagctgtgcgagtttttggcttccagcaggttaagcaaaaacttcaggttgtaagcaattctttcgtcgtgtcgtccacgaaacaacaattgttcgttcacctgtccaaagcgagatggagttggaagttgggactacttttttttgatacggaaaagtccaagcttttcttggccaatttggagaagcgtaaaaggagcgcaatgctacaatttaatttcactgatggagaagcgaagaaaacaaatgataatttaaatccataattgtggagaaattttaatggaaattcaaatgaatgaaatttaaaaatcatttttttaaacttcagttaaaatgtttctcagcctttttatttcttcaattttccgaaggcttggctcaaattttgaagaaatcaagaaaattaaactaataaatgttaacgattgatcataatgatatttttgtaattaatttttaaaaaatcaaattaagctagaatagggtatttaaagactaattttaatcgtttcttaataccgtagttata

SEQ ID NO: 50887 - DNA, 179 bp, Heterodera glycines
atgcaacaaaaccaacagcatcagcagggcaataccatggaggatggaaatgacaatacggtagtggtggtgatgggacagcagggcgggactacggtagactgggacagcagggaggagcagcaacagcacttggacatggagacggcacgcacatcgcgcaccgaggacattatcca

SEQ ID NO: 50888 - DNA, 2332 bp, Heterodera glycines
atggccggaacattggacaacaagctgtactcgtggggaatgcacaaatgggcggctgaggggcagcagcccaaggaaaatgatggcggtgccgatcagagcgcaaaggcggcggaggacggcgccggcggcaccagcgattgctcctatctgtcctccaccgccacctcattgaccaacagcgacgggaatacggtagggagggcatccattcaatcgagcttatgcgaattttaaaattaaaaaaaacacaattagatactgtacttacggaataaaactcgggactctatttttcaacctccctcaaaatgggggcttttctggggggggggggcttctaattcagggggtgggttctatttcagtaaatatgataaaacaaaaaaagtgaatttgcctcaggcaacacccgtcgaacaaccaaaacagcagaaggagaggaagaagaggaagaagagtaagagcacaaaaacgacggtgaggcatttgttccgcgaaccactgcagtacgaaatgtcgcaaacgcgcgaaggccaattagtgcggttgaaaaacagagacgacctaatggacaagccaaaaccgtttatgatgcagccccatttggtgctcaggttggcacttctcttctgtgctgtagttttgttggtttggaccattagacggtcgatcggaaggactgatcagtgattctatcaaattgatagtgatctgctggtccgttaatccgattgtctgaactgaactctctccaagccgttgcttttgtcatcccctgtccaggttggatatctgtcgcaaatcgttcggcagcgtttcgtcccccacggcgacttcgtcggcaccggacccttccggtcagctgagtccgccctcaccgtcggcacattccaccacttctgtcgcgggcaaatcacagcagccgcggctcgcactgtccgcgctggtcggcacgcactcgcgcgttttctgcgtggtcgacgtgtcaacggaacctttcccgccggcaacggcacaaagcggcgaaagcgacaaaaaagtggcggaaaacagtgacagaaggtcgattgctgcaatattctaaattatttataattaatttttaaagcagaaaagtggcgccggtcccaaaagtaattgacatcagacgaagttcggcgcccgaccaaagcgcaatggcacaagggacggccacttggattcgggaagagttggaaagtgccgaagtcatcccataccgaaaaatcgtaaagtcatttgaatttcaattatggcatgccattagcgacaacataaaaactctcgatgcggaaatgcaaatcatttcccggcatttttatagcacagagtctcattcatttccatgtttagtgcaattttcggtggcatttttttctgttttatggcgaaacttccgacaatcactcgcaacttttgaatttaaacttttggaatcgaatgtttatttcctcaatttccaggctaattccgattccatttgtaactcatcggctttgcacagaaagtaaaaaaaaaacaaatggccaaaaagtgccattttttgtcttaagtttgcccaaaaatgcgcaaagactgcgcgaggaaattgccgcgctgagaagtcaattggcggagcacaaaaacactgtccgggggcatcaaagccaaatgagccaactgcaggtggaggaggaggcgagaaacaatttggaaaggatgccaaagccaaaaaagcggcaaaaatgccgagttccgggaaatacgagtccaaattaaaatttggaaaactccttcggtcccaatctcatggatgcataatccggtcaaatcccgactctcggctttgtagacaaaattggccgagttggagtcgctgctgcggcgccagcacaattcacccggcggtctgccgcccgtcaacggtcctccgccgcccgcttactcttccgctgtttccgtcccatcgccgcggtcgaaaagcatcgccagcagcggaggagaacaatgcggacaagaacggcaaaagctgcagtcaaactcgaccacatgtgccattctgtgacttcaaaaaaatcgccgggacggcactttgacggagagacaaaaagcggcggaaaatattgtggacaattctgtggtgccaaacacccactaattagcagtaattagtgaaaaatgaaaacatcagcagacaaaaagagttcgacactttatttggcacaattttcatttcaatgttagaaaatttaatgttttataaaattgttgctttcttgattaattaaaacaattattatttttttgtttttgcattttaatttaaaataaa

SEQ ID NO: 50889 - DNA, 2732 bp, Heterodera glycines
  unsure (1)..(2732): unsure at all n locations
agtgggactcacccatccttccctttaaaatatgatatgatttttctgtccgaatttgcggcatggacattttgcacttgcccccttttttaccggaattttttgtctataattaataacaaatcccccaaattcagcaacacattcgcacttctcggctgtacgctcgtctggtcggccttttgttggatgtgctcctttttgtcgagttgggtgccgacccgtacaatcacatcaccaaatacaggcaaatcagcgagaaattgcgcaatttgctgcgcaaagtgcgcaaacaaaacaatggtaatgcgcgaaatgctcaattttaaattttaaatcccattttcagaagaggaatggtccatttttgtggatttggcgggcgtcccgtgggtcaaagagtccgccgatgcgattgagtcgccgaaaaaaccgctcaaaaatgtgacggaaacgccgagaaatgccaagaaaatcaaattcaaatgatctcacactttcatatccttttttgaactttggtgccataccataaatccattgatcaactgactttttgacatttgccttgaattgtccctcaaatttcagactcattttcggtttaaaatttcgtanaaagcgaattntctcgagaattccaatgtcttanagccaatgcctcttctgacccatggcttacaattttatgaattttttgtagggaaacaatggcatttctgtgccctcctcacattcccattaaatgtcacatttctttttttgtcgggtcacacaaattatgtgtgccattgccattattggaggagcagcaaaataataatatgtgtaatattatgtattatgttgttgttcacatggaaacaaaaacagcggcggagagtcgcggcagtcaaatgaaatgcggcgggcacagctcaaaatgagcgacgaatgccgaaatgggaagggcatcaaaagttggcacatttcgcttgaaccctcggcgcggcacaatgcgtgagaaactcgggctttccttccccgcccccacccccaatttgccatcgttcggcccctcttttgctatttttctttgctcccggacaatccgtcagcaaaattttattgttaaaacgtgaaaaagaatttaaatcgttaaaaaaaaattaatttaatttgttttattttaaaaaagtaatgaagaagcattaaaaaaaattaaaatataatttatatagaattgatagtaccgtatatgctctaattatagcccagtctctattaatcccgcagtctcaattatcccccagtctacgaggtgttttgaaaaataatccctctatcataatcccccagtctctaattatccccccttttctgaggaggttgaaaaataatcccccatgggctataattagagcatatacggtaattaggaatattgtaaattccatccaatttttttttacataataattgcaaaattttgatcattgctcaagcaaataaatttgctgacgaattgtgacggattgtctgtccttcactgaagaattgtccattgacggattgtctggaccccatttttcttgttaaatatcaaagcaagaattcgaattttcaaaattacaaatgcacaaaaattcgttgccgtcggccgccctttccaacacggcgcccctttattcctcctatacgccgtcgcctcacgcgtcgcccgtggccaaaacttttgccgaaggcggcggcagcgaatgtcgcgcattggcaaaacacagttcggcagcatatgagcgaattcgaacggttggcaaaggtcggaagggagaaaaattagaaaaaacaaaaatttaaaaaaaacaaataaaaaaaggcaaaatggccaaagatgaaattggcacttttccaggctcttttggcatcgcggttctctaccggcgcaaagacgacgattcatttgttatcctcaaggaaataaatttgcacgagctgacgccaaccgaacgcaatgtctgtcggtgatcggggagaaaacactctgatcaagttctttaatcgctctcatcagtattccattcattaggcattcattgagccgattaatgtggttaatcactgacggaccttagcaatcaaatggttgcttgtgattacataaagcccgcttgaccattaacatacctaatttggtctctgatcaacttaatttgactagatcgctttttaatcgcttaattagaaatcacattgatcaattggtgatcacctgactgaatcaattgtcagatgagcattgtctgatcagtaacagccaccagttttgatagatcaaatctgtctgatctggtcagtagggtcagagccatcttatcactcgattcgattagatcaccattctgatcaaaaaaatttgtctgcttttcaaattggtcaatcagccgatacattgtctgatctgcaacagtcctttgctcatttgccttgtcagatgtcgctgaatgaggtggcgctgctgtcccggctcgaccacccgcacatcatccactacttcgactcgttcgaggaggacggcactctgatgattgagatggaatacgctgacggcggcactctcgcgcaactgttggcccaccgcgacgacgcgcagccgttgcccgagggcgaagtggtggacattttcgagcagatgaccagcgcagtttcatacttgcacgacaacaacattttgcacaggcaaagccaatcgatca

SEQ ID NO: 50890 - DNA, 944 bp, Heterodera glycines
atggcacagcagcaaatagacgagagggtggtcgtccaagtcggcaacactgttcaacagcacgttgcgcttgtgggccgacgcggaggaaacggaagcggaggtcaaccgcaacagcgcggaggaggaggaggcggaaggcggtgccaacgcggagcaggaagacacattcgcggcggcggaggaacaactgctgatgttgccgatgccgtggtttgccgccgcccctcgctcttcgtcaccgtcgctgcccaacaacggcgcctcggtgcggtggcgtcggcgcgcggcggtggcggcgtaatcgtactccaacagagtcaacaggaacagtttgtactggtcggaacggacgtcatttctgcgaaaaagcaaaaatgggagtcgtgtagattcaaaaaattaaaagaaaattgtaaaatcgagcggagagatttgcccggaacaacttttttttttttactaaaaaaggacaacccaatttattttattgggattaaactcggaaaaggctgaaatggcgaaaaactttcaattttaaataaaacccaaagtaattggatttttggggtcgatttgcatgaatccataataaatttgaatgccatatgtgcaactcattacctgaaaatgttgcagcatttgtcaataaatttgcgcacattgtcccgcacttggccatcatcattttggtccgcctggtcaccggtgacgacgcaaatccaaagccagcggaggtcggcactgatcggcggtcgaagctcaaggcaatccatcagaaaatcgtacacatccaacacgtgctgttcaatgtcctttggctgattctataaaaaacagaatttaaaaaattcgctcgtttttcttttaaatttttaaaattcggggagggaatgaaagcaattcccccccccccagaattcaattttcacttcccctcaaaa

SEQ ID NO: 50891 - DNA, 496 bp, Heterodera glycines
gaatcagccaaaggacattgaacagcacgtgttggatgtgtacgattttctgatggattgccttgagcttcgaccgccgatcagtgccgacctccgctggctttggatttgcgtcgtcaccggtgaccaggcggaccaaaatgatgatggccaagtgcgggacaatgtgcgcaaatttattgacaaatgctgcaacattttcaggtaatgagttgcacatatggcattcaaatttattatggattcatgcaaatcgaccccaaaaatccaattactttgggttttatttaaaattgaaagtttttcgccatttcagccttttccgagtttaatcccaataaaataaattgggttgtccttttttagtaaaaaaaaaaaagttgttccgggcaaatctctccgctcgattttacaattttcttttaattttttgaatctacacgactcccatttttgctttttcgcagaaatgacgtccgttccgaccagtacaaac

SEQ ID NO: 50892 - DNA, 449 bp, Heterodera glycines
atgggaggacggcgagcagaaaaaggaagaaaagaaggaggaggaagaggaggagaaaaaggagaaggaataggaggaggaagagaaagaaggaggaggaagagtaggagcaataggaatgggaggaggaataggaggagaaagagaggaataggagaagagaaagaggaggaacaggaggatgaggaggaagaggaataggagaagagaaagaggaggttggatgcttaatgaagcaaaaagaaatgccattaccatttcaacagaaaacaaaaaacacattaattattttatctcagccatatttttttattataaatttggtgccaacttttgcatagttttatatatagcaatgaaaatatttcagaatgagcttgcaaatttggcatgccaatcaccgatttggaaagaataatgccctgacattggcaatgctaaaaaataaa

SEQ ID NO: 50893 - DNA, 447 bp, Heterodera glycines
atgaaagttggatcgactattaccaagggagcgcatgaggtcaatcaattagttgtgtccccggcacggcaaaaggcggggcagggcgcaaagttcgtgtacgaaaaagcaacaaaagtattgaagccgaaagcgaccgctgaaagtgccgaagcgaaaggtgaaagtgccaacagcagcagaagcgaaaatggtgacgagaagcaaagttgcccggacaaagcaaacgcagcagaacggcaaggcgaacaaagtgttgatgagcagccaaaggagagacactcatcagctggtgatgatgagagtgccagcgaggaaaagccattgaacggagagagcagtggtgccaatgttgcaggcacagctaacgcaagaagaaaatgtccagtcccagcgatagcaaagaaatttgtctcaatgactgtgcaagtttcaaaaaaaaattaa

SEQ ID NO: 50894 - DNA, 697 bp, Heterodera glycines
atgcgtttttactacagtaccctactgtcccttgcttttgtcctatctctgtgcttacggtgtcccactgtttggtcagtgcacagtaagaacaagaatgactccatgtctaatcaccaaagtgaccacgattcgatggcacaacactcggaaacggaaggcggcggcaaattaaaaatgccagaatttattaagaaacttatgcgtagcaaacaaacgaaaaaagacaaaaaagcggcgcaaaatgacgcccgaggggaacaaagtgaaagtgaaagtgtacagaatgggcaaaatgacaactcagcagaaatagcgaatatgctaaacgaaatgcctaggtggacgacgagtgccgggacgagtcgaaacatagccgaaaacaattcgccactccatggatcatcccccaattattacaacacggtcagaggcagcaggcaccaacggacaaaaagcagcaaccctaatcaacaaccaggggccgtagtcaaagaaggtggttatttgaccagggcattaaccatggtcatttgacctggtcaaataacgaccaaccatgtgaaaaacggcagtaaaagaagatggtaaattttctgctggagcaaccaccgttttttaaccgccaaccgtcttcttttactttaccaccaactttctaccatgaactgattaaaatttgcacttgtcatattaa

SEQ ID NO: 50895 - DNA, 229 bp, Heterodera glycines
atgggagagacagcaaaagacgaggaagggatgaggaagagcgaagagaccgagaggaaaagcaagccaatggaagaaaacaaacaaggaacggctgaagcaacaacaacgtgggcaagtacagaaagacctggttcaactgctgctgaaggaacgcagagaatgaacgggacaaaaaaaggcattccggaggcggaggaggaggaccaacaccaacagcagcaaatcg

SEQ ID NO: 50896 - DNA, 289 bp, Heterodera glycines
atgcaaaaggaggagatgcatgtgatacgaaatggacgaaatgggaccaaacatgacgaagtgcactccgttgacgaggcacatgaccatgtcagtggtgcaggtggcggtgcgcatcatgatgaagtaaattaattattattatggtgatggaatttatggaatttgaaaaatggacgaataaaatccaaaaagaaaaaaaagaaaaataattgataatgtaaaatgaccatctattttatgattttattttcagatgtcaattaatatttagaatgaaacaaataaa

SEQ ID NO: 50897 - DNA, 89 bp, Heterodera glycines
tgttgtacctcttctaatcacttttgtacctcttctaatcacttttgtacctcttttatcacttttgtacctcttctcatcactgttgt

SEQ ID NO: 50898 - DNA, 1112 bp, Heterodera glycines
atgtcagttggcgagatgactagttggcgaaatgtcataattatggttagttggcgaaacgtccgaatttggcttagttggcgaaatgtcgtcgtgcccttattttaggctaaatattaattttttttttaaacgacaaagtctccgcgtggtcatgaaaatgaatcatcgaactttgaggaaaatgtgagccgaattttccaattctatggcaaatgataagggctttttgcatttcagctggatctgtacggatgtttggatggacattttccctcattttgaccgtcctcaaattggcactgatttcgccacgtttcaatgcgttggtggacaaacatttcgatggcaaaagcgaattgacaatttggaacaaatctccaaaaggtgctatggcgttagtcaaaaaaccgccaaatgagaccctttatttttttctcatgtcttttactgattattttgtataaaattatctagcaataaattttaatatttgcctttaccaatttcaaatatatttttataataatatttttatatatatttttttttgtctacgtttaacaaacaaactacggtcatttttactgatttttgtgttttaaatttgaaagtattaatgcaaatttccctacagaatatgtaacaaattatttttaacaaggtcttgcttaaggactaacaagcattacgaatcaaattattttcaacacatcgaaatacgaaaatcgtcttttttcgtcgcgtattaaagcaatatttctatttgtccacttcgactatgtctttttctgttgccatggtgatctattaaaaacttttagttcgacatttaatttgtattaaccataaaaacaaatctcctcaaggtttggtgttttatcaagccaagatttcagacaaagatgtttaaaaatggaaatgaaattgtttagttaaaattaatctttattttataattaattaaatttttagatgtcttgcttaaggactaacaagctttataaaattcatagaaaagttgatattccttataaatatctcataatttctgaattgctgtagggcttgggttaataattgcttcaaaatctccaaatccgtcgtagtaa

SEQ ID NO: 50899 - DNA, 1922 bp, Heterodera glycines
ttatcatcagatacctgaaaagttttgttttaagaaaggactttggacagacgagaaagacatattttaacacaattggtcgaatggtgaaggatcaccggctgagccggagcgataccacctgaggctgttgctgttgaatgtgaagggagcatgctcctatgatgatttgaaaacagttattgatattaatggtattgcaaaagtttgtgaaactttttcagccgcatgtttagaaaaaggttttattagaaatgatgaagagtggaaaagagcattagaagaagcagagagttttgaaatgcaatggaaattgagagagttctttgcattgattttagtacattgcaatccggccaaaccggaagagctttggaatatgtttaaagactcattgtctgaagatttttgcaggagttttagaaaagttggcttatgctaaagcatataaagagattgcacttagcattatgaaggctggaaagacgcttgccgattttccaaccatggaacagataaatgttgatgatgatgttgaacaactgtttgacctagccgaaaaattggatttgggacaaagaattattctttgatgtatgataaacagaggaatgtttgtgatgccattttgcatagaatatggaatcctgtaaatgaaccccccttctactttcttagtggaccgggtggaacaggaaagacacatgtgaacaagacaattgtacatatgctgagaggtcaaaagaagaaagtttgtacaatggcttttactggcatcgcagcaactttgctgcctgctgggagaacattgcacaatagatttggactgactttggatatgagtaattcgagtattagtccgagatcaaaggcttggcatgaggtgaaagacacagatttgtttatttgtgatgaggcgcctatgataaataagcgcgcaatgagaactttggatgagaattgagagaaattatgaataatggaattgcatttggtggcaaagttatgctttggacgggagactttcgtcaaacccttccaattcagaaacatgccacgagagctgagatggttaattcgactataaagagagtgagtattggagattagctaaaagatacaaattggcaaagaatatgagagctcttgaaacagagcaagaatttgcgagagatttgttagaaattggcagtggaaaattgaacaatgaaaatgatgagataattttgcccgagaattgtattagcaatggtgatttagcagaagagatttttgcaaattgtattgcttctgagaattggaatgaaatggccaaaagtgccattttagcaccgaagaatattgatgttagtgaaatgaataatagagttttagaaatgttgccaggagaagaagttgtgtatacgagtatagacttagctcaagatgagaatagacagagagcagatgaatatttggatgagtatttgaatgctttgaacccttcggggtttccacggcataagctgaaactgaagaaaaatgctattgttttgttaatgcgaaatttgactatagaaatgggactttgtaacggttcgagaatgaaagttgagcaaatgcaaccgaatttgattgtgtgtaaacttttgactggagataaggcaggtcagactgtgtacattcctcggatcacgctttgctgttctgaggattatccttttgacctgcataggcaccaattcccgttggtgttagcttttgcaatgacaattaacaaggcccaaggtcgaacccttgagcaagttggaattgatctgaggaaagatgtttttagccatggtcaattgtatgtggctctttcgagagcaagagcttggaataagctgagaattagattagatgatagtaatttagagagaaaggtgatgaatgttgtttac

SEQ ID NO: 50900 - DNA, 1125 bp, Heterodera glycines
attgatctagttcccggttctttaccatttcattttcgaccctacagatacccacccgaaacgcagaaagaaattgaaagacaaattaaaataatgttggaccagaatatcataagagagagcgaatccgagttcgcatcccctatcgtaatggtccccaaggcagataaaaaatcttggcgttttgccattgattaccggtcgctaaataaaatgacaaaaaagcgagttttccatttaccgaacattcaagaattgttagacttaatgggctctaaaaaatattacacatcaatggacatgcaaagtggtttcatgcaaattccaatgtccacagaagacatagacaaaacggcatttatttcacaccttggcatttatgaattcataacaatgccatttggtcttactgctgcccccgatacatttcaaagagtgatgaattcacttcggaggcgtctaacagcagcaatgttaatttatctggacgatattataatcggaagcgaaaccgaagagatgcatttaattgacattgaaaactttttaaaattattaaaagaagtgggacttaaattgaaaatggacaaatgccattggggaatggcagaaattcgatatttgggatttttgctaagtgaaagaggcattcggatggacccaagacaagttcaaacggttcaaaattttaagccaccaaaaagtctaacggaacttaagtcattactcggtgcgctcacatattttagacgttttataaaaaattttgcacatattgcccgcccgctacaaactttaacacaggataaattcgagggcaaaattgaagagaattggggaaaggaacaggatgaatcattaaatttattaaaaaatttgctaacatcggcaccagtattacagtcgccgagatttggtaaaccctttacaattgagtgcgacgcgtcaaaaaaagccattggcgcggttttattccaagaaaaaggtcctgttgcatatgcctcgagagcattaaacagacacgagacaaattatccatccattgaaagagaggcactagcattggtatatgctgttaaagagttttccccctatattattggctcaggggtaaccaaaattatt

SEQ ID NO: 50901 - DNA, 770 bp, Heterodera glycines
atgggtaaaattttggaaaatgaaaaagaggaaaattcggtaaaaattttgagtacaaaaaatgagggtgaggaaaaccaattggaaataaaaggagcaaatatttctatagaagaagtggtgaaagagcaacgaaaagtgaaagaactcgcacaaatttattacattttgaactcaggaaaaattcccccggaattgaaatggaaaagagtcccaacggattattgtctgataaatggcgcaatatattacaaaaaaggaaaagaaaattcggaacaaccaaaattaatcattccataccagttaagggaaaaattttttcacaatattcatgatgagggacattttggttttgaaaagacatggccagaaataaaaaatcgattttattgggaagaaatgaaaaaggatgtccgattattaaccgagacttgtgaattatgtcaaaaaagaaaaatatacccaggacaagcaaaatcggcaccaagtgttccaattgtgccagccgaagcaccatttcaaagagtacattgtgacctaatgggtccacttaaaaagacgagacttggaaatctatacataattttaacaattgacagtttctctaaatgggtaacggccaaggctataccaaaccaaaaagccgatacagtatctgaggcatttatagaaacggttatccatcagcactcggtaccagaaattgtcattacggaccaaggaagacaattcacatcacaaatttttgcagaactttcaaaaatatatgg

SEQ ID NO: 50902 - DNA, 1062 bp, Heterodera glycines
atgattgccgaagtggaacggctgttgactcgaaaaaggtcctcaccggtgcatgaaagttttgggaacattgacgacgacgatgaggaggagggcgagattcttgacgtctcgtttgttgaggaggaagaagacaatacgggcgaagcgcccttaaacccactttcatatttggccaagcaatcagcggctcaacaagaaacgttgcggcatgaaaaatgggcacaagaagagagaaagcgaagggaagaggagcagagaaagcagcgagaaaatgaacgtagacggcgagaagaagaggagaggcgtcgtaagacagaagaagaagatagaaggaagactgcagagaaagcagccaaggaaaagaaggcaaaggaagagaaagaggcaagtgaaaagaaggcaagggaggaaaaattggcacgggaaaagaaggaagagcaaagaatagcaaaggaaaagaaaggcgagaaagagaccaaggataaaaaggctgaggaggagagagtagcaaaggaaagaaaggcagaggatgagagagtggcaaaagaaagaaaggcagaggaagagagagtggcaaaagcggaagcggagagagcggcaaaggcggaagcggagagagcggaaaacgagaccaagaaaaagcaagaggaggaaaagcagttggaagagcttaaacgacagcaacaggccataagaaagcaaaaagagttggagctgctcaaagagttcagaccgtggcgaggcgggtacatgaggctggtgcacggcaaagacccaacccccgacgtacactatctgcacgaaacggatgattaccactttgtgaatgctgtacacaagtaccgtgtccggcactcagagctaccctgggaggcgcccgagtttaacccatccgcgcacatccaacagaatattggggagttccgtgagctgtttgagcaagaggtgtacgatgaaaactatgcggtgaaaacgcgagaggaaaaggaggagctgatcgagctggtcaaagggttccgcttttacttcaccgagcaaattggcagatttgagctcaaa

SEQ ID NO: 50903 - DNA, 712 bp, Heterodera glycines
atggatgatgatgacgtcatcacaattggagacaacaacaacactcaaacactgcttgacctgcaaccggggccctcaaaaaggggacgcaagcctcgcttggacaaaatccatgaggaaattgcttccgcaatgaagaaagcaaaagccatggaagctgaaggtttggcttttttatgcaaatttctttaaattagccaaattttagtagatgaatcgcccaaaaaacaaccgaccaatgtgtttgagtacccgaccatattttggaaattggcccgcccaaaggttttggctaatatttaatttgaaaaaataggaaaatttcttaagtacggagtgttcacgttcatgtgcaaagagtgtcgtgatgacaatttccggcaggggaacagccgattcaaactcatcaatcagaatggcgagcagcaacgccttgagttcacccaatcgttttgccaagactgtgcaaagctgaactttgattgcaccgatctgatcatgaagcacctaaagaaggatgaaccggcaacgacgacgacgacgacgatggcaaagagtttccgctggatcaaagatgggggaaagtgaaccgagatggcacaccacgatataaggacgatctcattttgaagaatttatacttgttgatcaaatgacaaactctttctttgtaattttgccgagcaatacgccaggctttgttggaaataaa

SEQ ID NO: 50904 - DNA, 2896 bp, Heterodera glycines
atggactacccaagaataaatgaaagtgaactcgcttttcccatctcttcggggattattgtcagcggtccgtcctcatcgggcaagacccagctggtccttcgcctgttacggcatgccaacgtgatgtttgacccgccgcccaaggcaataggtatgtgcaaagggggtttctgtgcagtgggctgttgctatttagtatgggcatacggtgagtactcgacgcagattcccgatctggagcggcagggagttgtcccccacccaggtgccccgtctgacgagatgctgaaaaagctgccaaagccttgtctgattgtttacgatgacttgatgggtgacattgaggccaagaaattggccgatctgtacaccaaaaagtcacaccataacaatttttccgtgattttcctcacgcaaaacctgttcgataaatcaatgcgggtgccaaggtccaacgcccagtacatcttcctgatgcgggctcccaacgacatgcttagcattcgtaatttggccagccagatgttccctcgcgagcagggattcctgatggatgcctaccgacaggcatgtgccctaccgtacggctacctgttggtgactctccacgcgaacagagacaacattatacgcctaaggacaaacattttcccagatgacgaagagagaatcatttttgcccccaaaaatggttaagcgggaacagaagatcggtgagcgggttgtgcacaactacgactatttgaagaagttgggaaagacaacgtcggagaagaagcgccgtcatttgttgaacagtgccggttgtgaggaactgttaacgcttgtcgagatttgtctcaacgttttgaacgggagtttctgtctgagcaggaaacaaaagcagagacttgcgccatttgcaaaagacatcagacagttggcacgtgtgcgaagcgagaggggtgcgcgaaaactagtgcagcagtcaggcggatcactttttgcccctttgttggcccccattctgattgaggctgcccgatacctgctttcgcgcagcaataatggccaataaacttattctgctgccgtacgagcactacaaggggctggttgcagcgagggagacaaagaatgacgacgacgacgacattgctgagcggacaaacttgggctttgtcaaacgacaggtgaccgctgcagtacagaagcggaagggaaacgtcagcgagcggaacgcaatgtacaaccagcagctgcgccggtacctgaagatgcgcaaggaacataaggagcggcccgtccgagtacagctcagcaacggcgctcaactgctaaataaaacagtggagacgggtgtgcaggtacggcctggtccggacgaaccgaaggacaagtccgtgatggttaccgacgaagatgaagaggaagaaattgaagtgccaaagtttttaaccccaacaagccagacgcagggaagcagccgaacacccaggaccaataagaaagcggctaaacagcaaaaattgatcgagaagaaggaccacctgttggccatcattatgtctgatccgcagagattcggcgcaactgaccgtgggaaaatcattaacccaaagacgggccgagagtttatcgactcggacctggcctggtcaattgaacgcctggtggaccctcgcccggagaatgccccttcgccacgcggaaccaaagagttgaagaggaaactcgcacagaatccgctcgccagtagcctactcaatcgactgtttgttgggtctgggttcgtcggacaagtcaaacaaacgagaggatttgttccctcaaaatggacaagaaaataaacaaaatatacaccgacccggccaatccgggcgggtatgcgggtgcgagtgccctgtacgcggcggtgaagaagaagcacccaaagttgaagcgtaccgagtttgaagactttttgcagaggaacaccacctacacgctgttcaagccaaagagggagaagttccgacgcctacgcactgtgcctacgggtttcatgaccggtaaattgtaccggggcttattgcgcacaattcagggttcagacgttcaggcggacttggccgatttccaagccctttcgcgcaagaacagcggctaccggtacctgctgttggcggtggatgttctatcgaggcgaatgttcggcgcccccgtaaagagtaagcgcccagtggacatgaaaagggcgtttgaggagctatttgagcaaatgccaagggtgccggacacactgtacaccgatcgcgggttagaatttgtggcaaaaccgttgaaggagttttacgcggagaagggcattcaaaagtttgagaccagttcaaagaagaaggccgccgttgcggagcgtgccatacgcaccctaaagactcggctgtacaaatatttttcctccaacaacacatcggtgtgggtggatgtgctgccaaagtttttgagtgccatcaacaactcggtgtgccgcgcgaccggccttagacccaacgaaatcagcgacgccaatgcgagggaggtgtggaagagggtgtacggcgaaggactcgcacaattggacaagtcatcaaagatcagagctggggaaacggtcagaattcccgagcctaagcacattttcgaaaagggtactgtaatacacacactttctgacctatttattttaatttttaaggttatatccccaattactctgatcacgtttacactgtggatgaggcccgctcaaccaacccccagcactatttgctcaaagactattatggcacaaagttgaagagaaaattttatttaccagaattaacaaaagtacaagtggatgaaaacacaatgtatcgaattgaaaagaaatacaaggaacgagtgagagatg

SEQ ID NO: 50905 - DNA, 1632 bp, Heterodera glycines
atgcagcatacaaagcgctatttgctagtccccgaagagatttatcagagtttggcagcaccgccaccatctgacggaacaccaattgggctggtccgtacccgaattaaacaaataaaaaatgatgacgccataaatgaggcggaaagggcagtcaaatatgagcaggaagttaagcgtctcaacaagctcacaaaggacgaagatgaacgtcccgtgggtgttaaattagaaaatttgagtgatgtggttgacgccatgccaaaaccagtcaacgttacaaggccaattgttgtttctacgcgtcgccatctcaaggttgggcgtgcgcgaaaagaaaatgttgaacaattagaagatactgatgatgatgatgattatcaaaacccacggtcgtcaagtgcaaataaacgacaacccacacaaacggaaatcttaaaattaatttataaaaacgcccaatctctaggggtgtcggaggaagggcaagttttgagagccggtgggcgtccatttataaccagcagtgttgatgacattgttagtcacctgttgaacaaggacaagcgtggccaaaataaagagccaacggcattcaaagaatttgttgaaagggcaaggcagaatccgctcttgagtaggcatttatttcccgaaggccaatccggcaaaggaatttataaaaacaccccacttaagtttaagccatcattatggatttgaaaaagcttcgtttgctcgagtttttgtacaaggacctaagttcgcctgtcgcattcacgagcgttgaaccgctgctgagagaggcgcggaaaagtcaaccaaaaatcaatcgaaacgatgtccaaaattatttgaccagccaacgtacatacacactgcatcgccaggcgaagcggcgctaccgccgattgccaacattggcgcccggcttgcatactgaatggcaggccgatttagctatttttgaccgacttggtaaacaaaatcgtggcttcaagtacttattagtctgtattgatacccttagtcgacaggtgtttgttgagcccgtaaagaccaagacgagcgctaacatgatcattgcctttgatcgtatattcaaaagatcaaaatatatcccgtggaaggtgttaacagatcagggaaaggaattcactgcccgggcagtacagcagttcttccgcacaaaagacgttgaacacttttgtatgctcatttctccccaatttcatgccggaatggcagaacgtgcgaatcgtagcatcaaagagcgcctttaccgctacttcacggagcgcaacacgtacaaatggattgatgttgtgcaagacattgtttgcgcaattaaccactcgacaaattcgagcattggaatgcgcccagtagacgtgaactttaaaaacgcagaagcattgcgacaaaaattacatgatgcagctgaaaatgttgtacgacgcaagccaaaataccgtgtgggagatcgcgtgcgcattgaaaagtacaagcacgtgttccaaaagggttacctcccacgcttcaccaatgaacctttcacggtggcagaggtacactctgagcgttcgccagttgtttatcggttacgtgatgacaataatgaaattattagtg

SEQ ID NO: 50906 - DNA, 1593 bp, Heterodera glycines
  unsure (1)..(1593): unsure at all n locations
atgtcgcccatgaatttgttcagtcacatcgcaatttttatagccaaaaatgtaaaaatgcctacgaacattaattttaggctataattcgagctccgcagatgacatgttcaataatgctaatggcgctctttcaacagcccatcaacgaagaaacaatttcaatgtgttcattcatccaagctataggcccgacccaaaacggattggacatgcgcaatacgaccaggccataattaaggtggcaaaaaacaatgattgggttcgggttaatactttttaaattcggttgaatattgcaaagcaattaagatacaatcataggtaaaaaattttaaatttaaatataataccaataacaactaaaaaatgtaatgtcaaaaaacttggattggggccggaaatacagactacttcattctatacaataaacaactatagtccataaaatttaataatttatgattactttttagcttaattgcgtcctcagtgggccaatttatcccgtatgcatccattgtggagacgcaaatgatttccgtgccggaaaagcatttgtttcgggatggggacaagaagaaggttaaaacccaaaaaatcagaaatgaaatgtttattaattattaattgtaaaaatgtttatctttttaatttttttaaaagtcgaagaaaccttaatgctctaatgaattaattattgtcattaagatgattgcanagagaaaggacatggcgcaacaatgcttatgggccgattcgttcagctagcagagtgccattctgcctntagacattcgaacaatatttgtgtcaagggcgctgcagcgcaaaagataaaaatttaaaaaaataaatttacttaaaagtataatagcaaaaattcaaataaaaaaatcattttttagtaaaaaccgaaaaatccaaatttagggtgatagcggcggagctctgttggccagcaatggcacacactttgttcaagttggagtgctttcggctggcttatgcgattggtgggcaaaaaggggtaaatgctgatgaattttcaaatctgataagactttaaaaatcaaaaattcggtccaaaaataagtgaattattaatgaaagaatggattccactaatttatttattaagtaaattttcattagccatttttattttaaaaagttgtctgattgagttcaattaatctcacaaaatattctattctattttttaagcatattaattaatattgtaatttcagtccctcaaataaaattatgttgtaaatttttattaaatttaaattttataattagcaaagtttatgtgtttgtaaattcatttttaggtcattcaagcatttattcacttttggatggcgcgtggattgaagaaattactggattaaaatgttctgttggttagcaaacaaacatcagagttaaactttgtgaacttaattcatttaattaaaaattattgtttcaatgaatgaatttgtgattgtaaatattttcattaaaatttattgatgtgtaaggcaattatgacagacgcagtcggaatttatttaaaaatttaatgtacataatttgaataaa

SEQ ID NO: 50907 - DNA, 420 bp, Heterodera glycines
atggcacaatccacgtccccagcaagcgtccctccacccaccgagtatcgacgcgaaaattcaaatttgaatttagcgccaaaaattgtaacaaaagtacacgggtcactactagagtgctcacgcactcctaaattaaaaaaaattaaaaaaaggtagagtgctcatgcactccattaaaaataaagcttaataaaatctagagtttaattaaaaatataattttaaaaataacatttattcattttcagacacgtaccagaacgaacaaacaaaaaatggcatcgaggatgtacaaagaagagatgtattatggaaattttttctttaaaagataaattttttttgaatttcaaatttaaatttgattgttcacatttttttttttatattacaaacactttaatttttcaaaataaa

SEQ ID NO: 50908 - DNA, 1623 bp, Heterodera glycines
atggacttcgctggtggaaaaagagcgacaaagggcacagcggatcgcaacacaaagttctgcggtgattggtcagctgatggaggcaaaggtaacgaagagaaagaaaataaaaaagagggggaggaggagaaaaaaataattaaaagcggtcattgtcgatgtgtttgagtaagggtccagttacgtatggggttacgaaatgtggtcactttttttgctgtccccaatgctcagtcccgataattgccagtgatgaacccaaatgtttgatttgttcgagaatgtcacccaattggaatatttaggatcttaataaacaaatgaaaaatttcagatttaaaaattttgaaatatgatcccaaaaaaccattgatctcagatatacccaaatgcttatgtatgcttcaaaacttttcgctttgtaatgcgaaataatctttaataaattaacaccaaattcatttttatagtacccaaatctttgaatcaatatatttttattcaaattcaatgtatttgatttcgctaaccttttattttaattttcaccttctgtttgctattcaaatgtataacaattaatcaaatattgtttaataacttcattaatttaacactaatattgctctacacggtttaattatttcaattaaaaggatgttagaaaagtatatggatatgggggggggggcgtacaaaggatatgcgagaaaaagtggtagcaaaattatgtaaaaaatttattttgaaaaattaaagtgtttgtaatataaaaaaaaaaatgtgaacaatcaaatttaaatttgaaattcaaaaaaaatttatcttttaaagaaaaaatttccataatacatctcttctttgtacatcctcgatgccattttttgtttgttcgttctggtacgtgtctgaaaatgaataaatgttatttttaaaattatatttttaattaaactctagattttattaagctttatttttaatggagtgcatgagcactctacctttttttaattttttttaatttaggagtgcgtgagcactctagtagtgacccgtgtacttttgttacaatttttggcgctaaattcaaatttgaattttcgcgtcgatactcggtgggtggagggacgcttgctggggacgtggattgtgccatagggagaggagggattgtaaatcaattaaattgagtaaagacagaaacgggtttattcctcggcatataaaaatattaacatttaattaattaaatttttatttagcattagaatgattatgttttttcactttgtcctcttcattgtctactcggcaaaaacgcattgtgtcaaacaggtttatacattttgtattaaaatatgcaaaaagggggtgtgataaagaaaattaaatatggatttgttttactgaccctgtctaaatcgggtttcccttttcaagatggacctgaacacactgcgcatggacatgatggaattggccagcagtgccggggacgagggcaccgtcggcaaagccaacgcactattggaacgtgcgggcgacaaattggacctgtccatggagcacatcgtaatattaaagcgccgggtaccgctcaacaaccacgtgcaaagg

SEQ ID NO: 50909 - DNA, 1003 bp, Heterodera glycines
atgccaatggcttccgcctgtggaatgcctccgccgtacgcaatgcaaacgcagcagcagcaatcggctgccacgatctcagcgaaagcgaaccaccatgcaaccgaagcggaagaacctccaaaaaagcggaaacgaatttcgaaaaagcagcaacaaaaggtaggcggttttaggtatttaaatggttgttaattattttgcaaattgtaaggaggagaaggaacgagaacagcagcagaaacagttgcgagtgcagcaggaagcagcgctggtgcaaattcagcaacgacaacagcagcagatgttcttccagcaaaggcaaatggccatgcaacagcagggaatggtgccgctcacttcgccggcactcatcggagcaccgcaacagaattaccaacagcacgtggcacaggtgaacatcctccaatcattgtattttgtgagtttgtccgattgtagtaccatcagcagcagcattatgccaaccacaatcaatcgcaacaaagtaaccaatccaacatgttcaattcgcctccgcatggcaattcactcggtggacattacgctaatcaacaaagcacgcctccacaaccgtcaccgcaacaatatccgcatttgggtgccgtgcagtctgccatgcattacatgtccccgccgggcatgtggggcacatcgccgcaacagcaaaatgtaaaaatgatcgacaccaaaagaccttgtgtttcacttttttacccgaacgatttttgctcacagccaaaagaagacctattaaaattaaaaaaaataacatatgaaaagaagggtttgtaggtgtcgaaaatataaaataggattgttttcttgatagatttagcccaagcctggcgatgttttgaatttgtaaagcattgattaagagcttgagaaattatttactttttagatgacacaatatcacacagcaccagtcccagatggcggttgctgcacaaaaccctgcccatcccctgcccactga

SEQ ID NO: 50910 - DNA, 914 bp, Heterodera glycines
  unsure (1)..(914): unsure at all n locations
atggtacggtttgttcgaaaccgggtacggtgggtgatcggaataactaaatcgttgtcatatttgtaattcttcagaagtttcttaaatcgccaagaaacatatttntaagactcgtgaaatattattagaattccaaaatttctgtactgtcgctgatcacgaatcaagatccgtttcggcccatttcgaaccctaacccgaattcgaacaattttccggtacaaaaatcgaaaattcaaaatttacttttatgttcgtgcctgtacacaatgaccatttttgatgtttcaatggtttttgactaaatttagcttatttagatcaatttaggaccaaaagtaagaatttcaaaaattttgaattttcgatttttgttcgaattcgggtccgggattcgaaattggtcaaaatgaatgtcagattcgtgatcagcggccctaaaaaccccataaaacgtgttttcacgactttttagaacagaaaaaacttttttcaaaaaggggggggggcatcggcagtattacgaattttccttttcattcgctatgaatttggtgcattcgaattgatttgggcaataaatatgaatttcgtttaaaatgaaattttgactttttgttcgaactaggattaggggttcgaaatgagtcgaaacggatgctgctgaaaacctatagttgacttcttttattctgaaatttaaaaaaatttgtgtatggggcctaaactcttagaatggcgaggatattgaaaaaagaacgagtcaaaaacaaatcgatattccaactatgattagagaaaaataaatttcagttataagagaacaagcaattcgttccacttcttacaagggaatattccaagctatgattcggaaaatgcttataaataggttttttttgaaaaataaa

SEQ ID NO: 50911 - DNA, 626 bp, Heterodera glycines
atggcatcgtcttcaaatttgagtccgtccgaagaattgcgtcttcttcgggacagaagcaaagaattggagcaaatgaaaaaggacgggcaaagtgagggaaattgtgccaattcagtcgctgaacagcaaaaggaaatgaaggtggacggaacacaaaacattaattaatgaaaaatgacatatttttattatttcaggaattgcgtaaaaaatttgccaaaatggaaatgcgggaagcaaaacatttgagcaagattgatgaacttgagaaggtgggcttttgcttttgaaacttagcgaatttttagtagcatcaatgttccgggcttgctataatgagataatagcaaaattgaatttgtttattaaagaagagttattaaagtaattcaatattttattttaagatttttgagtgacgtcagagcatcaaaaaacagccaaatttcattattaaaatttttcagataacccatgaagccgagtcggagcagcagaagctgatcgccgatcgaaacgttttgcaggcgaagatggccaaaatggagaagaagcgaaaagaagaaaaggaaaaatacagtaagcgaattgcgagtgaatggttactgtggtttttccattaa

SEQ ID NO: 50912 - DNA, 376 bp, Heterodera glycines
atgatgggtcggtgttcagctgtgtggacggctgaaaatgttcctaatttcatggaaatgtacggtaactaagactgtcgggaactcagcgcccaaaaggattaatgcgcaacaaatcatacggtaggagacatgtctggtcatgatgatgtacggtaatgcttggtacccatgtggtagtgttgtgcacgatgactaatttctgacaaaatgggtttttaattccgaatctgtcccatagatggtcagaaattaaaaaatctaaattttttaaggataagtttttgggaaaatgcttatatgcgcgttaaataggagctttctctgctcattcccagccgattggtggcggctgttactctaaaaaacgaccaaa

SEQ ID NO: 50913 - DNA, 443 bp, Heterodera glycines
atgcgtcgggtgttcgccatcaatggcctcgtgaaaagagaaatgacgtaagaaaatgaaaacacgacccaaattgaaaagaatgtttgagtagggaccaattcttagttgtaatgtagtaatagctgtgtattttaaagaaaatgttccgaatgaattcgaaaaattaaatcaaattaaaatttgttgatgagataaatatttaggttcaaggtcggactttcactccaacacggcttttgagcttttagagcaatttaaatttaagatttcaacaacccacaatgcgtaaattttaaatcttaatttattcatttctctagaattgaaaaaaaaattttttttaaacattggggattttgttttttacggccaacgttttattggccgtctatgagctgtctgcataaaaggcctttttttgcattacgtatgcaaataaa

SEQ ID NO: 50914 - DNA, 239 bp, Heterodera glycines
atggttttcgagtccctgaaaattttcaatccatgtaaatcttcgatgcaaaaaaattttcgacccagagaaattcttggacttgagaaatggcggcactatgaattatgcgcttggacagcagcagaagcagttgatcggttcgtggaaaaagtgatcattgtgaacagttggagcagtgcttccaatgtcaccagcacaaattcgatgccggccccaatttgttcaacaaaagcaac

SEQ ID NO: 50915 - DNA, 984 bp, Heterodera glycines
ctgctttagtgccgccccaaacgccgcaaatcactgcccaaccgacggaagcggtgcgcgagggcgaattcgtcactgttcgctgtgagtcgcaggacggaaatcctttgccgcgcttccaatggcttttcgacaaccgcacgcgggtgccggacgcgtggttccacgaacggcacgaaggtggcggtggaagcggaacaaagccacgcgcgataagcacgttacaatggcatttgacacgcagcgacaacggcgcctatttaacatgccaaacttggaacaaagcactgcgagagggcgaagtgatcaatgcggagacgaacagacttaacgtgagaaagggcgagagaagagagcgagagagtgaaagggaaacaaaatagtgtaaccaggaagagagaagacaatgaaacaaacgaaatacaagggcaaagagagaaacagacgaaataagaaaagagtgacagaacacaaaaggatcgaacagaaagtacggcatttgttgaacaggttttgtacgcgccacgggtgaaggttgtcccaacagtgcccgaattgaacatcgaggagggcgagctggccgagctaaagtgcaccgctgatgcgaatccacccgcgacaaatttcgcctggacgcatttgccgtcgggcgaaacgcacgccgaccgcgagtggcgcgtacacgtgcgacgcgcacacgcgggcgaattccgttgcactgccgtcaattcgttagactcggcttctgatcgcatccgtctcaatgttctttacgggccaaccgtacgcattcgaacagtcgccgggggcgcatcgggcggttcggtggtgagcccggcggagggcgatcggctggtggtcgactgcgaggcggacgccaacccaaaggcggacgctatcgcatggagcggacctgggggcttccaacgtaccgggtcgcggttggtgatcgaagcggtcaatcgggttggcctttttttgatt

SEQ ID NO: 50916 - DNA, 72 bp, Heterodera glycines
atggacagaatggaacggacgcaactctcatcggaaggacaactgaaaaagggaaaggcaacgactaatcaa

SEQ ID NO: 50917 - DNA, 92 bp, Heterodera glycines
cctacgggtaatttacccctcactttcctttccgtcactccacagatattttgttatttaataattgtccatttttaaacactgagtttccc

SEQ ID NO: 50918 - DNA, 2346 bp, Heterodera glycines
gtcagggaatccataaaagactcgtgggttactggaaaatgggcttctgacggcgagggggaggacgatgaaagtgacggtgaacggaaaaacgacgaaggacaaagccaacgcaataagaaagaggaaaaatggaaggccaaagaagaggaaaatggagacgaactgtcggattggagtggggacgaattcgaaccgaacgaactgagagaggcgggggaagcgatgacgaaaagggaagagggggaatcatcggaagacgacgaggatgaggaagaagcagaggacgggacgaaggcggaaaagggacaaaacgccgaaaaaggcgatggagtggcgaaaggggcaaaaaaggaacgccttcggaagctttttgatgctgagtttgaccaaaccaacgaacaatacaacgcattagtggaggaaatggacaaacagtcgaaagtgagtgaaaaagcgggaaactttcatttttaaatgaatgttttcctttcagttgaacaaaagtgtcttcgacgatttggacgaagaacaacggcagaaactcgaagggttccgtcccggtctgtatatacgtgtcgaagttgaggacgttcctgcggcgtttgttgactgtttcaacccaacctttccttacattgtcggaggacttttgccggtcgaacaaaacgacggatacgttcaggtatctctatctatgtttggttatttcttgaatcatttcttttattcgtttaggttcgcattaaaaagcaccgctggtacgaccgtttgctgaagtcgcgtgatccgctgatcatttcgtgcggttggcggcgcttccaatcgatggtcgtttactctgttcttgaccataaccaccggctgcgcttcttcaaatacacgccgaaagaagccttttgtcacggcgctttttgggcaccttttgtgacgcaaaacaccggctttctttgcctccaatcggtcgacgaggaaaaggcaagtttaggaggcgcagaatttgggtccatttgaaatgagtgccaatttctaattgtttaaaaataaaattttgtccaaagtttagaagggttttcgcattgctgccaccggcgttgtgttgggaatggacaaaagcacaaacattgtgaagaagctcaaactgattggacagccgttggaagtgttcaaaaagaccgcctttgtcaaagtgccaaagccccattttttaatttattatttttgttgtatcttcagggaatgttcaacagtgcgcttgaagtgactcctttccaaggggtggcaattcggacgatcagcggaattcggggactgattaaaaaggcgttgagggagcccgagggggcgttcagagcgacgtttgaggacaaaattaagccaaacggtaactgaaagacacatatttaattggtgatttctcttttttgtcctttgttttcagatgtcattttccttcgctcttgggtcgatgtgccggtgcctaaattttgtgtgtcaatgacggacaaattgctgccgtcgggtgaaaattggctgggcatgaaaacgacagggcgtttgaggcacgaattgggcattaagccggagcaaaaggccgactcgggctaccatcggcacatgaaaaatgtgaagcatttcatttactcggtgaatcaaatgcttattttgaaggaagcgactgagaaattctttgtgtctgccccgttggttatcccaaagaaattgcaaaaggatttgccgtacaaattgaagcccaaagtcggccgactctgtttggaggacgccgaagaggggagggactcggaattggtgcggaatcacacggccgaactgctgatggagccggaggagaatcgggtgaacgcaatgatggaactgctgaggacagtgaaggaggaaaagcggcagagggacaaagcgcagacgaaggaacgctgggaaaagcaccaaaaggtggggaggagagaatggggagaaaaattacacacacaccttttaaatgtgcaggaactgtcggagattgaggcgagaagaaaacgcaaaatgatggcaaccaaaaagacggtttgcagaaatatgtcgagaagagaagccaaacggaagcgaggggacaacacgaccgaaatggaaacaatcggggcgtgatcaaactctgttttccacctttttcatcatgttatttgatatttatcggcaaaaaatttatactttttaagagatcacaacaaaaaataataattaaatatgcgtaattaaaagagaattgggcggagatggcggtttcttaaaatgggaagaacaatgagaaaatggaaaatgaaatcgccatttacaaaaacgaataaa

SEQ ID NO: 50919 - DNA, 97 bp, Heterodera glycines
cctacgggtaatttacccctcactttcctttccgtcactccacagatattttgttatttaattattataattgtccattttaaacactgagtttccc

SEQ ID NO: 50920 - DNA, 661 bp, Heterodera glycines
atagaagaagatttaagtgatacatgcttttatcgagagcccaattggtcctcttattatatctaaaaaaaagtgctcgggacccttgatcagcggttgctcctttgagaaacaataaaaaatagtgatcagaaggcgtctgattggcgtctgtctaaaatattttgttctatgttaaacgcaccatcatgatcgggtccattgtggcaccaatccaactcagtgtgccaagcgtgccgacaatgatcgacccaattgtggtgccggccatgaggacggtgcgccaatcgtggcccatgaacacggcacaaatgaagcacctaggcaacaaaatcattggtttcgtgcccaatgattgttaaatttctatatattttttctcagagaatttaacaaaatgaaaataaataaaattacggttttttccatttcagttagccatttttgccggaaatttttagggcttttcataaaaaaattcaattttttaaatttctaagtctctcagtctgtacacgtacatgcacaacagtgtggccagcccggattgccacgcgtcggttggcatattgtcgatcaggtcgaggaaaatggactcgtcatggaacacggaggcgttcagatcagcgtaacggtccacaacagaacgccagtccattag

SEQ ID NO: 50921 - DNA, 1878 bp, Heterodera glycines
  unsure (1)..(1878): unsure at all n locations
accattctttaacattaaatgaaaaaaacttttaaacattattaaagacacttcattaaataccactaaaaatccttcttaanaattaaaaaaaaaattaaacattaattatagttatttaataaataaaataaattcattttacatttaatgtcaatttaggaatttcatactaatttttcgaggaatttggtaccgcgggaggagggctggctattcattacatatttaatgcctgtctattctcaatttctagattgacgctgatcagttggagcagttcctggactggcccgagaaccgttattggaagtcattgatccatcttccggcaacggtggcggaggaccgacaaaatcaaagtgtaagcagtgccaatgcaaatgccaatgccgttgtgaacagcttctacttcaccacgggttaccatggacagcgtttgcgcaaatgggccgagtaagtgctataggatcaatgatcattgatcactgatctcaagcacattgcgacatccaatcaacaaacagtttcatttacatgagtgcactaatcgtttctcaaccgcctcccctccaaaaattttccaaaagaaaatttcaagaaaatttttcgaaaattcttgaaaaatgtttcagtatttttttgaatttttttttgcaaaaaattactagttcatcatactattgaaaaaccgctagcaaaaagttttcaaaacaaatttttttttaaattttttcttggtttttttctaagattttttcctaaaatttctataaaaaactaagttttactggggaacggcggtggcaagatttttttctttaaaagaatttaggtaatctgctcattttctaagattgattttgatttttttgcttcttattgttagcacaaatgaaatgttgtgggcctttttgtccttgaatttttgggcctgaattgaccctcccgaatttttttttttttgactgttttaaattatcagacgcacccatttgctaatggactggcgttctgttgtggaccgttacgctgatctgaacgcctccgtgttccatgacgagtccattttcctcgacctgatcgacaatatgccaaccgacgcgtggcaatccgggctggccacactgttgtgcatgtacgtgtacagactgagagacttagaaatttaaaaaattgaatttttttatgaaaagccctaaaaatttccggcaaaaatggctaactgaaatggaaaaaaccgtaattttatttattttcattttgttaaattctctgagaaaaaatatatagaaatttaacaatcattgggcacgaaaccaatgattttgttgcctaggtgcttcatttgtgccgtgttcatgggccacgattggcgcaccgtcctcatggccggcaccacaattgggtcgatcattgtcggcacgcttggcacactgagttggattggtgccacaatggacccgatcatgatggtgcgtttaacatagaacaaaatattttagacagacgccaatcagacgccttctgatcactattttttattgtttctcaaaggagcaaccgctgatcaagggtcccgagcacttttttttagatataataagaggaccaattgggctctcgataaaagcatgtatcacttaaatcttcttctataaatatctccgatcaccaaaccaagagcttctccgtttcagtccgatcaatttgaccaacggcactgatcaaactttattgacttgaaaataggactcaataaaattcctattattcattgtgtttattaattgttttttttccaggccgctcttatcatttcgattggcttcagtgtcgacattccggcacatttttcttatcattttcacagtgcag

SEQ ID NO: 50922 - DNA, 983 bp, Heterodera glycines
atgtgcaacaacgcgacgggcccaagcgccactgcggcgctgggcgcggacgggcgcaagcggcgtattccgtcccgggaacggttgtcccgcgcacgaacgggcgcaattgcgtcactgatggtcaacaccaactgttccatcatgcaaaatgcgatgactgttgaattggtgcacaataccaacaacaaacgatcaacgagggcgaagaaaaatgccgtcgatggaggcggtcaaaaaggggaggaaaaagctgatgatgatggcaacaaaatgccaaaaaatgatgatgatgatgagtggaaacagcgcaaaattgtgctgttgaatggcagtgccacctccacgttggcggagcagcgagacggtaccaagcgcattgctgctgttgatcagcaacagcccaagcgatcgatgatcatgttgggcgaaaatttgaacaaaatggcacaaaagtttgcccgacggcgctcctcactggacgagcaggacacgcgcaaacactcagacagcggtggcgagctgttcaaccgcagcgggctggtcaccaccacactgttgttggccacatcgaagagtttgtgcggtgaggaacagctacggcacgaggagtacaacggtgacaccaccatgtgcaacaacaacagtttctatcacggcattagacaaggggcggtgccgaaaaatgaaaatgttgccaaacggagtgcatcaacgacggggggtggagagcgtacgggctcattgcccatgtctacgtcattttcctcgtcagaggacagcgatttgactgcagagcattcccagtacagtgtacgaatgccgtgcaaattgccggtgaagaaatggcagaaggaaaagcaacaacggggaggacgaggacgaagacggcactccatgcatggcattccgtcaaaaggcagcaacagtgccgaacagcagaaaatggcaccggcggcaacgacagcggaagaggggaaaag

SEQ ID NO: 50923 - DNA, 2466 bp, Heterodera glycines
cgtcagcaccaaacccggtcgttcccacctcgtttggcccatcggtagcgtccaactttggccaaatggcaccgccgctgagtgcgccgccgatcatctccgtcccatcacaaagccagcaacaacaacaacaacacatggtaatgatgatgcagcagcattatgctggtggagctggtggtgttgctgcaccgtcctccgctggaccatacagctccatgtcgtcgtcgtcgtcgtcttcaatgtcacaacaacagcaccagcaacaatacggggtcacttttcttaacaaatttgactaaatttccaaaaaactatgaagcttgttcgcaccgctggaccccccattttactacacatatttttttaaattgacttcaaaattgttcgagtctttgatgagagtgtctcgtaatgatgttgttgcacagatcatgatgagcaacaatcagctgttttatcaccaacaacagcagcaacaacaacagcctcagtaccatcaactgcagcgtccacagcccaacggggacccgtcctacaaggagacattggactgctgggaacagatcaagtcgggcgtggacactttgtacgttttatatggagtatctcgtccaccccccccccccgtatcattctagtgctgttcgagaccgaaaatttcccgagactcgagaccgagaccaaaaaaacccaagacttttctcgagtcgcgaaacagcattaatcgtttcctccaagaaaagtttttttttttaaatttaaacacttagaaaacatgctttgagataaaactataaataattttcagcatgtcgacgagtgatgcggatgctgttgagatggttggtttatcacatattccggggaaaattttaaaaacattttcgaaattattatttatttttgcctaatccaatgaatttaactttaaaaaacaattccaaattttgaaaaaattttcgagtgggaaatgaaatattttctattgtaataaatgcgattgtgaactgcttgtcaggctcgaattgtggaagacctgaagcgcagcgaggaggacaccgccgagttcagtcagcaacggtcacgcgttgatcaacagtcacaatcgcaacaacaacagcaacaacaccagagtcggcaaagcgggggtggtggtggtggtgccaccaactttttcacatttggccctgtgccagcagctgcttccacgtccgccggcaaatcgaatgccatcacaacgccaaaaaatgataataatgccaacgccagcagtacaaattgcttccaaccaccggcggcggcgacaacgtcggtggtggtggaggagcagggcacggtgggacaacaacggcaccagcagcagcagaggaaggcagttgaaaaggcggaggccgataccacgtaggtggacaagaatgattgggtgtggctggcactgtgcttaatgcccgaagaatttctcgagactgaatgctaattttccatcccccaaatttttttaaaaaactgaaatttttctaattttctgagaaattttttctaagaaaaaatcaaaaaaaaaaagaataatttctcacataatttatcttacagtagcaaacaatgttgggtcaaaaaaatgcggtattttttgttttgtcaggttctcaccaccttcccagtccgacgaggccacctcagtcgccgctgctgccaatcgtcgtcgaatgtccatgtcagtgatgcaacagcaacagccgcaacaacaacaacaattcgcacaacgcacatattccgtctcttcagcaaccgccggcggttcatcaaatatggcgagtggaggggagatacaattaattaattaattaattgactactctggtcactaattatgatagagtatggaattatcacgaaacactgattgtgagactttgagaaacgccttgggactaagacccagcgattgagggggaggggctgcacgaaattttcgcttgtcctttccgtttcgtccaatggcaaaattggagtccggcggtgccgttaggcgccatcaggaaattttttttagaaattttgtacagtcagggacacagttggcccgaatcgaaaatcattgattgattggctttgccaatcgtgtttgattttttgcgcctcttttacaggacgagcgtgtacaccaccaacttcaccacccttttggtgtccatgccggcggtgatggcacaatgttaatgagagtagcaggtgcaaatgtgggaagccagcagcagcagcaaatgccaatgccaatgttcaaccaccatcaccagcaacagcagcagcaactgtactcatatggcaacgtccaactcccgcatcacaaccatccgcaacatgttgggacgacgaattatcctccacctccgcccaataatattgctgttggtgatgatcaacatcatcatcatcttcctcatcacaacagatttcaccgtg

SEQ ID NO: 50924 - DNA, 67 bp, Heterodera glycines
atgtcgacttcatcgaccctatttttggttgttgttgttttggcatctttgctgatctcggctaaca

SEQ ID NO: 50925 - DNA, 904 bp, Heterodera glycines
ctacattgaccattccgtcattgaatttctccgttcaaacaagcacatttgggacagaagaggcaccaatttggaagtgtttgtggatgcaattgatatgggtgttcaaccgatttgggatgtttttatccgtcaaatttggcctatttttgcgacaaacattcgccatttgagctttaccagtggcgatgctttggacaacttgcgcagtcgcacttcgccaacatttctcactgatcttgatcaattgaattcaattgattccggttatctgtgccccgatggaattgctgatgatgggccaaatgcaactgctggccaagcgttgaccaaatggctgcacactccgacaaaaaatgggcaaccgaagcaattacgtttccgtgcttatgtgggtccaccaaatttcgaatgggtcaacaacttcaaagaggtcgtctcgccagaattttcgtcaaattgtttttattttaccaattttgtttagacatttcgccgtgccaccacttctgtcagttacaaaattcaactttatttttgggtggaaccaatgccaattgaaccatttgaattgatgaacgaagtgacgaaagaaaagctgacactgaaacaggagatcgacgaattcgacttaaatgtgtataattggctgttgcaacggtgcccaattggggagacggcgacggcgccagttaagtgggaaaaccgcgaaaatccgagtgccaatttgaacaatgtcagatttgatctgtggagtttcgataaatccattgggtgagcagcaacagcatttgaattttatcgaaaaataaaatatttaattaattttaggccattggcgccaccagcggaagaaaaagaaggagaagaagaagcggatcaaagcaacaaaaatgtcgtctga

SEQ ID NO: 50926 - DNA, 868 bp, Heterodera glycines
gtacattgaccattctgtgctcgcatttatccgttccaacaaacaaatttgggacagaatgggcaccaaatttgagttgaaagtgtattcatacgaaacggatcaaatttgggatgttttggcccgagaaatttggccaatttttgcgccaaacattcgccattttggctttcactgtggcgatcatttggacaatttgcttcgtttggtttcaccgacacttctcactgattgcgaccaattgaattcaatcgattccggttatctgtcttccagtgcgatcgctgttgatgggccaaatacaatttctgcttggcaggcgttggccaaatggttacacacgccgagcaaagacggacaaccgaagcgattgcgttgcgatgatttttcaaagtccatcaactatttcaaggaggtgaccgaccataatttcattaaactactaattaattgattgccttttgttttgtttaggcatttctccatgccaccacttctgtcagttacaaaattcgatttaatttatttttggtaccaatgccaattgagccatttgaattggtgaatgaacggacaaatgagaagctgacactgacgaaagatggcactggtctattcagtgattggctgttggagagatgcccaattattggggagacggcggcggaccaatgggaaaacgacggaaattcggatgccaatttgaacaatatccaattttttttttggcacggcagtaattgctttgggtgagcagcaacatcaattttgaaattgtcgaaatttaaaaaataaaaattattttagcccattgtcgccaccatcggaagaagcagacgaagaagcggatcaaagcaacggaaattaa

SEQ ID NO: 50927 - DNA, 1359 bp, Heterodera glycines
cccaccgtttaccgctcgttgcgtagcatatgcgcaaccagaaactgcggaagaatttgacgaattgcaattggtgagtgacacctgctgggcacactcattttgtttgttaataaaaagtgatgtcgatgctgttctgttgatgaaagcagttcgccttccccctctataaaatgtttttagatttcctaaaaaatttttttagcatttaaaaaaaaattcaaacgtcgaaaatttaaaaaaaactgaaatcaatgcgagcgggaaacgtagtgcacctattctgacaatgagtgacaccatcgtagttttaatagtttaccatgtttataaataagtgcttttttaaatccgtttttaattccagtatttcacatatcctggtgatcttacactggagctggtcaagggcggaaagaatgtccaagtcacgaaggcaaactgcaaacaatttatggaggtgatttgtgtagtttttaatttattcaatttcccattttaattcaaacaaaataataatcgtatttaatttttgaaacatttacaaattttatttttgtaaaagtggctcttttcagctcgtgtttaattggcgtcttgttgagggcgttcgtgccgaaatggaggcccttcggcgcggctttcagctgatcattggcagcgaatctcttcaaattttcacacccgacgaaatctccgagttgttctgcggcaccgacgacgcggacgacaaagtgtggagcaaatcggtgctgcagcattgcatccgcccggtaaaccacacaattgatttcactcattggcaccaactaatggcttaattaatatgccagccaatttattgtttttttccatgttgcgcttttgattccttttttaaatttaattttttattattcataatttcacttttttccccataactttaattttccaggaccacggctatacatacgattcacagcaaatcaaatggctgatcgacatgttgcacggatttcccaaagagaaggtggttaaatatttgcgggatattttttgctggttctttgggctcgttgccttggtttcattcatttgaatttttttctgtttagcgtcgccgtttcctccaattttgcaccggttcgcctcgtttgcccgtcggcggttttaagggtctgtcgcctccgctgactgtcgtcaagaaaaccgcatcattcgtcggcaacgaaaacgaactgccgtccgcgatgacttgctacaacgtatggggaggggaaacccttcattttgcataattatgtataaatttttctttttcagtatctgaaaatacctccgtacgaaagctacaacacatttttggaccgttttgaa

SEQ ID NO: 50928 - DNA, 201 bp, Heterodera glycines
gtggctcttcaacatgtgtacagcttcttcttgacctaaagaaactgcgatggcacaatttttaatatgtgatggagagacaacaaattaagagagattttttgtttgattgatatatgtgcaactaaaggaaaatgactctataaaaatagttcgaaaattgtatcatgttttcttttttaaatataatcagtgtgaaga

SEQ ID NO: 50929 - DNA, 826 bp, Heterodera glycines
atggcggcgtcatcggactcatccaacgggcactcagtcgtgcgtcgtcccacatttggtttgaacgctcgaggcaaaggaccgctcgttggtgcggaatcggtgggtgtttgttgttaaatgtcatgttgttcatattgtttattcaacgggattgaaaaaaaattgctttctcagcgtatactccaccacaggcgtctgcatttggtggtcgggcggtcccatgcacagcttgcttaccaagtcgttgacccgcgtcatcacgctcagaatgtcctcctgacacgccttttttgacagcacctcgactaagctttggacaaagtacgttccgtacttgtggtccctccacaccacaaagtgtgcaaaagtggcgtgtgcgatcaaaaagtccgtcttcagtgtcggatggtcgctaaatggcgaaaggatcactctctcaaaaaacgggtggggggggggggaggtgttaggtcatttcgtaagccacgatgggggcgtttcttaaaaaaaaaatttttacagaaaattggtaattcttcctaccacgaacaatgggatgggtggtaaaacatacaaaaattaacccaaatgaacgtttaccaaaattgccaatatgggcatttccattaattttaaaatccataaaaatttaatattttcccaattttcagcaaaatattaaaaaacaaattataagtcgagaaatttgaaaaaattaatttttgcattttttgttaatatttcattttgtaaatcttacttatttgttggtttttaattgattgttttttttgctaaagaagttcttcaattactatcaaaa

SEQ ID NO: 50930 - DNA, 105 bp, Heterodera glycines
ctctggagatgcgcggtggacgaacgcacagcgccggacaatcaagcagcaatgccaccatcgacaagcccagtacttccgaacaaagtggccgatcgagattga

SEQ ID NO: 50931 - DNA, 1624 bp, Heterodera glycines
atgatactgctcggtgcggcgctgctgctgttggccatgtttggctgctgcggtgtcaccgcaacggcaccggcacaaaagcggacaaagcgtcgtctaggcggcggacaaagtggcgacaacaacggctgggaggaccccgtcgctgtggtctacacttcgtcaccactgctttggctgtacacggtgggcgccggtgtgctgctgatgttcaccatcggctgcggctgttacattttgtacaccaaagatggggtaggaacggacagagacaatgtggggtcggtttttggccacttattctcaccccccagggcacaaccgtgtacaactcaccgatttaaaatgcaattaaattttttttgagaaatcgaatcattaaaatatagctgacccatttaggctttcgaataacactaattatccccaagaaaagggtgagatttaaaaattatgccctatttttttgggggggggggtagctctatatttcagtgtaaaatttttttttcatgtacatttattttataaaattcgtcagattgatgtggagttgtccgatgctctcaactacatggtccaacattactaccaagggcccggcattgtgcaggaaactctggaccgactgcagcaggcgtttcgctgttgtggtaaaaccaatgaaaaaaaaattcaagaatttttctaacgatattttggaaaatttccaattttttcttgaattttcttgtggaaaaatttaaaaaaaaattattttaataattgatatctctcgaaataaactaattttcttcaagattactaattgacattcaattgccccgttgtaggcaatgcgggttgttccgattttcgtgcgtttcgccaagacccgccccggacgtgcgacttgcgctgcgacgggtgccactaccgaatttggcttgcgctgcgcatcggcttctccgttgcgttggccatttttggcattgtgattttggcacaggttttcttttgttagtggttgtaagagccaaaaaaaattttcctaaaaaattaggagggggcctccactttagggtccacttcgtttgggcgccagaccaagtttttggactataacctttttctttgtaaaccaaatctaacattcttggtatcattcgaaagcttaacatgtttagaagctatttctaatttgtaagctattgtttcgcgattagacaattaccaaaaaagttataacatgaaattgcaaaaaagtcgaaattttttggagtttttttcttaataaattttttacaggctagaaaatctttttgtaaggctaatagaacatgtgaggagcttttgaatgataccggataaaaaatgggtaaaatttctgcaaattttcggctagttttctgtcatttttttcattcagaaaaatttttgcccttctattcattctccattagaaaatgactcacaatcaaaattaaaaaattagttttttaggacgaaatttattgccaaatttcctctgtttttcaaaatcttcgccggcagtgcctatcggccgatattgagtattttggccaataatctcacttttttgagatcttttgaaaaaaaaagagtcctcaaagcgctaaacaaa

SEQ ID NO: 50932 - DNA, 525 bp, Heterodera glycines
gcgaaagcaaaacattcaactggctcctccggtggtggaccatcagtgccggcgccaaacaatcggaagaaaacgcaaaatcaacaacagcaaaaaggaaacaacgaattgggaggagaaggaagagaaaatggggggaaaagagaggaaaagggaggagaaaaaggagcagcagcggaagcagaggaaaaggaaaagaaagttgcagttgaacatcatcaaaaacaacaacaacaaaagcaagaagttcaagcagtacagcagcaacaacaaaagcaagaagttcaagcagtacagcagcaacaacaaaagcaaattttggtgggaatggagatgaagatggataacagcaaaaatggagaaacaagggaagaggtggaaaaggaaggaaatagcattggggaaggaggagagacggaagagaaagagaggaaaaggaaaaattctaagcaaggagggggagaaagaggagagaatgaagcagaaaagaagagagaggaacagcagcaaattgacactttttaa

SEQ ID NO: 50933 - DNA, 1077 bp, Heterodera glycines
ctcgtggagtctcagcgggaattctttcggacgggaaaaaccgccgaattggcacatcggaggcagcagctgaagaaactgcgcaagacaatcctcgacaacagcgaatttctctgcgaagccgtgcaaaaggacctgaaaagggacgcgaaactgaattatccgctcgaaatttcgtcggtgatcattgaaattgaatatgtactcgacaatttggaggtgggaaaaggaaacatttgagggatttgagaaaagggattttcagcgatggacggcgcctttaaatgtcgaaaagactttcaccacacttctcgactccccgcaaatcgttcgcgagccgaaggtcagtcgaagtcgaaatgattcttaaaatcgggacgaaaacggaaacaatcgcaagaactttcgctgattttctccaatttagggcgtcgttttgctcattggtccatggaattaccccctcaacactttgctaatgcctttggtcgacgttttagccgctggttctttttttgtgctccaaattcaaccaaaattttgtcattttacagggaatactgccattttgaaaccgtccgaagtcgcgtcgaacaccgccgccgccgttgacgaaattatttcgaaggcatttgaccgggtgagtgtgccaattttttttggggggtaatgccaaagattcttctgaacagtgccaattccgttcagaattatttggcagtggtgcagggcggcgttgaacagaccggcgaattgctgaaggaaaagttcgaccacattgtgttcaccgggtcagcgctggtcgcccgccacatttccagggcggccgcggaacatttgacgccctgcactttggaactcggcggaaaatcgtatgttaaggggaggcattgtcaaataattgggataaaataatcaactgcaaatgaaattgagcggtaattgcaagttttgtgagaaccctcacgacttttaggaccacttaattgaaaagtcaaatattttaagggaaatagcaattttgaaaataacattttcacaacttcccatttgatggcgttgaataatccgtcgtga

SEQ ID NO: 50934 - DNA, 89 bp, Heterodera glycines
ggattatttttcaaaaacacctcgtagactgggggataattggagactgcgggattaatagagactgggctataattagagcatatacg

SEQ ID NO: 50935 - DNA, 301 bp, Heterodera glycines
atgtttttaatcgctttatttatgctaacattctccttaacatttgatttggtcgtttcttttgccgaaagtgaacaattagtgtattataattacaaccctaatgattattactcaacaagcgggagttccctttccgaactgaaaggtgaaaaaaaggaattttaattattaaataataataaattaatttgttttagatattcttgatagcggggacaatatcaagtgagacatatgacattttattaaactctcgactttgggttaaaaaaaactttttgttttatgcattcagata

SEQ ID NO: 50936 - DNA, 1203 bp, Heterodera glycines
ctcagcagctgaacagccagccaacctttgattgtcccgtcccttttcgccatgtccaatttggcaatgtcttccgatgacgagggcggccgaggagagcaaatgtcgctgaaagtggtccttttgggggacaatggcacgggaaagacggcgatttgttgccgttttgcgcaacacgcgtacccacagaaatacatacaggtgaagcagaaaaggcaatttgaattaatttagcaaattggcaaacaaatttcactaagtccggagagaatttggaagaatttggccaattaacttaattaattagctttaattggcccatttcttggcatagacttccggcgtcgacttttactcccgccgcatcgcaatgcctcgcaatgtgtcggtgcttcttcaggtgccctttttgtgcccttcgatcactgactgaccaatgctgattgaccgccactaatttcagctttgggacgtcggcggtcacaatttgacttctccggcaatgctcaacacttacattttcggtgcacaagtgagaagggatggacaatgttaggttgtcatatacacttccgacaacttaggccgttttgttcgtttacgacgtgaccaactcacaatcatttgaccatttgaccgattgggtgggcgccgcgaagaaaggcggcgctcaaatggaaaaggtaccggcgcggaaatggctaatggaaaaatgccgggggagggggtaattagaattcattttatcatttgatcattgatcagcctttttgcttggcattggtgggcaacaaaacggacagtgaacaccaaagagcggtcaaaatggaccgacacaacaaattcgcggaccaaaacgcactcagtgccttttatgtgtccgccaaaacgggcgattccatcgatttgatgtttaagtgagggaaaagtgaaggaattacaaaaaatgactaattaactgattaattagttaattgattaataaattttaattattttcatattgcctttctctttagaaaaacaacagccgaagtgctgggcattccgttgacaaaggctgaccaggaatggaatgtgaatgttgtacaggcacagatcacaacggtcgatcggagcataaataagcggaaacagcagcagaaggcggaggagccgcggaaagaaaagtacggtaggagaaggggagtggatacggtaggc

SEQ ID NO: 50937 - DNA, 62 bp, Heterodera glycines
tcggcggtgccaatgttcaacagccagctgctgttgccaaccatgccaatcagccaccattg

SEQ ID NO: 50938 - DNA, 2360 bp, Heterodera glycines
  unsure (1)..(2360): unsure at all n locations
gttggctgggcagtagcagctaccaaaagatgcgtgtctggatgttcgtgcagcagcagctacctaagctttacaacggtgcatgcgtggaccttctgcaatagcatatgggtagcattcggtgaatggctcacctggctgggcagtagcagtgaacggaacacgcgtggcacctgtgcaacattggaggccggcaggcttcgcaacggtacatgggtggcacctgtgcagcattggggaaacggaaggcttcgcaatgttgtacatgcgtggcatcacagagaaaaagacgcggctggctgtgcagtagcagctaccggaacagagatgatggaatgttgagtccaaagtcagggacgcaacatggttttgccttggtgaaggtaacacctcacttatgatttttgcagcacgcttttttacggcggtgccgataggcgccgggaaaattgttggaaatttgaatacaatttgttttaataaaaatgccgattttaaggattactaggctcaattagttaacgaattttctttaaaaaataataaaatatgtgtcaataaaaatgaaaaagcatattttttcgtaggcaactcctgagaaaataaaaaactgtggaggagcctccacaaaatttgcacaaggtagtgcctcagggtccggtcaggggtaagtcgggctcggatcggcgggtcggggtcaaatgggcgaacacacacacacaattaaataattcaagggtaaaatatagtgtgtaccttttactgtttgtatttgttcttttggcgttctgtatttattattattttatttatttgcttcaaaaaattgaaatttatacacaaacacaaggaggaattgaacttgagaccccctttttggtgactaactcacagaccactaagacgaaaaaaccaacttaattgtacttggagcccaaaattgaatcgccgtgtataaatcaaggataaattaattatgaaggaagatttttaagttttgaaaaacgattaagaaataatttagagaagtaaaaggcaggaccataaccagcataaaattcgggagggacaagccaagagcttctttctttttgctcttcggaccaaaaatttttggttcttttccgttttgtcccccctaaaaaaacctttttttaaaaactttttatggcaattttaggcgctgaacaaatgtgacatttatttaaagctaacatctattttatgtgagttaatcgaaatttgactcccaatgttagttctagtgaaatttcaaactttagtttccagattaaacggcattctttttaaatttatttcagattcgtttcaagcgcctaaaaattgtcatagaaacttaaaaatttttttagaggggcacaaaacggaaaagaaccgaattttttactcgtgttattntaaaaatgcagcccgcccggtcccggtagttcaaaattccggaattttttttcaactcagaaatcgagagtctcgacgccaaaacctttgtccccctctcccgactctacctgttgcccttggtgtctgctgaatgttggtcgggtcattgtgtgtctcctcctgcgcgacttgggttatcgaattctccacttcgtccgcgtcgcgtgagaattgctgcagggtttgcgactcgtccaactttgacggcttttccatcagttccgctttcagatgatcctaacgctcgaaaatttggccacgtttggcagtgatttgctgcaaaaatggggcaaaatgccatcgcaagaaaacaagattttttttaatataaaaacattttttaatttaattttgactcgggcggaaattttcatgatcgcgcctcatttttctgcatccactgaactgattgagagttttttgcaaaaatttcaagccttaggcttctccgaataagtgatcaaaattgtaaaaaaaaattattttttttttgcacttgttactgatcgggttttatgtttgccatttttttgctttgaattaagtatggaactgggggctgatttataatttgcacacttttatttaaaaatttcattataaaattttaatttatttactattttttagattatcagcgcttcttgtccgactaccgtgatctgatgcaatgggtggacggaatggtccaattggtgtccagcgataagttggccaacgatgtgactggcgctgaggtggtagcctatcgaactcgcaataaaaaaccgaaaacgctaattcgtttgtttcatcgttgttgtgcaatggtggctgattggcatggttggcaacagcagctggctgttgaacattggcaccgccgagccaaacaaatccgtatctatgaattcatctga

SEQ ID NO: 50939 - DNA, 1199 bp, Heterodera glycines
atgtttaaatttttcacaattttcagctgggctaccatcggaatttgccccaaacagtcgagcgaattgggagaacgaatttgcaatcggaccggcacttatgcatacgaaagcgatggcactttttggcttagtggctcattgaaaataagaaacgccgaatacatttatggtgccgatgatgttgttgggtttggcgttgacttggccaacctgaaactgattttcacaaagaatggccaacatttgggttttaaatttttgaaaattttaaattttaaaacacttagacaccatccatttgttcgcttcttcttccgatcaccaattatttcctttcgtttctttggcttgctcatgtgataaaattgtggcaaattttgggccaaaattcaccttcgacttggctaatgttgaggtgaaaagttgaaaacgggtgctataaaaattcaaatataaaatatatttttaaattttatttaaagattgtttcaatttcgcttcaaaattgttgggacgtcactttctgtcacaatgatctccaaatcagtggggacgaatctttgattgtcagactatgtggaaaaggcgactgtaagccatatgctaatttaaagtgcttccgatacccaaatttgcggagtctcgagactctcgaacagcgcaattaattggtttttttatatttatgaactgtttgctaaattaaaatttatttattgtatttaattacaatttttcgaaagggtggcgcaccgtcttcacgaaacatccgatttcatggaaaaacaatctctcaggcgttttttactttgaaatttcgctcaaagagttaaaacggttagtgtgtgcttttgtatttaatttattcttaattaccataatgatttaatgatttgtttgcttttccccaatgttagcctcgcgcttttcggatttgccgacaaacacaaacctttgctgtcccttttgaaccgttctggcacttacgcatacgcaagcaccggcaactttttgatcaacggctactgggagaaaggcacttgcaaatttgctcgtggggacgtggtcggatgtggcgttaatttggccagtcggcggatcattttcacaaataaaggacaacgtttgggttggtatttcggaaaataccacaaagccttattaatgaccccgggacttggggttggataaataaa

SEQ ID NO: 50940 - DNA, 578 bp, Heterodera glycines
atgggtgctatatccacccaccaagtctcattcggaaatcccacggacacctggggacctttctttgtgagtatatttccgagtttttggggatgatgatcacgaattgacatattttttgcaaaatacagttaaaaattgggaaaattaacctaaaaggcattcctgaaataaaaaaggccaaaaaatttatttgacactgcaatacttgtttcttttaggcatatgtgatcgatgccaacaactcggctgccgtccattggataccaaatgtcctcactgtacaacagttgtggtcgtacatggatcaaactgagagggtttctcagacgggcttttcgtaataactttatttaaaggattggatacaaatataattttttaaatattaatgttaaaatgagacttttagagattttcaaattttttcaacgagagctttttgaattagagaaaaatgccctgtttttcaatccctcggtaccagtgagctcttccgggcattatttaaatttggcctccctgttcgttagtagaatctgccaaaagttaaaaaaatgattaaattagtaattgta

SEQ ID NO: 50941 - DNA, 1067 bp, Heterodera glycines
atgcatgggtttggcctttttctgtcgctactggcggcaataaatttgtcgagaggtcaaattggtccaaaggatgaaagcaaaaaaggtttgaacaatattttcaataaaattttaaatattattttgttttgttttaggtctttttttgatggccaacgaatttctcgagacagggaaaatgcttctcgacgaattcccaggaaacaaacaggcggagaataaatctgatgatggactcaattcacaaaaagcgaatggaaaggcattggaagagaaaagtgacaatttccagcaaaaagcctttgagtttttgtgtggaatcgaaatgaaagcaaaaaatgatgagaaaggaaatgacaaaacaaagaaagatgacaatttgttagcttttaaagaattagaagaaaagcgactcaatttttgtcaaaattggaaaaatggcaaaagcatttggaaaggatggaaagaggcagggatttcaatagtaacatcagtgaacaatttgaaactgaatcagcaaatatacggagaaagtcttcgaacattggcgaaaatggaaattttcaacagcaaaaacaaagaagaatttggaaattttacgaaatttggcatcgatttgctaatgaaagtaactgaaattcttaaaggtaaccaattaagttattctaaacaaagaattttattccaaatggggtaattaaacatttaattgaagatgcgagaattagttcactggctctggctgatcagtctgatcatgaccaacggaaaggcaacaacacatcacgacgaaggaaaagggcttttcatgggatttttcgccgagagtttagcttggaaaagtgttttctgtacttgctgttgacttgcatgtccgccggccttggcactgacatggtcgttcgtctcgcccagcacaaagtgcgggtcgtttcatttggcaattcggcgcctccgcctcccttttctaccgaaggccatcacacaaccccgcttgaaggatttgagattttcgtagctattttttgctttcttaccactttttagttttccaatgacactca

SEQ ID NO: 50942 - DNA, 534 bp, Heterodera glycines
atgtttaaattgccatgcattttacttccattttttgcactttttctcagtgattttattgtgggacaaccgatgaagagtaaacaatttgattttttaataaattaaagcgaaatttattattatttttaaatttgcagatgccgcagaaactgctgatcaaggaaaacagaaagaagaacatttggtgtgtccgcattgtaatggccacataaaacctggagaattgaaaatgcaattaaagggtaaacaatcgccagccgaacaacaaaaagtaaataattaattaaatattatttaaaaaatatataaataaatttaacaggaaaagccgaaagtggcacgagagcgccacccttggcacgtgatggacgatgtgcaaattggggaggaacatttgccgatgaataaaggggacgacgatgccgatttgagaatggaaaaaaagttgactcgcgaaacgatcggcgaacaaccaaagttttggacggaatcttctgattattgaaatttatgaaaaagcgatcaaataaa

SEQ ID NO: 50943 - DNA, 397 bp, Heterodera glycines
atgccgcagaaactgctgatcaaggaaaacagaaagaagaacatttggtgtgtccgcattgtaatggccacataaaacctggagaattgaaaatgcaattaaagggtaaacaatcgccagccgaacaacaaaaagtgaataattaattaaatattatttttaaaaaatataaataaatttaacaggaaaagccgaaagtggcacgagagcgccacccttggcacgtgatggacgatgtgcaaattggggaggaggaacatttgccgatgaataaaggggacgacgatgccgatttgagaatggaaaaaaagttgactcgcgaaacgatcggcgaacaaccaaagttttggacggaatcttctgattattgaaatttatgaaaaagcgatcaaataaa

SEQ ID NO: 50944 - DNA, 389 bp, Heterodera glycines
atgtcaatttcgaccagttcaacaaatggtgatttcacaccatcaataggtggaggaggtaatgaaatgggaaaaggttgaaaataaatggatttttttggggaagggagtaaataaatattataattaaatcagggaattaaatttataaattttcagaagttaatgacgattcaattagtttggatgaagattggcaatttgatagaaaaaatgaaactgttgctgatcggcaacaattgctgatggtgggcaatgaaagaagcttcaatgaggcatttacatatatttttcgacaaaattatttatttttattggaatttcatgaaagttatgctaagaataaggtggaaattgaattcaaaattaccaaacttgtacttgagaag

SEQ ID NO: 50945 - DNA, 2431 bp, Heterodera glycines
gtgaagagcagaaaaaatctaaacccaaatgtgatatttcgcgactcatggaatctgattccgggtccactggcatcaatggtcccaatgttcggcttggacgtggacgacaagccttttttccctcatttggtcaaccgccctgaaaattacggatgccatatcttccccacaaaggccgattatttggcggacggaatgaatccggtcaaacgaaaagaattcgacaaatggtttgaggaaaaccgaaacaagtcgtttttcctcgacgaagcattggccaggtattatgaatttttaaaataaaaataaaattttattttaagctattgtaaaaacgatgtggatattttgatgtccggtttaattgcattccgagcggaattcatggagatgacgaaacggtcagctggaacagacggaaaagtggaccgagctgctcacaaaacaccccatgacggcattgattccgtacgccactgtattacaattgcctcagcttgtatgcgccatttccgcaccaatcacctaaaaccagcccacttggctcttgtgcctgagaagggatatgacagctgtggggacaaccaaagcgatttggctctaaactttatgcagtggtattctgaagagcatggagtacggatacaaaatgctttttcggctgaaggcgaaaaaaggtaaaattttgaaaatgtaaaaataataaaattagagtgatagggtgggtaacttccgtctggatggatggattgagtcggagaaaaaaggactggaaattcatggatgtgtatggcatgcctgcccaaaatgttatccggacgacaaggatgtgatgccttgtggcaagacagctggacgaatccgtgagcggaacaaacagcgcatggattttatattggaacgcgtgctaaatgtggaaattttttggcaatgcgagattgaacaaatgctggcccgggacagaaaaatgaaggacaaattcagcgaatttacgggtgatgggggtccaatcaatatccgtgcttgcttcatggggggcagaacgggagcattgaagcttcaccacgagatagcagcggacgagacgattagctactacgatgtcacaagtctctacccatttataaagtacatacgatgaatttgtcaatatttaaatttaaaatttttttgtagttatgtgacccattatcccgttggtcatccaactctgcatgttccatgtgaggatgttgactggcgccgatccgaagacaatccatatcacctggccattctcaaagtgttcgttattccaccgcgccgaattgacgttccagtattgcccgtcaaagtggatgatcggctttgctttccgctttgtatgaaatgttgcaaaaaatttccaaatgggggtgtaagggagacgtacaactgtacacacattgatcgtcaaagaggatggattagtacatgcacgtctttagaggttaaaagaaaaactgttttttgttggtatatttggtaaatttagctaaatgtcgcattggatgaggggtacagagtaaccgagttattgcgtgttctcgaatacagcaagagtgacaaccagctatttcggccttatatgagcgaattcatagccgaaaaaatgcatgcttcgggattcgatgatcagattcggggaaattttgaagcggaggagaaattcatcgcggaatgccgggaagaatttggaattaaaattgaccgagcgaaaatggtcccaaacaagggaaaaagagcgcttgccaagttggcggtgaataatttatgtaagagtttaatgaattaaataattgaatacttacatgttaaggggggcgtttttctcttcgtaattttgggcttacccaaactctgattacggacgacccgtcggagcttggcaattatttggacaacaaaaaaattgaagtcacaggacttgacatgcttacaccagagaggatcttgatcagctaccatcaaaagaatgattgggtcaaagaacacccatgctcaaacgtcgttgtctcactttttactacttcggcagcccgattgcacttgctaaaagcaatgcaaaaagttgttcgaactcctgggtgcattcttttatatacaggtaaaaattattttttaacgcgacgatttttgaacttttagacaccgattcgctgatttatgttcatccaaagggggcaaatcctttgaaaacaggccctcatttgggtcagtttacggacgaatttccgaaggtgacaaaaattattttaaacatcataatttccaaattttttagcatgatattttggaatttgtgagcggcggtgcgaagcagtacggactgaaactccgcaaaaagggatcagaagaagaagaatttgagtatgttctcaagctgcgtgggatcaccctcaactatgat

SEQ ID NO: 50946 - DNA, 1058 bp, Heterodera glycines
atgcatgcttcgggattcgatgatcagattcggggaaattttgaagcggaggagaaattcatcgcggaatgccgggaagaatttggaattaaaattgaccgagcgaaaatggtcccaaacaagggaaaaagagcgcttgccaagttggcggtgaataatttatgtaagagtttaatgaattaaataattgaatacttacatgttaaggggggcgtttttctcttcgtaattttgggcttacccaaactctgattacggacgacccgtcggagcttggcaattatttggacaacaaaaaaattgaagtcacaggacttgacatgcttacaccagagaggatcttgatcagctaccatcaaaagaatgattgggtcaaagaacacccatgctcaaacgtcgttgtctcactttttaatacttcggcagcccgattgcacttgctaaaagcaatgcaaaaagttgttcgaactcctgggtgcattcttttatatacaggtaaaaattattttttaacgcgacgatttttgaacttttagacaccgattcgctgatttatgttcatccaaaggtagcaaatcctttgaaaacaggccctcacttgggtcagtttacggacgaatttccgaaggtgacaaaaattattttaaacatcataatttccaaattttttagcatgatattttggaatttgtgagcggcggtgcgaagcagtacggactgaaactccgcaaaaagggatcagaagaagaagaatttgagtatgttctcaagctgcgtgggatcaccctcaactatgctgtaacagaaaaccacggattacgcttcgaaacttttaaaaaacgcgtcttggaatttgctcgaaccggaaaaacccagccaatcaaagtcatttaccccaatttccttcgccctaccgttatcaaaggaaatgtcacctcagctcctctccaaaaaatatataagccttatgttggcaaaggcattgtttgttctcgtgactttcgcgtacttgattttggctattcatctcgataaacattgttatttttatctgatca

SEQ ID NO: 50947 - DNA, 516 bp, Heterodera glycines
atggtgctttttactgaaaaaatcgccaaaattttgaattgtcgtgtcagtgaactgcgtgatcggcttaatcacccttctgattgtaaaattgtagagcaggcgttgaatggactcccaattcagacaacatacaaagaccgaaatgggtacaccaaaactttttcttttggcggcatcacaccccaaggagcttcaacaatgatggcctatggccggttaggcagacctttcaatgtttgcgttgctgcacacttttatgttcgccatcgaattaaactccgtcatccgtttcttcactgtgctgtcgagcgctttcaagaaggccaagaggaccgtttctatccacttgagctatgtcaaatggaagatgtgccaaacgagctggattggctcgggagaatgttcactgaaatccgcagtgaaaaggtcaatggcatgaacgaagaatcaactcaaatttcgaacgaaggacgtcatgaatgtagccaaaatgatacttacactttttggtag

SEQ ID NO: 50948 - DNA, 523 bp, Heterodera glycines
atgtccacatcctctaataaaaattatttaccaaaaaaccaatgcccaaattgtgatggtaattgcaattttttcaatagtgtacaaaaattttttttcaaattttagatgatgaagttgacactgacccttcacccgaagaagttgagaaatggacgccggaacaagtgattgagtgggaccagcgttgctacgggaaaatgccagctgaagaagagctttggcaagaattcctcgacaaaggagaggcaaatgtcagtaaataaaatttttgatccattttttaaattatttctttaggttctgcgtgagttctttggcggaaaaggggcgcttgaagttgagaagagccttcgagaatacgcgaagaaaaaggaacgccgagacgcaattctgattgagaaaagaaacgaatacaaaaaaatgatgggaaaaaaggatgaaaattgaatgttcgaatttctccatccgctatatcaatggcttttattttattcaattattttgatttttaatactcgaa

SEQ ID NO: 50949 - DNA, 1791 bp, Heterodera glycines
atggctgaaaatcataatgagcaaaagatgaatgagcaacaaaatgaaataattccagctaaaaaccccagaagcatccaatcctggaaacttttccgcccaaaatatatgctaacttttcgtttttgcgacggtaaacagctagtctaattacagaatatcataattgttaaaattcagcatgtctttcgtgcttatggaacaatacaaacaaatattcaaatagaccaagtgacggaagccaaaataatgatcttttgatttttaaataataatgataatttcgatgattcaatttttgtaatgataatttcaataattgtaatgataattcgatatttaattgtttgcagttaattcataataaatgttttttaataaaatcatttttttaattttggtcatctcacaacttatcgcccctaacctccattacctcccaaacaacataaaaaaggcaaaaatttgttatgtttgcatagcaaggaaaatgccgagcgcggaagcaatttgatctttagctcattcctctcttgatttaacgccggctccgcactgcaatggatgtgcttatttatttattgccttgttgggataattggcggtaacctaaaaagaaatttaccggccaacagttcaagcactttaatcgtcccaatattcccctaaatgcgcatcgcagaaatatgagatgtcgagaaaagtaggctgtgattttttattgaaataataaacaattcaagtgcaagtggagaataataataatggggcgggtccaagtgatggcggtgttcggaccagaccaaatgaaaaccgtaaactaggaaatttttgtttaataaatttcgatttttttttgaagaacagctgactccgctcagttcacgttcgggaaataatggggctttgcaaaatcgtactaatggtgtgctaattttgaaaaaaataaaaaaacaaattttttttagtgagaaatgtggctgggccaagtacggcgagtgatggtgacgatgaacgtgaaaacggtgagatgaacccttaataattttacccaaataaatgcattttgacaggccccgttctaagcgctgtcatcgaaggccacatgaaccgttcgcggatgcgtctcattcgcgacgagatggttcatcgtgctgttcagcagcaacttgaacaccagcgccatctgttgcttcagcaagcgcagcagcagcagcaacgagaagagcgagaaagacagcaacactttgatcagcaaatggaggaagcagagcttcttcacgaacaactgcaggcagcagagcaggaaaacgacgagaacatcgaaccacagccccctcagcagcagccgcaaccgctgattcgtcatcagcagctgcagttcgaacgtaatgttcgactgcagctgcgcgagtcgcaacgatttgaaaggggagttgcctcgtcaatgctcgttccgccagcccagctctattgggagaccgaatgcatcatctgcaccagcaaccgcgcacacctctacagccgtaattgcggacacatctaccctgtgctcgacatgtgcggtgaacgcggtgatccacaaggtcgcgacttgtatgctctgtcgtgcgcgaattgaggggatttatccatttgtccgctgatggatgtatttgataattcttggacccctttgtcattgtccatcctatcattaccctattatcacaatttttgtaaacgatccattgattgccacttggccttagcaattctcaatcattatttaaactcagccaaaaaaaatca

SEQ ID NO: 50950 - DNA, 138 bp, Heterodera glycines
aaagtcatgcgcacccgtccgatctggcaagttaagcaacgattgctgactagccaaaaggttcggtgccgtgatgaaacgaaccagcactgcttaccccgcggcacccggcacggtcccccgaaggaatggatttaa

SEQ ID NO: 50951 - DNA, 678 bp, Heterodera glycines
tgaaaaaaatatttatgaaacaaaaaaatcgattttttcaagtgtccgtttggggtactcaaacatttatggggagcaaaaatccaacgcagaattaaagtacaggctatagggaagctattcccgaaggattcggtctccccataaatctgggcgcatcggttcggggggactgccccgaaaacaaaaaaatcgattttttcaagtgtccgtttggggtactcaaacaattatggggagcaaaaatccaacgcagaattaaagtacaggctatagggaagctattccggaaggattcggtctccccataaatctgggcgcatcggttcggggggactgccccgaaaacaaaaaaatcgattttttcaagtgtccgtttggggtactcaaacaattatggggagcaaaaatccaacgcagaattaaagtacaggctatagggaagctattcccgaaggattcggtctccccataaatctgggcgcatcggttcggggggactgccccgaaaacaaaaaaatcgattttttcaagtgtccgtttggggtactcaaacaattatggggagcaaaaatccaacgcagaattaaagtacaggctatagggaagctattcccgaaggattcggtctccccataaatctgggcgcatcggttcggggggactgcccccgaaaac

SEQ ID NO: 50952 - DNA, 1143 bp, Heterodera glycines
ttgatttctctctacgagcgtgccaaggcggacgaacgaaatgtgccgacacttcgtgcgaacactgctcgtaataatggacaacagcaacagcagaaaaaagtgcctgctgctaatggcgggaagaagaataataatggggtggcaccggtggtgaagcagcaaattgttgtgatcagacaagcagagcagcggggagagactgtggcgaaacgagaggacggcggggtgacgagacggcgaaagagaggcaacacagcaacaacagaagttggagagcaagagcagccgccagacaacagcacagacgatgaaaagagtgttgagcgtgaggaacagcaagtgatggaaaagaagcagagaaaggcagcggcagccgcagagagtgtggaaagcatagagacggaggaaaagaagcagaagacgggaaaagactaaaaagagttaagaccttaagacagatgtttttttttcttcacttttttgctgaattttttttttttgggtgtgatcggaatatttgttgtttcttttttatataaatttaaacttctaaggtatgtaaaagtatattcaatactttttgaattttggtggctattagagaaccaaacacttttggctatcgaatgaaattaagaattattttaatttttttttttgtcaaaaagctttcaatttacatcgatttatggctcttcggacggatgattatttttcttcaagttataatccttttaatgccaaaacagttacaacaattatgaatataggccaaaagcccgggcgcatttctagtggacaacgtcatcagtagggcgtgtaattatatggaaatccatatttttttcctggattattggaggcctgaaacgcacgaaaaacatgtttttagcttggtttgaagcttctaggatggattcctatatccattttttccatatttttccatatttcgcgatttatgtccatttttccatattttgggcatgttttgtctatattttgtgtccatattttgggatttttccaaaaaacctctattagaacggcccccagcagctaaatttgcctttttgagcccaaaaaccggaaaattttacaaaaaattattttttcgctaaattttctcgagaatattga

SEQ ID NO: 50953 - DNA, 823 bp, Heterodera glycines
atgtggatcgatagctcaatggtagaactgaccacggaatgggcatacgagtgagttggattcctaaccaaggccaaacattttacttattttaagtattaaaacctaaaaacataaatatattttaatgccgaggcaattgtttgtcttttatctggtcgatgcagaatataattaattcaagcgataataatatttaatatgctcttattttcattttcaatttattattttttttgagagaaaaaaaaatgtgccacgtatttaagcttattagagaatttagagtatgcctaagctgatatgttcagaattctttgcaaacattactgtattaagtatagaaatggctaataatatttactttctttaaagtttttcttaaattcatttttcaacctcttatgtatgtctaattagttggaaaatcaaaaattaatactgcttataaatgttagaatgtacattgcaggtttattatctcttctatcataacagagaatcagattctaacttaattctttcagttgtctgtctttttcttgccaaggcattgaattaaaattgaaatttaaaacaatcccatatgttcgaatggaaggaatagtcaaagtttgaaaataagtttgttctggaactcaaccagatattcaagtgaccaattttatgtctctatgtctctaatatcttatgatttatgatctacgtgtggttcaacactcgacatgaaaatgaatattgaattgccaaggcgtgaagaaataattaaaaaaaaatatatatataaacagttgtatcagctttcgaggtataagttgttcta

SEQ ID NO: 50954 - DNA, 113 bp, Heterodera glycines
ataaaagtcaacgtagaagcctcaaatcaagtggaaaatgcgttatttatgctcaatatatcgaaactagtgcgcagaaaaaaaaaggcaattgcctcaaaatgcggtctcta

SEQ ID NO: 50955 - DNA, 882 bp, Heterodera glycines
atggccttaaatgtgacctatcttttcaacctgagcttgtactgctccaactccatgcatgaagttcaagctgtacaggtttgttgcgatcccagagaccaaatctaagaccatattcgaactcaacatacccgatttaccttgtttaattaaattcagaatttccaaaaccacttttaaaacattatgttacttggtggtcttgaaaaatgccgtttttggagaccactttcagtctcggctctccaataattcaatttttgtaattaaaattttatatttttgtgttcttatagtcctaactttgctctatttaatcactagttctctggctctgtatctcttttatttttctttaaatcagccatcaaaaatacctacctctaaaattaccatttttacttacttaactctaactccctaaatacttttccattggtattgatctcttgccagaataatggcaacatattattgataataatggcgggtattttgaatcatgattgtgttttgttgaaattaaaaaaaaaaattaataaaaaaaatttgggtatcaaaaattatgttacaccctaagtacaaacaaattaaaaatttatacaatttctaaataacttttttttatttatttaaagcctatttaaccaaaattaattaaaatttgtaaacaataaaaagatttcttacagaagatttacatctaatatactgacttaccattctattaaaaacagaaaatggaataacaaaataaggtttaaaatgtattaaagaattgaaatcaaatttttaaatattaaaataatatcctccatttacaaaatttaagatattaattttgaacctttgagaattacaaacgaataactctataataaa

SEQ ID NO: 50956 - DNA, 582 bp, Heterodera glycines
atgcttataaacaatcaactttcagaccaccaaacgacgacttttgggccggcatatggaagcgaaggagtcaaagtgaacggcacggacacaacgacgaacaaaagcaacagcaatggtagcagtttgaaaattcataatacataaaaatgaaataaatgaaattaaattcattattgggatattttgaaagaaattcaaatttaaaaaatttttaatcaaaatcaaataatttaaaattaactaaaccactgtatttgtagcataatttaccgaaaatattttacatttatttattttggaaaaagtttcaacaatttagtaacattaaaaaataaagaaagaaagaaagaaaatttattttaattcttccatctttataatttaaatttcttgacaaaaaactgaattatgctaatgaatatgtataaatttaatataattttgaaaattcgtttttccagagtggacatattacttgtacgcctttttaattttggccattggcgccatgggaatatatggactctatcggctttgcagaaggagtacgtttacttataaaaaagtgaaataaaaata

SEQ ID NO: 50957 - DNA, 190 bp, Heterodera glycines
atggctcgtagagctgaaaatggcgtgtgccatctcagccagaagaagagaagcggcaagagaggcggacgtggagcatgtggaggcggagctcgacatgcacgtgccggagacggaagagcaacgagaggaagcgaaggggcacgggccggagacgaacacggacgggaaggagatgcaccgggagaag

SEQ ID NO: 50958 - DNA, 1598 bp, Heterodera glycines
accaacaaaagtcgcattttctactaccaccaccccgacctcggcaatttccactacggtccgcagcatccgatgaaaccggcacggttgggtgcgttcgccccttttgacgtgccaactctgaccctttaaaatgttcagcggccactcacagtttggtgctcaactacgaactgcacaagcatttgacgtgtgtccatccgcccagggccacccaacatgacttggcccgcttccatgcgcccgaatatgtgcagtttttgaagcggatttcgccactgaacgcggatcagtacgagggactgtttaatcgctttaacattggcgaagattggtcggaacgcggagggagggacgggcggataacaaattgtacggcatttcagtcccgtcttcgatggcattttcgacttttgttctctgtacaccggcggaacactcggtggttgctaaaaggaatgtgtccttaatttgcttttgcgtaaacagagggcgccattcggcttaaccacggccaagcggaaattgcgattaattggagcggagggttacaccacgcgaaaaaggccgaagcatcgggcttttgttacgtcaacgacattgtaaaacacacagaaaacagatggggaaactgaaacagagaattattgaaggtgatcggcatcatcgaactcttgaagtgccatccgaggtgatttcgggatgggcacccgaagatttttttattttttgctcttccggcctaaatttttttgtcagatgttattttccgaaatttttggggcttcgtgggaaaaaaccggaaattttagccgttttcgccaaattttagccattattacgggactgaattaaaccatcggccgaattatttttttttatcgcctcaatggcctttcctattttcccctaaagagtcctttacattgacattgacattcaccacggcgacggcgtccaagaggcgttcaacctcaccgaccgggtgatgaccgtctctttccaccgctatggcagctatttcttccctggtttggcacaatttttaatgaaaaaaggtggaaagtcagtcccttgccttcgtttgccaaggcactggcgacatgtacgacgttggcatgggccatggccgctatttttcagtgaacgttccgctgagggaagggatggacgacgaaagttaccacagcggtaattgcaaattatttatcattgattactgtaatttggcattttcagtttttaagcccgtcattcaggccgtcgtggacaatttcaatccttcggtgattgttctccaatgtggcgccgattcgttgggctccgatcggctcggctgttttaacctcagctttgacggccacgggtatgtttagaatggcacaaaagagagagagagtggttgagaaaaagagaaaaagtctggccaaaccattggacaaattgactcggaatacccttccaaattcattccctcagggaatgtgtccgctttgtcaaatccctcggccttcccctccttatcctcggcgggggcggctacacattgcgcaacgtggcgaggtgaataacacaaaagacaaaagaggagcaaaata

SEQ ID NO: 50959 - DNA, 5637 bp, Heterodera glycines
atgtttgaaaagtttaaaatattacaaatagatgaggaattatgtcttagtggaaaagagaaacaattcaaagagctatgcacagaacttaaagaaaatgcatacgtcgacaattttgtaatgatgtgtgacgacgaaaaggaaataaaattcaaacattactggagcaaagaaatattcaaattagcatccatgaatttgagagaattcgtgtctaatcatgaacaaagcaacaaagagattcaaaaaatggaaggatcagagataccaaaaatgacaaaaatgttgggtataaaatggaatgtcgacacagacgaactcgaactacaaataaaaataccactaatgagtagagacacgacaaaaagacaaattttgaccatgatcgcaaaaaatttcgacccaatgggttggatatcaccagtaatactcaaatacaaactatttttccaaaaactatggagatcaaacaaagactgggacgataaattaaatgatgaagaaataagagagtggaacaatatttcaaatatagacgaagtttccataccacgctcaccatttacaagtcaaaatttaaaatgtgcttctttacaccttttttctgacgcctctgaattagcctacgccactgccgcatatttacacgcaaataataaaactgacttattattcgcgaaaacgaggcttaccccactcaaaggcctaacaatcccaaagcttgaactattgggactattaatagcagcaagagccgtcaagtttatcatcaaagaatcaaaattgaaatttgaaacgatatgtatctggtgcgattcaaaatgtgtactcagctggttaaaatgcaaaaagaatttgccaatatttgtaaaaaacagagtggaggaaataaaacgaattgtgtcagaatttcatatcactttctattacgtaaaatcagcagacaagccagctgatttggcatcaagaggtacaacaatgaatgaaatgaaatacaacgaattatggtggaagggaccaaaatggcttaaattaggaaaagaaaactggccagcccacagtttctatactcctgagcaaaatgattcactttatgatgttaacataatggaaatcgaaaacactcagacaaatttagtcaaaatggactaccaaggatttattgaatggaaaaaatacaattcatgggataaagtgacaagaatttgtcaaatcttattaaaatttgtattttttacattaaaagactctcccgaattcaaaactaaattcaaaatacagaaatttcaaaacgaattgagcttaaaattcatggcacaaaaaatgctaatacgcataattcagaaagaaatggaaccaaataatgaggaagagagacaattgggaatttacagagacaatgatgaaattttgaaatgcggaggaagattaaaaaatgctcagataaaagcgacaaacccaatattcttaccaagaacacattttggtactcatttaattattatggaccatcaccaaagaaatttacacgctggaacaatgacaacactagcagaaattcgtaaaacttattggatccccaaaggaagaagaattgttgaccaaatcagaaaacaatgtttctattgcaaaagatataacgcaaaaccatatcagcaaccaaaaatgccgcaattgccaaaatcaagagttcaaataacagagccttttcaaaacgttggccttgattacatgggtccacttcaaattaaaagttttactgaaaaatgttggataatacttttcacatgtttcaccacacgtgggatacacctcgaattagtgacatcattatcaatacaacactttctcaatgcattccgcagatttatttcaagaaaaggaacaccaaaaattatttggagtgacaatgcatcacaattaaaacttgcatcaaaagtattacctgaagtcctaaaattaaaggaaatacttaaagacgactcaattaaaaactatttcgaaaaggaaaacataaaatggattttttcaatcgaattagccccttggcaaaacggagcaatagaacggttaaatcaaaatgtaaaatcagcaatgaaaaaggcaatcggaaggaaattaatagaatttgactcatttcaaactcttatttgtgaaatcgaagccttagtaaattcacgaccaattacattcatttatgacgaaataaattcgtaccaaattcttagaccaatcgattttatactcccgcacaaaaatctatgcattcccccaattttggaagaaaatgaaactaatgacccaacatatttaccaaaaccaacttattatgaccaaacaatagagttatggaaaaagacaacaaaaattttggatgactattggaaaatttggacagaagaatatttaccaagcctgagagaaagatataaaacagaaaataaaaatccaaagaattgtgtaaaatcttttccagaaatcaatgaagttgtcataatccatgatgagaccccaagagcaatgtggaaaacaggaattattaaaaatgtcataacaggaaaagatggtatcataagaggagctaatgtcgagttaccaaacaaaaatgtcattaaccgtccattaaaattactatatccgttagagattaacaaaaatgactgtgaagagaatgagactatcacaaacttaataaaaaccactgaacacaaacaaattggtgcaaatcgaaagagaaaacaaagtgtcctatcatccccaaaattaagcaaagtatttttaaacacactcacgtttcttctattatttatgcaactcttaccatgcttatcccatttatatgaatgtccaaaaaccaatgaaatatggagaacgaagtatacaacattttgtgttgaaaatggatttactatcagacaaaataaattaacaatggaattttgttatcgtaaaatattttgtcacaaacaacacgtcataaaaaatcacccaccctattgtggaccacaatgcaaatgtcctgattggactaattcttgtagttttgcctcatatcacagaataaaaagagaaataactgatcaggaaaatattcaaaaaattatttcattcttcaaaccaaacatttgttcattcaataaaacggaaaaatgctccctaatggataaaaatatatttagttcaataatgctttatgataatagcattcattcagtcaaaagttttaatttacttcatacacaagccaattctcgaattgattatcgttgccttggggagggcaatctgacgattggtacacaaaaattctgtcaagaacacgaatgcactgacacacatggaacaaaattttgcttttacgagccacacgaaaaaacttatcttgtgaaatcagaccgagaaattatcccaataaaagcatggggaagcatcgaaagaattttttatttggctaatgacacattgatggatgaactcaaacgtaaaaaaagagaattcgatccgttcgaaaacgaacaaatatccgctgaatgtacaaaaggtggaataaaaataaacccaactcatgctaccacggaattagaaattttggttgataaatactttatcctaaagcgaagtccacagagcgaagaatttatttctctacctacaaaaattactatgaacgaatataaaccagtcattaaatttatgaaaggcacaagcgtatctgagtacaaaaacttaacatgtcctccatcaccaatctgtgaattaattatctgtcgattctgtatggaatacattcgaaacccacaatgcataggtcaaatgcattgggcactaattctgatcatgataatgctcaccctttacgttatcacccttagtcttaaaattataaaaatactataccgcttcaccatatttatttttctatcagtctacaattgctgtagaaaaagaaaattaaagaaaataaaaataattaaacggaaacaatttatttatttaatcatgattagccttttactcaattcgccgactattttttcatgtgatgaagtcactaacatggtagcaggaacaaacgactgcgcaattgatcaaaacggaaagattgaatgtatttacgatcaaacaacccaaatttcaatcacaccggaacataaaacgtgtctgaaactcgacaatgaaaagacgcacactacgatggaaacaattgaattatctgttgaaagtctaacaataatttgtgcagagagatctgaatattttatgcgagattatcaattactgtcgagctcacaaaagcgatgttcaggtgcaggaaagtgcactggccaaatatgtcaaactttaacaatgaagggaaaaaatcctgaaatcggtgaccatgccaataatcaaccaggatattcctattgtgtgccttcctgtggtggttggcactgcaaatgctttcttgccaccgatggatgtttattttatagaacatataccgaacccatcgatagaaacatatatgaagtggtcaaatgtccgacttggacgattttagctacaatcaaaatttcgcttgatccaaaaaccatacatactgtggaattaaaacctggtgtcttaacacatgttaaagactcaaatttatctctgacactcacctcaacttcaattccaccaacgccactatttggatccaaatttataattaatcgttcaaacgcaaaagctgtaatagttgataatgagaatttacttaagaatagcctacgatgcgaaactaaagaaaaggcaacaaaattcagttgcacctttccaccagaagcttgtcaatgtcacggaggtgactccgttgttcactgcgaatgtgagaaaaacccactcactgaaatgttcacgagaaaagaaaatattttgcctctcgagacacatggaagccaagtattcttcgacactttattaagggcaaaaataaaattaacaacttcactacaagtgcaagtcacgctaaaaggtcacaaagtcaaagcaatttacgacaaaaataattgtactgtaaaaacaaaatcgttagaaggatgttactcatgcaccaatggagcagaatttaaatttacatgtacaactaactttggtaccgcattggcaaatgtaaaatgccatagtcagaattttcaaataccctgtgacacaaaagggaaccaacagcaaattcagctttcctttaatcaaccgagtgtaaaagaaaaatgtgaagttatatgtccagatggaaaaagtgaaataacaatggaagccactctgaattatgtgagccaacaagacaaaataattaacccatctaataacaaaaaggaaacacccgtacttggaacttccctcgaacaaatttccgatatatttaatttcatatatacattaatcaaaacaaatctttttaattttttaactatactttttactttgattgtgatgataacatttataatttgtatatgtccaatgatttacccacttctttttaaacactttcctttccgtcgcgggaatgtcgcgactacgcgaaataggatttttaatttaaaaaataaaaacattaaaaacaaaaaacatttaaattaattttaaattaaacagctaaacattaattaa

SEQ ID NO: 50960 - DNA, 763 bp, Heterodera glycines
atgggcacaaaaatggggacggcacaaatggggggacggcacaaattgggacggcacggaaatggtcaaaatgttgggacggcacaaaatgggggaacagcacagaaatgggtcaaaatgtggggacggcacagaatgggggacggcacgaaatgggtcaaaatgtggggacggcacaaattggggaacggcacaattggggcggcaggaatcggggaaggatgggcatccggcaccgacacgtcggcgacacggcacggaattggtggtgcggggcggcggcacggaatgcaacgaacgggcggcgcacgggtcgggcatggcacaacgggcggcgcacggatcgggcacaagtcggcggcacggacaggcatggcactgaacggcggcgcacggatcggcatggcaagggcaagcagcgcagttgtcggctgttgtcggcacggcgagctgagaaaaggagggagggaaggggagggagggaggagacgaggcaatgcgtctcagacaccctttggttactgattagtgggaggttagggccctccttttataccggcaattcctgcttgaatgcttgtttgccaacttggcagcatttgccaattttactaacctttctcattttccagtttgtgccactttagccttttctaattttctaacattttactatttctttaatatcattcacaatttgtcccattttaacatttgtttaaaatctgttatttcttttaacgttcaaattattcataattaa

SEQ ID NO: 50961 - DNA, 422 bp, Heterodera glycines
atgcctttgaattatacaagcataaagaagcaactaatagagggtaagaatgggatataccccataaacataatcaacatgattataaaaatatgtaaataaaatttataaagaaaaatcataaagcgtccataataaaaaggcatatgcttttacatatgtaataaacaaagcatagcaagaaatttcaaatatttaaggaatttgagaatcaatttctacacgtgaacagctcaattgataaaatataaaaattaaaaagataatttgtaatattttattaatccaaatcaacaaaaaataaaacaaattgcagaaaactaatgttttaaaatgagtgtagtcaggatttctttcgcaaatgaccaaaaattgatttattaagtttgggtgtcctcagcgctcattaaataaggtgtcaa

SEQ ID NO: 50962 - DNA, 1133 bp, Heterodera glycines
atgtcagattgtatctgggaaatttacaccatttttgataaaattaattccgagtctgaaaaagttgaggtaatgtggagtgaggtcgatcggtccaaagatttcgatcaggtcaccaaactagaggaaaaggtacttaagggattgagtgaaacgagaaaactacatttagaatctcgccgggttcacaccaaaatgttggagttggaaaacagaattcaatctgtagtgtgggattttattgggcttcacgaataaaagagaatttgagtaccaaaaagaataaaaattaaatcagaaaatgacaaccatcgaccaagaaatacagttcatcaaaaatgaaattgttacaaggtggaaaaaagaaagaaaaattattatggaggcagatcgtttagtgtcatattgtaataatatttctttctatgcgaaaacatatatgatcatcgcatttagtgctccaggaatacatcaactatatgaaaaaatattagagatagcgcaaaatattaggctactatatctacaaatttcaaaggaatataaaaatatttcgaaaattctgggtgagtttgagaattgtttaaaatataaaaatataaaaaaatgtcaggaaaatgagaactcttcaaaacatagcatggcaacctgttataaataccggaagcagatgagaaaatttcgtatagaaattgatgatttattcgaaaatattgtatcattagctataaattacttaaatccgccagaagaatctatcaaagacaaaaatgataataatcgtaatgaaatattttttacgccataccgtaggaaccgaattatacatggacaacaattatctgaaatttttatagtccctataggaggaactgaatcataaaaaaatatttagatttttctaaatgttttttttttttgctctggtcggtaaattcacatccgactaataatatatctgatcacttgttacatgctttcatcaattttttttttgctttcatttgaatatgggttgagtgcgcgagggagggggggggggggcaaaaaaaaggtcaagaaagtgatccctatactacttgtgtctctatttataaatattaatttcgatgtattttaagtttattaataaa

SEQ ID NO: 50963 - DNA, 867 bp, Heterodera glycines
atgaactgtgacgcccaggtgaaggcgtacaaatttgtcgcttattccgcgctgaccttctcgctggccgccgtgctgtccgtgttcatcatgatgccgttgatgtacaactttgtcagccacgtgcgacgtcagctcagccaggacatggtgttgtgtcaggtgggggacacagaaagtcaatattatttatttgattaacgtaacaaattttaaaaaataaaaagaaattatataaagcaataaaatattgaaaaagaatttagtagtatttacaaaatagaaataattaatttaatgaattataattaatttattaagggttcgtcctctgacctttggcgtgaggtcgaagtgttgaaaaatgcgccgttcattgctcacaatggcagcacttcatcgtcgttcaacactgctcgaacagctcgacaagcgtacggaggcggcgccgaagttggcgcaggcccagcgcacggagctggcgcacccgcggcgggcgctggacgcgcagcggcgcccggcttttgtaaaccatgttgcgtgcctggaccgcctggtccccaggggcgcccaggacggcacggaaagccgggcaagccgggcgcgcccggtgtgcctggcgccgccggcactggcccagcaatttgtaagcttttccatttgaattaaatacctcaaaattaatgcataaatttttggaaaattatggactaaagccctcaaaaaaaataaaaattaattcttttagtaaaaaatacttattatctcatttcttaggcgaggccactccaccgccgtgcccacgctgtccccaaggcccacccggaccacccggcgaattgggtccgcctggcgaggttggagccg

SEQ ID NO: 50964 - DNA, 678 bp, Heterodera glycines
ttccatggacaattgttacgtcttccactatcagcaaacaaaactcgtgaagaacttgtgcctgagtcaattcgtaggctctgtctgaaaattatactcgaaagagaggaaaataaattgccgtcggatgaggacattaacgtaatatgaattttttaatgagtcaataaatttaataatatttaatttaataggactttgtcgagtgtttagaagcctccaaagatgtgactcttcaagaaactgaaggaaaaactgtgaagacaatttctttcggcggactaatggcgagaatttcacattatatgcaaattccaacattttttttttgttttagtctgtgctgcgtaccgtcggaaaatcactcacaaatattctctcgcctgtcacttttttcactgcacattttcccgattggcatttacattccgaggattttcgcattcaaattgaaaccatcgtggagtatttatcgctcaaaattgtgtttatacgataccgtatcaaaatggcacagtacgacccgaattcgacaggatgtttgagcagggaggtgagtcaattaacaaaatgcaacgaatagtaacaatatatggaacataaatcataatttagcaactttgtgactattatctgcacgaagtgatgccacgggtcgacgttttgaaggatttggag

SEQ ID NO: 50965 - DNA, 225 bp, Heterodera glycines
ttttaaaatttcgaaaattttgaaaatttttcgagctaggcctaaaaaacggttttcgggtttttgaattttaggattttttaacgatttttcccagagaaacggagaccacttccaaaacatagtttttcgagctctatcgactggtatttttttcggaaaaatttcgattttttcccggaaatagaaaaaatttttggcctgagcgggacatttgagtcccgg

SEQ ID NO: 50966 - DNA, 609 bp, Heterodera glycines
aagaggaggaagaggaggacgaaagcgggcaggcgcaagacgacgaagagcagggagacactggcgaagagaccgaggcggaagaaagtggtgaggagaccgagaacgacgaggagggagaaagtcgcgaagagaaacaggaggaaaacagtggggacgacaaagaggaggaagaggaggcagaaagtcggcaggaggaagaggaggaagaaagtggggagaagaaagaggagaaagaggaggaagaaagtggggaggagaaagaggaggaagaggaggaagaaagtggggaggagaaagaggaggaagaggagggataaagtggggaagagacagaggaggaagaaagtggggaggagaaagaggaggaagaggagggagaaagtggggaagagacagaggaggaagaaagtggggaggagaaagagaaggaagaggagggagaaagtggggaagagaaagaggaggaagaaagtggggaggagaaagaggaggaagaggaggaagaaagtggggaggagaaagaggaggaagaggaggaagaaagtggggaggagaaagaggaggaagaaggtggggaggagaaagagaaggaagaggagggagaaa

SEQ ID NO: 50967 - DNA, 1112 bp, Heterodera glycines
tgtccgacgacttggaaaaagcattacgccaaattggccgtgacgacattgtgctgcatcgcatgtacggcttggacatcacgggcgccaccgcggcggacattgacgacgcatggcgtaccagtgcgagtcgtggcggcacgcccatcgtttctgcagcgtcactgcgtcgtgaccattccagcaagggcagtctggcggctgccactgggggacttgcgttcgccgctgcaccaaccgctgcagtcgcgctgtcgcaagcgctcagtgcaacacgtgagttttatatttttaaaattatttatttgggtatctaaaaaagtataaatgtttaaaaatcatatgaaaattattaattatttttaatcgatttttttatgttaaattttaattgaaaatcgtcgtaattcaaatttagcgccatcaagcaccgctggcatttcgccaaccccctcatcggttgcagcggaacaacagcaacagcccatgcagcaggaggagggcaacgtggaaacggttgtcacgcgcactgaacgctttgtgcaccatgcacagaatggggaggcgccaattgtggacgaacgcgtgacggaacacttctatcgggacggggaagaggtgagtgagaggaatttattattgaaatataattttttaaaaaattttaatgaattggaaaaattgagattcagcggttcattaggcgccccggcagggagtaaataattttggtatattaagtcaatttttttaagaaaattaggtaaaataaaaaataataatacccattttcttggattttttttaataatttaaaatatttttagtttttaaaaagcaaacattatgataaaattgattcattaaaggattgattgattgcctctgagaataattaatatattaattaccatgggatggcttttttgttgcgaaatgttggtaatttttctgatggaaaggtaaatttttttttaatttttatcagtttattatcataaattagaaaagggctctgacctttaggggtgagaaaaggagcaattaaagaaaaatcaacagaaaaaggaaaatatcaatgaatgacaccaaaattgaagaaaaaaaataaa

SEQ ID NO: 50968 - DNA, 902 bp, Heterodera glycines
atggccaacattagcatcaaaacgctgctgctgcaacggccgggcaatggcggtggcggcgccaatcagtgggaaattgacgccacatgcacggcactttacggcggggtaaaacaatgcctatagggttcacggcacgagagcggggaagggggtggggaagggtaccaagtatagtccccaccatccggaaaatttttaggggaagacgtgaatttttgttgagtatttggggttttcgtattggaatcatccgccccccccccccgagaggagttggtcaagactgacactcggcactcctcccttttcggagcctcatcaacggattttctataattttttattcaaaatataatttcgccattgaattttttgaatttttatagcaaaaaaataaaatggaagaataaatttaaaaaattgaaaataaattaaccggtctggatactgtatggaattacagtaccccggcaaggatttgtgtgtgttggccaaaaaattggcctatctgtcggtgctgaaccgtgccgtgtccatcccggcgcgcccggacgggtgttggccgttggggcaagaccggaacaaagcagtgcgcagatgcatcgcggagatgcggcggagatacgacgcggaaacggtcaaaatggcggatttcattttggatgagagggcgaaacggcactttatggacgaatttgcatttgaacggcaggccgaagagatgaagagggccatcgaaatagaggaagatgaatgggagggagatgaagcggacaaaatgaccaaatgggtgagcgaaagatgaagcggacaaagtgacgaaaaatgcagtcaatgtatagggggacgacttggaaatgtaactaattggcaaaatcacttttgtatagtaaaataaa

SEQ ID NO: 50969 - DNA, 841 bp, Heterodera glycines
atgaaattttcttcaaaaaattctgataattccgcgggccgtgactttgatcagaaattgagcaatgccgatttgctgccagtcgagaagcagacttggaatgcttacaatattacggcactttggatgtccggtgggcattcattcattcaaaaataataaataaatttttgtttcaattttgtaattaagtgatccacagtgttgccggttatctgacagccggcactttgttttcgctcagattggccagctggcaggtaagcaaaatttaacaaattatattgccatttttttaaaattactattgaaattataaaaatttttaatcttttgcttacgctcatttcggcagttgtttttaatgtttatttcttaaaaaatttatcttagctaagaattttccacttaattgattcctttggcttttctaaaatttttattgatttgcttaattaattatgctaattaggctgtcccgtagtcccttctcaggtgtttgtcgtgttaattttgtctgttctgatcactctctttttgtgcaatctcagctcaaagccaagtcaggtgctgccaaatttccatcgctggcacatttaatttttttaaatgatgatttttttttaatttttaactttttaattgcccatcctccaaaaggtgcataaaattccttttcccgtgctttgtcgtgccattttcggcatccatggtgcccatataccatccctcgttcggatgctcatttgcgtcgcttattttggcatacaaacatttctcggctcgaaggctttcaacgtggcacttcttaaattgtggccaaatgtggcgtattaaatga

SEQ ID NO: 50970 - DNA, 162 bp, Heterodera glycines
atgcgggatttaaaaaatttgaattttcgactttttatccgaattcgggtgcaagatacgttaccagcggtaatattacctacgactcttttatttgcattttttcaagattatatacaatacaattgtgaaaatttccaggcagttttcgtgggtcgctga

SEQ ID NO: 50971 - DNA, 1213 bp, Heterodera glycines
atgaagagacgcgctgctactcttactgatgctactgctgagcaacatcccgagcccaaaccacaggaagagaccctcaaaaatgtcgagccgaaggatgagtcggtaaccaagaaacgcaaagtggaggaccgagagttgtggaagttggcaaagggcaaatttttgctgacgacctatttgtgtccgggtaataaacaataaaaaattattacatttttaattaattaattttgagatgattggaatcgactgttcaacaatcagcagaaggtgaaacgtgtggagggcgatcgtgtttgcttcagctttgatctgtgtgaggagtgcgcattggccaattgccgcgcaacggacctgctggctccgatgaaaaaaagacccaaaaatgacttttgaatttccttttgatttgcatttttgtccctaattcatttgaattgttcatatttgggattatgcaataataatgaattttttcggcagtggccgcatttgaatctgtcacagtgttaattaatggtcaataggcatgcgaaccgagcgcaggggggggggaggggggaggggatggcatttcctttattccccatcgatcccattgaatttccaacaaaaatggcaccaaaccaacgcaagggacaaaacccgtcactgttcggcaccgcaagtggccaacaataatttaaatcattttttaaaaaatggggtttcaaggatgccatgagtgtcacggggaccggtgcatgccatgtgccaaattgcgaaagcggaaccaagaacgagcaaggatggggctgtgtcatgggcgcatgatgcttgaatttgggccaatgagcagagaacagcagctcaatgcaacggcagcgcgcaacccaatggaagccgcacttcaagccggcagcgaaacgaaggccgtgtttcgttggggggacccgttggcacctgtccatttccccgacactttgttgtacccgaatataggggggatgtgtttgtgtattgtaggggtggcgcaattctttggggcctgtggacacgtaggactatgtcgacaatgtttacttatgcatttaaaaatttcacccaaccctgaaaaatgtccctactgtagagtgagcaccacattttacatgctgcactaaaagcaattttcatttgctgtgtacgtgtggtgctgctcactctacagtatcccccctcccacaataaa

SEQ ID NO: 50972 - DNA, 561 bp, Heterodera glycines
atgcccaaccgaaacaacatcaacggccagcagcaccatcatctgtcctccgcctccaccaacgacaactcacagcattttactgctgttcatcactgttttgattttgttcgtgtttttcgcgcaggtccccccccccctcccgtctaatcattaattcttttttttaatcctttccaaagttacaggctttcaaaatggcaattgttgcacggcgtctgctcaaaaaccgagccattcaaaaacagttggagcgccgccaaaaaagtcagttgaattttgggcaaaaataaataaataaatttttttttttgaagacatgaaaacgcttcgtcgtcagcaggcggcagcagctggtcagtcgtccattgttgtgcgctcggtgagcaccggtttgccaaggaaccaaccgattcatcaggtaaaaagttttttgcacattaccgaaaaacgccaaaatttcagcgccagcaagtctgcaccgtgccctcccatgaggtcatctacgacgtcccatgcaccggagaggaccagcaagaaggatcggaggacagcttttga

SEQ ID NO: 50973 - DNA, 347 bp, Heterodera glycines
atgcccgatgaacgtgttctacacctcgagtgttttgaaagcggcgattatgatgttagtaactgtgatgaattctatatttaaatattttttcctcaattttaatccatttcagattatggaactgtacgggccggaccgtgctaaagagatgctggtcgacctgcgcgactatgccgaggcgcacggaatgccatgtcaacatgtgaagatgctgctctacaaactggacaaggggctgatcaaatggaaggggacaaagccctgagaatgaatgaatgatgtgtgatgatcattgtgttggggagcgggaaaaattggtgatggtgtttattttaaaaatggaa

SEQ ID NO: 50974 - DNA, 1107 bp, Heterodera glycines
atggcgccagaggaaatcccgctcgccgaggagaccaaactcgccaagggcgtacgaactgaccggcaattgctacagagaagcatcgaccgcgtcaatggcatgctacgagaatgttttgaccatattcagctgctaggcgacccgtttctgaagcaggcggaggaggacctcctggccgcactcccgaccttcgacgatgagcaagccgacccaaatgtcgaagaatggccagtcatcactcttctctctaaagcccagctcatcctcgacggcctccaagtctacatcgaggctcgattcgacacgacggacgccatctcttctcgcagcagcagtcgtgtttctgatcacggggctgacgacgaaaaccggatccaccgccaacggcaatccaccgacccaccgactcaggcacagccagtgaatgcacatcagccgtccaattcggctagagccgatcaaaccctattcaaccagcgaaccccggcattcccgcttaacctcacatttccccgagcatcgaatcgccccacccatcgatcggaacctcaccatggtcacttccgacagtcgaccaatgacgacgacgcactccgggtcagccgaatcgaaatcccgaggttcagcggatcggcagaagaatgggtcacattttgggccgccttcgactttgccgtccactcgcgccaataccccgccttccaaaagcacctcctcctcctacagtacctcgagaagggatcgccaccccgacggatgattgaaggttacccaccgtcagacgccaattacagcacagtcgtgagcattctacgagaccgctacggcgacgtcggcaaccgacgggaccaactcaatgcccagcttctccacctcaaacctgcccggaacaacctcaaggagttgcgccaactccagcaagagatcgagcggatctgcacccaactttgcagcctcgagcccgagggggagctctcgccaatcgccaacagctcgctggtcaccaatctcatcaaaagcaaacttccaccaccggtactgcttgaactgatccgaatggagcgtgagagctacacttcctggacggctcagaaattggcgtga

SEQ ID NO: 50975 - DNA, 79 bp, Heterodera glycines
atggaagggaaggaggagattcgagactcgctcaaaagagcggcgacgcagattggcgatggagaaggcgagagaaagg

SEQ ID NO: 50976 - DNA, 1572 bp, Heterodera glycines
atggacgagcaggagatacacaaccaattgcttaatgtgaatgaacaattgagggagctgaatgcagaagacgagcgccgtctattggatgaaagtaatcgaaatcggggtgcaaatagggacgaaaatttgttaaacccgggtcttattcaacaaaatcaaatagccggaaatgtgacaccacgcgaaaatgataattttcttacgtcaactccaaatatcagtccaattcaccacgcgcaacgacagttgaattttgagggtaatcgtagaaattgggaaagaccccgagacgcacgcggtcgctttatacgcttagaagataataaccaccaagaagcagaaaatgcgcgaaattttaatgcgaacgcccaaaatctccggcaaaaccacccaattttggtgaataacccgaaccaatttgcaaatttccaggttggtggcattccaatccaacaaaatgcaaacaatcagcaacagtttgggataaatggaatgcttccaccgccatttttctggcctcaatttccaatgcaaaatttgcaacagccaatgcaattttacggcgctcaaaatttgggtccacagctaccagctcaaaatttttcaacgttttttaacaaccaaatgcctgtaatgtttccaccccaaaatgtgcagtacccaaacactgcaataaacccagcgcgtcaaatggtgaatcagcaagcagtaaatcagcgagaagaaggacaaaatagacagcaacaaatttttccacaacagacaagtctaagtggcctcgaatatgcaatgattttagaccggcttccggatataaggggaaatgagggcggcgattcgatccgtaatttctttaagaagtactcacagtacacagccgattggcccaacaaaaagcgaatcgaatcgctagaggcaaaactaagcggtcgtgccgaaagagcttataatgccgctttggccaatgaaccatttgtctacgaaaatgttaaaagaaacattttgcaacaattagaggacactgattgcagagaaatgagcgcgtttaatgacttgatgaatggggtcacacgaaagcatggcgaaaacttagacgatttggccgacagaatttcgagcctagtgcgtcgtgcttatccagggctaacacgaaacctggccgatgagtattccataaaacaccttatccgaagtttgaacaatccagatctagcattgaatttggagctccatcgccgtaacgtaatgtcttttgatgaatttgtagctttagcttctcgtgcagaagcaacacaaatggctgcaaaaaggcaaagttcggaacaccgaccaaaccaggaacgaaaatatatgcacccgaacaaccgtgaagttgaaacaagttccaaaaatcagttaagaccctatcaagttgtttgttacacttgtaacgaacctggtcatgtttcacggaattgcaataagacaatgtcccgccaaaaccgaacgaattcccatcgtcttttcctcagcagaatcaacagcaaaccccaaatactgttgccactggggcaaaccgagttttcctaa

SEQ ID NO: 50977 - DNA, 1262 bp, Heterodera glycines
  unsure (1)..(1262): unsure at all n locations
atnctgaaaggagctaaacatgctgaccacactaaacacgttgatgatgatgaggaggaggaggaggaggagtagagctctagcatttttatgtgctaaaaacttgaattttactcaagtttattcataaaaaaattctgaaatttggcagagtgttaggtaggactcatgccaaagtattttcggctcatttgcactttatgaatcgaatcgacttttatgagtccaaagcagggacgggcgaaacttcgaaaacttcgggttttttgggcttcgaacttcgtgcttcgaaaaaaaattgtgcttcggcttcgagtgctaattgtaagacgagcttcgcccatccctggtccaatattttatgagtccaatcaattgacaatcccgggtttttatacaataactttgttcattcatgttcgaacaaaccctatctttttggtatcattcgaatgcaaaaagtctaaagaagcgaaaatatataaaattctcagcgtttaggcaattgccaaaaaagatttgattaattaattaattgctgattattttcgttcgtaagtttttttttttaatgttagaattctctggttttttctcgtattattacattattcagactttgtgctttcgaatgataccaaaaatattttgggtttgttcgatcatgaacaaagttattgtatgaaaaccaggtattatcaattgattagactcataaaatatctttggactcataaaagtcgattagacctagagccggtattttcatgcaaaagttcaaactcttctgaaaacaatgagctaagttaaaaaataccgcttgacgatttgtgcaagtttttagtaactaaaattcctagctcttatgatgagtgatcactgatcagtgcacagatcataaccaaatcatatgttgttgactattttttgagcatttgcactgatgatgatgatgatgatttttgatgattttttatttgataaaaaattgttattaacaacaatttgcttattaatgaatcaatgttgcaagattttttgccattaaacaaattgaatttttttttaaatatttttaaatttattttaaatttgtagcttttttcatttgaaggtgttggtagaatcaatttatgctcaaatattttaagattgcttttctcctggtccgctaaatttttattaatgacacttaaaataatatgcgattgctttacttaatttgacaaaaaaaaaacttataaattcgtatttagaataaa

SEQ ID NO: 50978 - DNA, 54 bp, Heterodera glycines
atggcaacatccggttttggagactaccatccggacacagacagttggatggag

SEQ ID NO: 50979 - DNA, 346 bp, Heterodera glycines
atgttattttctgcttttgccaacttgggccgtacattgactgaatattgttgtgttttatggccaaagttattgaaatggttgcgcaaaattttgaaaaaggaagaggtgaaataatcataaaattaattttagaataaatttataaattattattttttgattattcaattctaacgaaatttaataattaattatatataactaatttttgtagaatattttattctccaacaaatacccaaagtaattcttaaagagatttaacaattttaaaaattgtttttttaaattaacataatcataaaaagatttaataattatataatttttaaaattaaataaa

SEQ ID NO: 50980 - DNA, 388 bp, Heterodera glycines
atggaccaaaaagcagaaagttttgttcacatgaaagaaattgaggacaccacgatttgggtattattatataaaaattaaaaataaaaatattcaattttatttaaagtttttgatcaatcttttggcacatattgctctgattgcctctgtgatctgttggcttctgactggatcgcttgtttttcgccttattgactccgaaattggtgcaaaatcgtttccccgttctgttatttggtgttttcagctcttaacaaccatgtaaaatttaaaattaaatgtttaaaaaaatataaatttattttttttattaaactttatttaattaattttttttcatgtaaagaattaaaatataatcattaatctgtttaattgaaataaa

SEQ ID NO: 50981 - DNA, 1487 bp, Heterodera glycines
ttttccaaaattgtgccaacaaatttatttaatgctaattaagttcgtcttttttgcgttggaatcattgggcactttggcaattgttggcaactgttgccttgttgttgtgctgatgaggaacagataccttcagagggcgaggtggaacatttaaaaaaatatatatataaaaaataatttagtatattttatttttgaaaattgaaattcatttcatttcacatttaaattgctactaaataaatgaaaaaacaaaattatttttcaatttttctatattttaaatatattttttctgttaaatttaattatattattttaattttattaaatatttttaggtttagttatttattaaattttttttaaattttaatataaattttcatctcattctttgcttttaaattttatgatttaatatgttttgaattattctcaaattttcatatatttttttaacatttaaaattttaatgcaaaacaaatttgtaaaaaaacgatttttttttttacttaaaaatttcctaatctaattactttgaattaaatgtttttaaatcatttttccccaattattttttttttgttgttgattcagttttgttctgatgcttagcctggcgttggctgacattttgcatggcattgtcaccaccacatttttctatcctccaattttgctccgtcgtgttgtcatcccagcgattggtgtccgaatttttaatgtaatcgattggacggcatggtaataattaggcactaattagacaaattatttctttttttaattgttttttaggagcatcactctaacacatgtgagcatatatataataattgcataatgtttttttgaacaaaatttttttttatattaataaaaataaatacacatattaaatattgacaatacttaaaaaataatttaattaaaaaagtttttttctctaataaaaataatttcttttttttaatttaaaattcttattcaaatatttgttttaataaaattgtatataattaatcattattaaaattatatctaattctgttattttctgatacaaaattgcgattttatttattttttaaatgtattttttttaaagttggataaaatatttttttataattttatatttaaattaaattttataaattttgttgaaattcaaaacagatgtccgccatttgtttggatcgtcttcttgccataacgtgaggatttgcaattaactgaatgatgcttaacctaataataaatttgctttgtaaatttgttaccaaattattcttattttgtcaggttgtacggtcagtacagtcaattgattacggtacgacgcgcaaaactattcaccatattttgttgggccacattttcgacattgaataccgtatatatattggcccgtttctgttgcctgatcagtccgctggccgagtcccatttttacacctttggctacggcgaatttgag

SEQ ID NO: 50982 - DNA, 1709 bp, Heterodera glycines
atgacactaggcattagtatcaacaaaaatttggtctcaaattcgaccaatccgccgacctacggtgatttattgcagtcagcagaattcgctaatggcactgttggtactgctgacccaaaccatgatgacgcagttttgttcatttacaaacaggtaggaggagcatcggtcgttaaattcgcctattaacaaattaccctaaatgacttaaaaccctaaattaaatcaatttaacttataagtaatgctacatgtattattgctaccgtatatcaaattccattcaaaaagattgtggacaaatacagttggcaatggcttgaacagttcgcgcaacgaaaccagctgatcacttgcggcggtgtgcagttgcaacaggcgctcgagaacggcactctgaaggcgatcattggcggctttggctcatacccaaacaacgcgggggcggccaccgaatatgtcatccccgcggacaacgacccgttcaccgcgtacgccatttacggcgcaattctgaaggacgcaaagcacccggaggccgccaagctgttcatgagttggcaattggacatcgatggtccggtgggtagaaacgaatctgcctttgcaccagggatgcttactacccccgaaccccgtataattttcttgtctcgaatctcgaccaaaaaattgtggccatcacggtttgaatcccatcagtttttgtccctcccaaatttttctcatcccgagtcccgactcgtaagtttttagtcgttccgacccgaattccgactttttctcgttcctgcacatccctgctttgctcgggctggcattggccataccccgccttagccgggaaattatcattttccgaattaatccgttaatgaatgatcggacagtaaaaattttggcaaaaaaccacgttgtttaaatgtccatgctttttttgtccattaatatcataattttttttattttcacatttgtttttgcagaacgctgtccagacttggccagtgcggacggatgtgacgccgaaggacaaccggcgccaaatttgggagtacccaaacacgagccatcagaaatttttagaatttatgtccaatgttgaagagcgtcagcgctttggccgacaagtggccctgttcttggatgacaccaaatgcaacttcgcttcatttgtgcccggtgtccggcctcttcagtgagcaaacaaatcgggcggagaatggcgcggacagaaaaatggggaaaaaccaattggggaaatatattttcaattttttaaatacctatcttaattgaaattgtgcagaaaattgaattttcgattcattgttatatgtaatggttaaaatagcattcatttttggcagaatgtgctttttttctgcgggtattagtgtcttgatcaatgccggtgccgaaagagtagcgagtattagtgattagtgacgctacggaatccgacttccggtttcggatatttttagggtcggaattccgatttccccgaacaattcccatttcggaaatttttgataaaaaaagtcagaaaattttaaaacctttaaaaaaaattttttaccatttcaaaatcagggacatcaactgaaaattttcaaaatcagtattggcctaaaaaataatcattaggggtcaaaagccagcatttagaaaaattttatttcaaatgaaaaaaaaccaataaa

SEQ ID NO: 50983 - DNA, 3263 bp, Heterodera glycines
atgtctcgcttttgccccctcgcccaaatcaaggaatcgggtcggcttaacacaccaaagggaaaatttagtgagttccaaacctatcaaattaaaaaagaattttgatattcgttttaggtcttttttatgctttggaaattgctcgaagctaccagctcatagggaaaagtataacggaaaacaaattccgttatctgatgaagacggagaagaaacaaagggaaatggccatggaattgatggaaaatgcagggataagaaactttggtacccaacaccttgaggctgtacaaaaatactgggacagggaattcccggatatgtttcgcattgtggcttttgaaatggtaacaaaattcgcttgaaaaatataaagttacatatttttagaagaccgggcttaggccaattttcaagggagagggtgttcgtaaaaatgaagtgggtgtgataagagaaggagaccattgggatgggatcaaatcggcttcttggttttttggtgttcgatacttctgtgtcagctgtgaagtgacgtacgatcgacctgaaagacacagaatggagtgtaaggaacgctgcaagaaatgttgccggatgggattcgggttcccatgtgcggatgacagcccggaaattaactgtgacgagtgccatcgagacttctataacatccaatgctttgaagaacacaagaaattggcttgcaaagagtataaaaaatgtgaaaactgtggggagacacacaacactcggaacaaacacacgtgtggggaaaaattttgcaaactctgcaaagtttgccacccagggcggcaatgtttcatcaaaaaaattcaagtgcgaccgcagaaaacctacagaattgtggcatacgatctggagacgacagtagatgggggagaacaccggcctaatcttgttagtgctgcacgtacttgtaacatttgtgcgggagaagagcgtgaatgtgagatttgcgaaggccccagtaaaatcacatggtcagtagcggatggttttgagccaatgagcgagtttatcgtttggataatgggttttcaacgatttgaaacgattgctttcgcgcattatgctgggaggttcgattcacactttgtcttgtccgagctaacgaagaaggaaattgcgacggagttgatgatggctgatttgaaaatttatcaaataaaggcgggaagagtgtactttcgggatttttggatgcttagtcagaataaattggcggaccttccaaaaaccttggggttaaaaactgcagctaaattgtattttccacacaaatacaataagaatgagaattttgggaagagattacccaacctgccttctttgggagactactgcccggacaatatgaaggaggaagaagccgtaaaattggaagcatggcacaatgagaattttcaaacggaatttgaactaggtagggaaaatagcatttttttctttgaaaataaaatttaaggggaacaactcaagacgtattgcgaaaacgatgttgaaattttgatggaatcaattttgaagtttcggcagttatttttggggataacaggagatttggatgtgatgaaggacagcgtgacaatcgctggtgttgtgatgaagatattcagggcaaaatttttgaaggacaggcatattccgatcatgcctgagggggggtacgagaaagctgagaatcagagcaaaatcgcagtgaaatatttcgaatggttggcccaaaaaaagggagtaaaagtgcggcatgcgtgtaacggaggagaagtggaatttggggggctgaaggtggactgtgtgattggggcagagaaaaaaataattgagtttcaggtaaaagaaaaaatattttctttttaagcaatacttaaggggtgtgcatttcacgggtgtccaagatgttttttgccttggacgatagcgccaaatggaaggacgatggaagagaatcaaagtagaaccgaaatacgcatggaaattttgagggaaaagtgcaaaaatttttcaatcggagaagtttgggtagaataaaacatttagaaatatttattaattgttagttttaggagtgtgatgtcagagaggaattgaagaaaaataaggagatgaaaaagttctttgaaagtgtgccagacaagggaccaatcaatccgagggatgcttatgccggggggagaacgatgcccttttgtttgtacgcaaaggctacggaagaagttgagatatcaatgtttgacatcattagtttgtatccctttgtcaattatggtaaaaatctacttacttttttataattttttccgcgcttaaggcactccataccccgttggggtcccaaaaattgtagtgagcagggattttaatgtgaattggacaacacccgacgacgtaccctatgatggacttttgaaagtgaaggtcgtccccccgaaaaatctgttatatcccctcctccccgtgcacatcgatgaaatgctcctcttccctaattgttggtcttgtgcgagaagggccaagaatgaatttgtgatgacaaaagatgtgaaaaaatgtaaccatcgtcccccgcagagagcatttttggggacattcacatcaattgagttgcggaaggctttagagctaggatatagaattgtgggattctatcgagcgtatcattttgaacagtttgacagtcaactgttcaaaggatatgtgcggatgtttttgaagataaaggtggaagcgtcggggtggccggcggaggtgaaaagtgaagatgaaaaaagagcattcatcgaaatgtataaggcaaaatatgacatcaatttggcgtacgataaaattggactcaatcccggactaagaatgattgcaaaattggtgagaaattataaaaaatctctaaaaattgttcgaatttaagggattaaacagtttatggggcaaattttcgatgcgcaataccctttcaaatacggaaattgtgggcagcatggaacgttggatggaattggggagagacaatacaattgagtttgggcgcccagtaaaaataagcgaagagatatcaagagtcgtgtaccggaaaaaggaggagttcatcagggagcataaagtgtcgaatattgttttgtcattgtggaccacgagtgctgcgaggctaaagctgtacgagtacatggagcaggtctacaagaaggaggggtgtaaactgctctattgtgacacaggtgaaaaggaataaaaagaaa

SEQ ID NO: 50984 - DNA, 612 bp, Heterodera glycines
atgtactcgtttcaaaaatattttgaggaggctctcgaaaaagaagattttttctggcagaaaaacagagcagaagtggaggcattgttaattgaggcttcaaattataaaattataatacacagggactacgaaagccgctattctgattatattgccacctatcaccgcaccccactcttctgtttctgcatgattgagagaaatttaagatttttttacgacacaggaaccgggacgcctataggaagggttacaactgtgctacatgttaccgttgaggcgagctatacaggagagggattcatttcgcctatgttttccttttggttttattgggagggcaggagtcaaacaacaaacgaatctttcacgagccgtctttatttgtacactgtttcgatgctaagagcaatgggcaaagcctgggcagagaactacttttgaaccctgttgaagttttaattgatatgttctaccaacgtatagataggttggaacatagaaaaaacaatttaaaaatatattttagagatttggtcggatcgtggtcattgttctatagactcccaccctcactttttgacacttcccgccgggtggttgcggaga

SEQ ID NO: 50985 - DNA, 688 bp, Heterodera glycines
atgcaaacaatcgctgaaattaaaaatttcgagattgttgatggtggaagaatttttgttgtgagagcgagaattgagaatgtgatggaggcggagtacagggtttgtaataaaaatgaaaaaaatatatcagtttgtttaggcatgcactttatgccgtaaaggggcttgttcttgcggggctgagaaaaagatgacatcttatttgaaggtgtctgtggcagatgatacagggcttttggaaaatgtgggatttttcggtgtgcgtgggaaacagaatgggatggtaacgcaacgcttttttaaaaatccatatacatttaaatttaggatgaggtcaaaagtttggcgggcgccgtgtgcaccatgaaaatcggcgcgagggtgaaagaattcggagggaagagggggatctattactctttgattgatattgtcagcctttaaatctataaataaacttgttaattttttcaaataaaaatgttttacttaaaattatttctagtttggttcttgttggtcggaacggaaagttgttgcctttcaaaagaagaaaaagagcaatttaccagtgcccgaagaactgtagaaggcgtatttagagacataattaggttagataacgaagcaaaagaattttctttttctgcacataataccatggttgaagcccaaaatataaaaa

SEQ ID NO: 50986 - DNA, 873 bp, Heterodera glycines
agagagggaaaggatgaaaatagcattggggaaggaggagagacggaagagaaagagaggaaaaggaaaaattcgaagcaagaaggaggggagaaagaggaggaaaaggatgaaaatagcattggggaaggaggagagacggaagagaaagagaggaaaaggaaaaattcgaagcaagaaggaggggagaaagaggaggaaaaggatgaaaatagcattggggaaggagaagagacggaagagaaagagaggaaaaggaaaaattcgaagcaagaaggaggggagaaagaggaggaaaaggatgaaaatagcattggggaaggaggagagacggaagagaaagagaggaaaaggaaaaattcgaagcaagaaggagggggagaaagaggaggaaaaggatgaaaatagcattggggaaggagaagagacggaagagaaagagaggaaaaggatgaaaatagcattggggaaggaggagaaagagagagagagagagagaaaaaggaaaaattcgaagcaagatttttgccatttttatacgtccgaattatttaccaatttagacattattcatcaaaaaaggcatttgatcactgatgattatgactagggatcggattcttagttttttaactattttttctgcggctttaactcgacgaaaaatgcacgaaaaacacatttctttttcgaaaatttttcatttttagtgccactattcatcactaggaatcactattttggagcttcgccactaaaaaaaaactatttcggaagttagccactaaaataattttttgccactattttggcgtttcgtcattatttttgccactattttggcattttttggaaaatttcccaaaaaatgca

SEQ ID NO: 50987 - DNA, 58 bp, Heterodera glycines
ggattgctggggtcgtgggttcgagtcccaccgggcgagttaccttttatgttctaca

SEQ ID NO: 50988 - DNA, 180 bp, Heterodera glycines
gtcctttgtgaaaagtgctcttggcttttgcgtgggaatttgtgctgctcgcattttgagtgaggaattgagttcagtataaatcatttgttcgcgcacattgttgatgtgtttctttgattgcatcgttaacaattgtgcctaatggctgttgatcacatcaaatttgaataaatacga

SEQ ID NO: 50989 - DNA, 844 bp, Heterodera glycines
atgggagatggtcaaatactgacagtaatttctgcacctccagacgcttccaaactaaatttcaatagcctccgaagttccgagtctaccagttcagacgaggtgcttgtaaatgagttgactaaaggtgaaaatcacttaaaaatttaattaaagttaataaaactatagatttattgccagctttgcgtcgcacgaggactcgcacaatttccagttctaaaggggaagaggacattgtgacaacagagagtggacaagtgagttcttaacattacatcataccaaaggttttgtattgttcaaaattgagtttagaaagtgtacacaaagggaaggcccccatggtacgatctggcggggaagcagctcaaaaaatcgtatttgattggcatatgtggtggctcagcatcggggaaaaccaccgtggcaaaaaagattattgagaggctcgaaatgccttgggttttgcctttttttaatcttattcattttttaaatattgcaggtcactgttcttgcgatggactctttttataaagtacccgaaattctttttttaacaaccaatgatttaaaattttaggttttgaatgaagaacaacatcaactggctgcgaaacaggaatacaatttcgaccatcctgacgcatttgactttgaattgcttcgagagtcgttggtccgacttcgagaaggcaaatcggtggaagtccccgtctacgacttttcgacccatcgacgcgccaaaaacccgaaactgatgtatggagcggacataatcattttcgaaggaattctgtcgtttcataaatcggaaatttccgacctaatggacttaaag

SEQ ID NO: 50990 - DNA, 671 bp, Heterodera glycines
acgccgttccgactttcagcaaaacagcaaaagaagcgcagaacaaacgaaggggggtaagaacaaacattggcaaaaagagaaaataaaccaattagaagactaattacataattatttcaaaaaaattaattccgataatattttatttattgcattctgttgagatcggcataacaataacattggcaccccatcgaatggaagtggcgatttgccaatgaattcggcggcggaaagggcccggcagcgtaaaataattcattcatattaataaacttatttaatttatttgttcgcttttaaggcagacggtgcagcagcgcggcgttagtcgcagcgcgaaacggcgcaattcaaaggccaaaacgaatgactccgcgccaatgccatttggtgggcatttggaaatgaagctttacttttaaatttgaggtaatcaaatcgtggagcaaaaagtcaccaaagaatcgaatggccaaagacatttttgaaggtaaaaagaaaaacaaattaataaattctattgaatttaagcgatttttgtggaagccgaagagttaaaagcaaccttcggaattgagaagggatcgaatggcaaaaggctgagaatggagccaaattttgtggcacatacgaatatgtactgtaaaagaatggaaagtgattaa

SEQ ID NO: 50991 - DNA, 414 bp, Heterodera glycines
atgtcgctttataaggaggatgtgtacgagacggaagacccgccaaatgcggagccaatcgaaacggtggagaaatttgagagcgaagaagtggagaaagtgcacatgagcatgggggctgcgaagaagcggttcgaccactgtttgttggactcggaaggggcaggtaaaaagggagggagctaattggttttgattgttttgtttttgcaaattggcttttatcctcattaattacttaattttccccgttcagatttctccgattcggtcggagtgagacgccttaagcggggattcaaagccagcgaagtctttgaatcggaaacaattggcagcgaggaggaggaaacactcgaacagaaatttaatcgcctcaaccgggaaatcagaaatttggcagccagaagttga

SEQ ID NO: 50992 - DNA, 132 bp, Heterodera glycines
agccagaacgaatctcctagcgtcaaaaaggaagacgtcgtggccctggacgagttgctaaaaacgatcgcttcgaactgtaagaaggaaggacgccaaccgattagtcatggacggtcagaggaaagctga

SEQ ID NO: 50993 - DNA, 718 bp, Heterodera glycines
atggagcatctctatcataccagaatggaactgccgattgcacacatttacgggtttacaggtgagtaaactgaaaagctttcacaaaataattggattgtatgaaattaataatttttttttctttaaatttcttatggaattttaaattttggcattttttaaatatatttaaactaatttaaaaaataatttaaaataaatgttaatatggtataattttatggtggtgtctaagctttagtgtcatcaaaacggcaccgccgtaatgagccgggcccctattaaaaaacattttttgaaatttcactatttaaggagaattgctcactggaatggatgttgatggatcggaattaaacagtgaatatttggtcactcgttggcccattgtccgcgcattggttggccaattgaaagccgagttcaacacattagtggtggagatggcactatgggacatggagcagggcatcaaacaatttgttgttgcaaatgcccaaacggatcaagcaaaaatattgaaacagatgatgctgtgggattggatgatggaatacaaacagtttattgttgaaatggatgaaaatgatcaaacaaaaattgtggatgagatgaaagagaaattcaacaaatttgttgattatgatgatccaaaaaagggtggaggaacaattcaagaaaaaatattggaatattttcatacaaagcttcaaca

SEQ ID NO: 50994 - DNA, 207 bp, Heterodera glycines
atgggcaccgcccacacttttgggcatctgctgattgtctggcccaaaaaggtaaaaacaaatttttaaaaatataaatatgtaatttcagaggcccaataattccaattcattttaatatttaaggaaaaaaacaaattctcaaactattgtaaaagccaaataaccggtaaaattttttgtcaatatttaagaatttgtattaaa

SEQ ID NO: 50995 - DNA, 1482 bp, Heterodera glycines
  unsure (1)..(1482): unsure at all n locations
taccaaaattgacaactcgcacgagaacaacaccaagttgcgcacattgggcgccgaacggatggacagcggaacatacaaactgatcgccaccaacgagcatggacaagacgaagctgaagtgttggtggtcgtgctggacgtgccctctccgccaaacggaccgttggaggcacgtgacgtgaccaaggacagtgccaccgtcaaatggtacatgccagacgatgacggcggctcgcccatcacgcattatgccgtggaacgccaggagggcgacggtggccgttgggtgccgtgcggcgagacgccggacacgcagctgcgcgtcaaccgtctcgtggagggcaaggagtacaagttccgtgtgaaggcagtcaaccgacagggcgagtccaagccgttggccatggaccgcggtgtggtggcaaagaacccgtgggaagcgccgggcaagccgcaggatgtgaaggtggtcgactgggacaaggaccacatggatgtgagtttttggcatacggtattccggcaactactgtatttttgttgaaaacgtcttcgaaaatttcaataaaaaccatttatatgatttattggaaatgttttgagaaattttttaaaattcccaaggtttttcaaaaaaatagaattttttgtgagagttattaattttgaattttgaagattaaaaataaaaaaaattgttcaaaagttaaacaattgaatttttaattttttttttttaaatgaaaataattttttttttggaaattttcatttaaaaaaaattttaaattaaaaatttaacaaattttttaaaatatatttttcggaatttttatttaaaaaagcaaaattttcagttggaatggaagcctccgatcagcaatggtggtgcacccattgacggctatgtgattgagaagaagacaaaaactggcttatggacgccttgtgcccacgtgacgggcaatcagtgcaagggaacggcgtctgggctggtgccgggtgaagaatatcaggtagaaaagcaaaaaaaaataacatggatttgcgtttttttgtccatgcttttttaaatttgttcaattaatttaaatttataggctaaagtgaacaaactcacttttcacggctatcgaatgatatcaagaattattaatttgaatatttagagtaatgttatactcaaattctttattttgattgttttttaattatagcatcgacaatttttgatttaaaaaataaatttgcctaaaattgccaaacgtggattcaaaatggaaattttgaatttgtaattaaatttcaatttcagttccgtgtcaaagcgataaacaaggcgggcgagggcgaaccgtccgacccgacagagcccaaaacggcgaagccacgagcactggcgcccaagctgaacctgaactcgctgatggacatccgtgtccgggctgggcaaccgatcacatncacgcggagttttga

SEQ ID NO: 50996 - DNA, 1849 bp, Heterodera glycines
ttgttgtgaaacgggcattgcgcaccgacaccggcacgcacttcatcacggcacgcaacgacagcggcactgacacggcacaagtgctggtcaccgtgttggataggcaagtgtcgtactgtatagtacaaccagcaagaaaaaaatgtgtctaattgtaaatagaattattaaatccacagaaaatttatcattatatgtgtcaatactgttataccgtttttgtttccattacagtatattttgtttaaaaaattaccgtatactttttactttcttaccacactctatattcgagactggacggggacataatccggtccatatttttcgggatcccggtccggaattcgagtatattaaaaatgattcacaagggtcaggatctcgaaaacccgggttttaatcccgaaatctggtcctgaggcagttctcaaatcccgatttttttaaaatttccgtctcaactttttttttacatttttaggcctggtgaaccgcgcggaccgctgaacatctccgatgtgaacaagaacggatgcacattggtcaacatcaatgccttccttcattttgtcatttaattgctaatttcaaaaaataggattggaaaccgccagaggacgacggtggtgcaccggtgtcccattacgtggtggagaagcaggacttggccaccggacgatgggtgccggctggcgaaagcacagagccgcgcattgcgctggacgacctgcagccgggccacgagtacaaattccgtgtcaaagcggtaaaaatttcatttttttttataaatttttaatttttttgctccaggttaatcgttacggcgagtcggacccattggaggctccaaaatctatggtggccaaggacccattcgaaaaggccgaccgaccaggaacaccggacattgttgactgggacaaaaactgggccgacctgaagtggacaccgccaacggatgtgggttattatttatggcgccagcttttttaattagtttgttagcataattttatgaggaaattttcggatgttttatttttaagctttttatactataaatttgctaggaaattctcggagttttgaagtaatttgtctttttagattttataaagagagagattttaatgatttttctatgctattttcaaaatttctgaccatttaaggcatttcttataaatggagagattttttaatgattttctatgctattttcaaaattttctgaccatttcaaagcggcacggcgatttagtttttttttgagcccattttggtcaattctgtgctatttttgtaatgaaacagcctggcattattagcaaaaactgctctgagttttcaggacggcggtgctccgctagagaagtacgtggtggagaagcggcttggcaacggcgaatgggaatacgccacggaagtgccggccagcaaaacggacgcacgcgttgatgggctcgttgaaggcaaacagtaccaattccgtgtcaagggtgtcaacaaagcgggcgagtcagcaccgtcaaatccaagccgtacattgttggccaaagcgcgacggctggcgccaaaaattgaccgatcagcaatgccggagattcggatcaaaaagggcggcaccattgagttcaatgtgcccgtggacggtgaacctgatccaaagtgccaatggctgatcaacggcactcagctcggcacatctgatcggttggtactattcggagcagttcgttccaccccgcaaatttttttttttgtaaatttttataacagaatttttcacgaaaaaaatttatggttttttataaaaacaatttttgaactttttttaaaa

SEQ ID NO: 50997 - DNA, 447 bp, Heterodera glycines
atgaacgtcggacacattgagtggaccttccggtgcgccaggtttgtctacaaaattatttgtttgtttgtgcccaaattatttaattaaatttaaggacaattaattaatttaatatgaaaattatttttatatttttaattcaaataaaattaatttcagcatttttatgtggcaaaaacttaccaattatgtcgacttgaacacgcttttctgcttcaccattttcgtttgtggcacgaatcacttaatttaattttatataaaatttaatccttaattttgtgtaaattttctgattatgaaaataattaatcaaattctctatcaatttatttttaattgaattaatataaaattttacaatgaattgcaattagttaattaatgtttaatataccattaattaagtaattaataatcaatttatctaaatcgaaaacaaca

SEQ ID NO: 50998 - DNA, 3025 bp, Heterodera glycines
tgccgcctcgtatccatcgtgaagatctgtccgaccttgtcgttcgaccgggcgaggacgtcaagttcaatgtgcacatcgatggtgaaccaccgccgaccgtgacatggacatatgaggacggccaagcattgccaagctgtgccaatgtgcaggaccaggactacttgagcaaatttgccatggtcaaaccgacacgggcacaatccggcaaatacaccgtaaccgcaacaaatccgaacggctcggactcggttactgtaacggtcagtttattttttgttgcactgttttaatgtttctcgagttggtattggtaattggaatttctcggctaaacaattttgggaaccaaaaaccgggttaccttggctttaaaagttatgaatcgccatgaaaataaaaaattatcataaactgtgatcggcatcagggttatgcgaaattacgtgtcgtccccttttttcggcacttttgagtttcgttttctttttggatttaaattttttcggtttcatgataaaaaaaatttttagtttccttttctaaatattcattttcgcatacatgcaaaatttttgtaacaccaaaaaattaaaaagtgcaatgaaattttttttaattcattgaaatttggtcaaaattaatacttcaattttgccatttctccttaatttaaatcattttcaaaaattataatttaccgtttttcacagatcgcagtgaaaagtcgtccgacagcgcccaaaggtccgctggaagtgtcggacgttttcgaaaatcagatgactttggactggaagccgccggaggacgacggtggtgagccgattcagtactacgaggtggagcgtcaggacgaacgggacggcatttgggtgccggtcggcacatgttccgacccgcacatggtggtggacggactggccaagggggccaactacaaattccgcgtaaaggtgcgtgagcataatttttttgaatttgtcttttggcaaaacgccaatgcttggcattacggtagtttcggtcgcttgaaatactgtgctttctttgggttacggtattcccagtctggaagaaacattttttcgatggtcattattctgactttatttctacgttacttggcatttattgttaaattgtcggattaatgttcattacggtattgcccaaaattgggggtcgttccatcggttactgtaatttcatcagctattctattttcaaaatcatcccccaattttgatgattcccctacaaaaaaatttttggtttcacaggcagtgaatgccgaaggcaaatccgacccattggaaacggacaaatcgacattggccaagaacccatacgaacgaccggacaagccgaacgcgcccgagttggtggactgggacgcggaccatgttgacctgaaatgggacccgccggcaaatgacggcggtgcacccgttgaacaatttgtcatcgaaaaacggagcaaatacggacgatgggagccggcattgaccacggacgggaacacaaccgcgggcactgttgacggattgacgaagggtacgttttccaagggttataaaaaatggattccgtctttgaaaaaagaatgggcatcgtatttgcaattttttaatatttttttgagttttccacttttttgttgctttaattattttttggcaacccctccctacctattaagacaaaaattagcgcagcgaaaatcatttcgaatttttcggttttaaattaattaattcgtttttcggattatttttacaaatctttagtccccataactcttcaaaaatgacagcagaagttcaaaaaaatttcacagaaaaacaacataggactaatgtattatgaaacccttaatttacccttaaaaatatttgaattctccattaatttattttgccacgtttttccaaattttgaattcacccgtaactattctaaaaaaaacacctaactttacaggtaatttaacactgaattttgaaaattagattttgggtgccgcgccaaataaattttttttcacagttttaataggaaactgaattatgcttgaaaatttacaattttgaaaaattggcattttgtttgtcacacaggtgaggagtacgaattccgtgtgaccgccgtgaacaagggcggcccatccgagcccagcgatccgagcaaatccgttgtggccaagcctcgcaatgtgccaccccaaattggcgacttgcaaccgttgcggttgcacgcgggccaaatgatcaactttgatgtgccggtggaaggcgagccgacgccgcgcgttgtgtggctgtacccggacgggcaggagatcagagcgggcggcaaagtacggcttgagcatgacgaggagcagggccgttgcaagctgcagatcaaaagcacggagcggtcgcacagcggcgaatatggtcagttttggtggcttaaaatgtttaataatgcgattaattagggataataaatgaatgaaattttatgttaatacaattaatgttatctgaatttcattttttaatgccataaaatttaatgttgttttcgatttagataaattgattattaattacttaattaatggtatattaaacattaattaactaattgcaattcattgtaaaattttatattaattcaattaaaaataaattgatagagaatttgattaattattttcataatcagaaaatttacacaaaattaaggattaaattttatataaaattaaattaagtgattcgtgccacaaacgaaaatggtgaagcagaaaagcgtgttcaagtcgacataattggtaagtttttgccacataaaaatgctgaaattaattttatttgaattaaaaatataaaaataattttcatattaaattaattaattgtccttaaatttaattaaataatttgggcacaaacaaacaaataattttgtagacaaacctggcgcaccggaaggtccactcaatgtgtccgacgttcatgcagatcgctgt

SEQ ID NO: 50999 - DNA, 1045 bp, Heterodera glycines
ttttaataaaaaaccaaaaagtagcgcggttttaaaatacctttgaaattcaatttgcttacattttttcgtaaataatcgaataattttattaaaaaacccttaatttttgtttgggggactccaaattactcgagactcaaaagtgtccatggtttctcgaaaaaatatcgttgggtaattaaaaatgattcattttaataaaaaaaaacaattctcatttctgaactgacgcttaaggttggccaatcggtggacttcaaagtgccggtgaccggcgagccgccgcccgaaaaagtgtggacctttaatgatgcgccaattgctgaaaacgacaaattgcgcatcgcaaatgaggactacaaaaccaatttttcaattcgcaacgcgacacgtgcgcatgccggcacttacacgctgaccgcgaccaatgaaagcggcaccgacacacacggcgtactggtcaatgtgctgggccgtccgagtgcgccggaggggccgttggaggtcaaagatgtgttggaggtagggaggaggaggattatgaaaatgaaatatagtctgtgataataataacgttaaataattaatttaaaattgacccaataattattattattacagcaaattttaaaatttaatatggaattatgatcacttttagaagaattatgggtgatcaaattttatataaaaaactaaaaatttaaataacgcgaattaattcaacgggaaattgctcctttaacgcctattttccgaaaaattaaaaaaaccgggaaattctaattcgttacttttacactcctactttggcattttagtcttcttttgcatgataatttattttccgagaaatttattgtccattgaatatacggtattaccgtattccaatcttgaggaccgcatgacgctggactggaaagcgcctgctgatgacggtggcatgcccgtggaccattacgaagtggagaagctggacatggcgagcggtcgatgggtaccgtgtggacgctgtacagagccgggcattactgtcact

SEQ ID NO: 51000 - DNA, 291 bp, Heterodera glycines
atgtcaatttcaacgaattcaacaaatattggcaaattttcatttgatgattatggtaatgagaaatgggaaatggtagaaatttaaatttgggaaacgatagaaaatttaaaattaaaataaaatcatctaataatttaaaaacattaaaatgcttttttcagaaatgaattatgatgaattgagtattttgaaggaaggagctgttgttaacacaaactgtgaatcattcactgatcagcaacaattgaaggcggaaaaacatagaaattaggaaatatttataattta

SEQ ID NO: 51001 - DNA, 1036 bp, Heterodera glycines
cacatccccagctgatttgtcttcccaatcttcaggaatggcaaaagttgcaaaccggaagcggaatgagcgccgaattcgtgccgtccaagacttggcacggcacctcaaccaccgaatgaaccgccaccgccatcggcagcgcgacggaaaacgggacccatcggaggaacggcacatccgaatgaccgccgaacgttatgctgatcagctctctcgcctgggagatgaccacattcaccgactgcagcaccaattcccgcaactccccaacccccgccggcgtcgatcagaggtggggggcaatctgaaagggggaaagtcccagccaaaattggcatcaatggtggtacgcccgccccagggagagttgctcccttcaaaggatgtcggcggcgcagcaccgggcgcatcgaactcccatggccgaaacgagaacgaagaggaaggccgtgagatggccgagaaggaaagaggcagccgcccgagggtgctccctccgccgggggacagttttggagaattgctggagaaagaggcgaaagctcgggccgaagtggccgagctcgaagcccgggcaaagaaggcgaaaatggagagggaggaggaggaacagaaactgaaatcggcgaaggaagcgcgccttcgggacttgggaacccaagccgacgacttgcgccaaatgttgggcgatgcgagctggccgtggtcgaggggcaaagacgggaaaaatggggaggcggtggctccccgcgctgggaaagcggtggccatgccagcagtgccgatggaggatgatggagtgtcacttgccgattcggaaatggaggtggtgccggccgggggcagtgtcgcaagaagcgacgagatgaccaaaacgggcgggaggtctgctcccgccaaagagttctccatctcgtccatttttgccttcattttctcaatttcatttttcattttcccattctccgcttcgatctttgcgagcagtgcattcgtttcctgctgctttaacttttcttggagtcccttctaa

SEQ ID NO: 51002 - DNA, 865 bp, Heterodera glycines
atgatgatttttttgattaacgaccaatggaatacaaatgaaaaaaacttgattattttcccatttttctttttttatactaaatttggactcaagcatgtaatgtttggtctgtcggctgcataatgttcgaattgtactccagcggaaaagcaaattagttttgagagctggacttaagctggcagctttgcacctcccctctccccgcattttttacagaaaatttcacgaaaaaataagaaaatttaagtgaacagtttttttcgttttagacttatataaaagaaattttttgagtttgtaggcctctagagaaaagtaaaaagagttaattttaaaatataaatcaaataaattattttttaatatttaattactcatcagtggtttaaatgaacttatatattaattaattttagaatatattatgtgtcagtagcttgtatttttcagtccttctcgtcacccatagtgatattctgcgatacttgttttcactcttttaattattatcttttttaaatatactaataattcttatttatttattttttaaattgtatattcatttttatttcacttatttttaaaaattcaattaaataaatttactattttaaatattttttattcatcattagtcatgaattaaaatttttttttaagttttttattctttttaatttgttttctttgtctaaattttaacaaaattatattttaaataatattttcagcatattgtgattaatttctcagttgtaaaattgcttttacataaaactgttgtatatctattaattactttataaaaatgtaataaccattgtaaaataatttttataggtttaatcgcttagaa

SEQ ID NO: 51003 - DNA, 616 bp, Heterodera glycines
atgctgatcatttcaccggcatttcctgaacaaaatatttcgactctaatcaatccgactgacgcaaggaaaatcaaaaatgaatttaaaaatggtaaatgtatttaaattaaatattattattttattttattctatttaattaatttctttttagcttttgaaacaattagagcattaaaagaagatgaatatgtcggcgaaatttttggacaatgatttataatgcaatttttagatcaattattttacataattatttttataatttaaatttcgaaaaaaaattaaaacattttgtattatagcttatgagagtatcgttattagtgacgtgactttctgtttattctgtgacttttgtctattttggtcttttcacgcataaaaatgtatgtgcctgccggttttggcattttgccaatattcaacattaaattataaatattttacaaatccgcgaaacttggttaattttaatgcctgacaaactttaaatgcaaaaatagcccgattggtgcatggactgaaggtcagatttcatgcaaaaaattgggaacgaatcatagcaaagcgaaaattaggaaaaacaagcacgttctacatgaataagata

SEQ ID NO: 51004 - DNA, 545 bp, Heterodera glycines
atgcgtgaaatcgtccatattcaagctggccaatgcggaaaccaaattgggtcaaaggttatcatgttattaaatctgtttaagtgatgttcttttaaattagttctgggaggttatttctgacgaacatggaattcaaccagacggaacttacaaaggcgaatccgaccttcaactcgagcgaatcaatgtctattacaatgaagcacatggtttcttaacaaagcccagtctcgcccacacactttaaatttcaggtggcaaatacgtgccccgtgctgttcttgtcgatcttgagcctggcactatggattcaatccgagctggagcgtacggacaactctttcggccggacaatttcgtttttggacagagtggcgcgggaaacaattgggcaaaaggccattacacggagggtgctgagttggtggacaatgtgctggatgttgtgcggaaagaagcggaaggctgtgactgtctgcagggctttcaactcactcattcactcggaggaggcaccggctcaggaatgggcactctactga

SEQ ID NO: 51005 - DNA, 311 bp, Heterodera glycines
aattctttttcgctgacgcgacttttccccactttggtcttccaccgtcatggtaacattcaactgctgcaaattgcggcttaccatgagaaagtcattgaccattacgaaaacccaagaaatgtgggctctttggacaaaaatgatccgtctgttggtacagggattgtcggggcaccggcttgcggagatgtaatgaaacttcaaatcatggtttattgaaatcattgattttttagaatattatgaaattaaggttgacggaaacggacaaataattgacgcaaaattcaagacgtttgggtgtgggt

SEQ ID NO: 51006 - DNA, 1060 bp, Heterodera glycines
atgaaccagcaagtaagttaatcaaatatatgaaataaaagttgattcatttgaatttttcttatcatttgggcgggttcgcaaaaaaggtgcgataaaatattaccatatgataaaataaataagcaaaatttgagtccattcgcgttaattattatttttggcagtaataaaagatgaatgagaataaaaagtgccgttttcttcccgctgagcttgtccatgcgttggtttcggcattgccgttaaaccaacgctgggcaaccgtgcgggtttcattgttatttgaccgttttattctgtcaatacaacatgaatggcttaaacaattgttttcttcggtagaaaattaattaaaaatattttttatttatgtattttaattgtgtttaattaattaaggtgcatgcttttcgtgcggccaaagatgcccttttagtgcgcgtggaaaacagtgcaggagctaatcttcgtgttctgttccaaggtgggaaatacgggactgggtcgttttggcgccgacgttttggcgccagcctcagtttttttattataactttttttcttgttgaccaaatctaacaatcttggtatcattcgaaagcccttcacaagctctattagccttacaaaaaacaaacaaaaattttagcttctaaaaaagttattaagaaaaaaactcaaaaatttcgacttttttggaatttcatgttataacttttttggtaattgtctaatcgcgaagcaatagcttagaaatatcttctaacgtcggcgccaaaacgatacggacccgggaaatacacacataaataacttataattattgaaagaattcaaacattttacaaatagagaaatccaaatttcaggaatttctgcggagttcaacatcccaaacgacattggcattgtagagtggcttgaggagaatgatcccaccaattacggcatcgtggaatttcgtgctcaaatgcacgcgcttcatttggaacttatcgggaacggaaacaacgaactgctcggggcggccacggcttgtatgtttttgggcaattaa

SEQ ID NO: 51007 - DNA, 116 bp, Heterodera glycines
aatgaataaaataaatcaaatgttaaaattcacaggtgattaaaatatagtgtatatgtggcacagaaaatttcctactcagaactcattgcttttagtaaacccctgaattcctt

SEQ ID NO: 51008 - DNA, 229 bp, Heterodera glycines
atgatcgaaaacggaatcagaggacctctgaatttttacatacccacggacggaactcacgtaaaatacgtaagtaagtggaaaatgtgtcagtccttttttataagaatttaaaaggttgtatgaatgtttaaaaaataatttgtaggatggaaacatgcttggattgaaatactgtaaaattcctgaaaatatcatatactgtaagggtaattttggttcattataa

SEQ ID NO: 51009 - DNA, 713 bp, Heterodera glycines
atgaccaccgccgcctttcttccgctgctcaaaaaggccgcctccgccggggagttcgctcgcgtggtgaacatcggttcgtcgctcggttgtattggacaggcggccgtttcgcctcggctgagtccgtatcagaacgtggcttatggcatgagcaaagtccgtccccttctccgtccgcccctttctttgatcagtgcttaggctgctcttcatcacttctccaaaatgatggctttggacgagtcggacattgtcactgttgcgattcatcccggcactcaactgtcccttctcactcacccaattttgttgttttaaggttgggttaaaacggaaatgggcggtgctaacgctatgatgagtgtttccgactccgttgcaaaaataatggcgcggatttgcgcactcacaaagagcgactcgggaaaattgctatacggagaaaaggaattgttgccgtgaagaaaaattgatgtcaattcttcccaatttgccttttgccgactttgaaccgtttctgtgaaattatgcctatttttaggcaacataaattcgtaatttatctatgaattattcaccattacctaatttccaattaaacaacattagtgtattaggttttgaattgtttgaaaacttttccctgtgtcaacgctatatccaaaagaaaaaagtttattgagggatttaaaagttgagatactcggaca

SEQ ID NO: 51010 - DNA, 1028 bp, Heterodera glycines
atgttggccttgagcattggccaaatgtcccctgacaatctgtcagtggacaatccgtcagtgatggacaatgtgtgagcaaataacccaagatttgaacaagcatttttaaaaaatgtaaaagacaattaccatagaatgatgaattaaatcgaattctaaataaatagaagttttgtaaaaccccatccgatttttaaaaattaaatcgagcaatcgcaatcgcaaaattttacaatttggggtaccaaagttttggaaggaattaatagaatacatacagattatgaaaatgcagaaataaatgctttgataaaattttttggtgtgaacaaagtttacagatgtattgttcactacatacgtgcaacataatgacaatgaatggtggtgtaagttggttatttttacttatttaagggttcatattactatttcagtgctttttgacagtattgaaaaaattcgagagcatattgaaatagctatcgcacctgccgctggtgctcatgaaactgagaaatacatgaacaatttggacctagcatcagtcagcaaattgtttgggataaatattatagtttgcgaaaaagttagcaaagaaattttccgttggcaggtgtattcgcccaatttagaaatttcggttagactaattattttatatgctaaaaattttacattaactattttaagctttcaataagtcaaaagaagtcttcacattcaatatttttatattaccatgatgcgcattttgaactcataaaacaaccacaaaagataaaatagttatttattttatttttaagtaacaatatgtattaaatttatttaattttcccttttgtaaattgcaaagaaatattgtggtacgtattgtggaacttcatttttcgactcttgcataatagcccctgttatatggttttgcaattttaaaaaaggttttatatcgagaagcttatttaaaaaattttaaactgtagttgaccgatgttgctacgaacacgatgtgtgttacataa

SEQ ID NO: 51011 - DNA, 2783 bp, Heterodera glycines
cgatcaattccatttggaagcctgatgttttggttggccattcagcaagttgcaaagttgcgacccgtttggttttagctttacaattcggtggaccaacgtttcgacactctttggccggtcggtcgaacggcgaatgagtgcccttctatcagtgtccctctgcaggtgaatgccatcgtcatgttcaacgggtccgtcacttggatccccccggacatcattcgttcgtcttgtcgcatcgatgtgactgatcccccccctccgccgtttatcccctttttatccctccctttaggtcacttcgtttcccttcgatgaccaaacttgcattatgaagttcggctcgtggacctactcgggcttctccaccgatctgttcaacagttccgtctctttggacccgtacactcccaacggcgaatggcatttgctcagtgaacgtttttccaaagtgttcctgtgacctttcgccttcgcaggtgtcagttctgtccgcaattatttggtctacgactgttgccccgaaccgtacgtcgacgtcacttttcacatttccgtgcgccggcgaacgctttattacggtaacaattaagctaatttggaaaactaaacgattcccccgtccccttaaaaaggagtgaatttggtgctcccttcgctgcttatttcttcgctcgctttgctcggcttttctcttccgcccgattctggggagaagctcaacctttgtaaatttattttcgcaatttaagcttattttcggatggttaaaaggtgtcaccattttcatgtccctttgtgtgtttatgctaatggtagccgaaacgatggttcgtttagacaattaattaattaattgtttaactaattaattatgttattttagccacagacttcagacactttgccattaattggtctctcataaattcgctttccattgcttttcgccccttctcagaagttttcttcacctgcgttatgttcgaagtgggcgcctccgtcatttgcactgtaattgtgctcaatttccatcaccgaaaagccgattcgtactttccaatgcccaaatgggtgctaattagctaattaatgccgagtttgcttatcccttcccctcccattttcccctttagcttcgcattttgcttctcgattttttccctattcttttgtttatgcgtcgcccgccccgcgttaaactgccgaattgtgacgacggagagaacgatcagaacaaaatactactgaaagaggagaaaaacagcacaccgacaaagaaagaaaggtgggagaggaaaaggaaagtcgttttctttatttccaaccactttccctccgatcgtttctcctctgattagtttcttccaatcactttccctccgatcgtttcccctctgattagtttcttccaatccctttccctccgatcccctctgattactttcttccaatcactttccctccgatcgtttcccctctgattactttcttccaatcactttccctccgatcgtttcctccgatcacttcctcaccgatcatttttctgttcgatcagttgcccttctactagttcttcttctgcctgtgccaactgtttgcttcccaattccgactccgttacgtccaccagcgacaattttgaaatggactcgcgactgttcattccgccggaccaatggcaaatgaatggcgcatgttgccacggagcgggacaaaacgcagcgggggcggggacaaaagtgcccgttttggatggcaccgcggggagtatgaggttggaataccaaccaagtgagtgggtgttaaagagagacaagttgaagaaggtcatttcatttgagaggggcgccagggattgtacaagcaattgaaggaggggggcagcagactgatcgccaacgattgcgcggtaattttgaatttaaaatggaaatggaaaataattaaagaatgaattgcgacgattgtccggacaacggtatttgttgctgaataccacaaaacgattgggaaacagtgaaaagaaggaaaagcacgacgaaataacggaagaaattcagcaacagaaagagggagaggtaatgagaaaagaagtgatcagaggggaaagagagagagagaagaagagcacagagaaagaaaagaaaaagtgacgaaagagcacatagaaagacagaggaaaaagtgatcagagagcacagagaaagacaaagaaaaagtgacgaaagagcacagagaaagacagaggaaaaagtgatcagagagcacagagaaatacaaagaaaaagtgacgaaagagcacagagaaagacagagggaaaaagtgttcagagagcacagagaaagacaaagaaaaaatgacgaaagagcacagagaaagacagagggaaaagtgatcagagagcacagagaaagacaaagaaaaagtgacgaaagagcacagagaaagacagagggaaaagtgatcagagagcacagagaaagacaaagaaaaaatgacgaaagagcacagagaaagacagagggaaaagtgatcagagagcacagagaaagacaaagaaaaaatgacgaaagagcacagagaaagacagagggaaaagtgatcagagagcacagagaaagacaaagaaaaagtaacgaaagagcacagagaaagacagagggaacagtgatcagagagcacagagaaagacaaagaaaaagtaacgaaagagccacagagaaagacagagggaaaaagtgatcagagagcacagagaaagagagagaaaaaa

SEQ ID NO: 51012 - DNA, 694 bp, Heterodera glycines
atggctattccagctatgatcgcttctgtcccttctacaaaactgttgggatgctcaaaaatatgtatggctaaagaaaagcaaatgatcaaattgtgttgttcgaataaacatcctaaggattggcttttacgactttgcccggcactcggtggaaacgactgcacaatcggacaacaaaatcacgtggaatcagatcagagatcacctcggggacatcattcacgaactttcttcgatgaaatttgaggtggacatggaaagggatgacaacaaccaaatcccaatttgctaaccaattaggacccatccgaaaaaacggaagatcagatcaaaaaggattacgaagaactgtatgaacggatgcagaacaaattccgagcgttagaggatgaatgaacaaactgtgatcaatgataacaatttctcaaaattttccctcatttctcttagtgtagtgatggaaaaaacgtctcagtgagttgtagttgtggtaggagccgcacagtttccatcggcacgagtgggcactgcgtcgttttgctgaaagcgttagaatgtattcaagttatggtcatttgattaccgtaaaccgatgggaatgaccgtcgcatagggccaccattttggtgggacgacggcggaattttaagcaacggtatgaacgatggactcaggaagggcggagagggaa

SEQ ID NO: 51013 - DNA, 898 bp, Heterodera glycines
atgggaagacaacgacaaaaagcggaggaatcggcggaagagcgtccaattgctgtccaaggcattggcacctgtccaaaattggcaattcccagcgacgcattgatagcacaaaatggtcgaagggcagcgccaaaccaactgaggccgtattgggtggccgatcagttggaaagcatttaccatttgttccaatcgccgtcgacgcacccgcggccgggcccaaaggcaaaaggcggagaaatccgcgcggagattgtcgaagaatgaaaggccaacaaatttaatgaggaagtgctcattcaattagggaggagcacaaagtttcctcgtagagtcggttggtctttccaacttaatttgttcaccgacactttcgtcattcattgttctgtccttttttctgtttgaaatttaatttaaaattaaatgcaaagattgctgagcctttgatttccctgaattactaaattgaccaaaagtgattaactttcctaaaatttaatgaatgaacgccgaagtgagagagagcaaatatttatccaccggggccttttgcatgccctcccccacttcggcactccccacgcggcaccctttacccattcgttgccctttaatttggccaatccaatcaaactccattcattcgtcctcttcccgctcaactcgtcctttcaccggtgagtttcaaattcgctccttctccgatggttttcccggtgtttttggccatgcttttgctctgtttggttctgtcgtcgtcttccgtttcggctgctgtgagtttaattatttgccaattagcaaatgccgaatttaaatggcaaattcatttgtgtgtaataagttatactggtcatctattcttccttaattaataactcgaagaaataaa

SEQ ID NO: 51014 - DNA, 498 bp, Heterodera glycines
atgggcatttatttatttgtcatttgtaagtaattaattaaaattaaattaaaattaaaattagccgtttttcagctgggttttcgaaggaggagaggactaattgtaagccacaaaagaaaataaaatataaagaaaagctctttggggactatcaaacaaatttcagggatgagcagagaaaaagggcgaaagagagggcgactgattgggatttggagtgattaatcagccaactgattgggatttgatgggagtgattaatcagccaactgattgggatttgatgggagtgattaatcagccaactgattgggatttgctggttgtgatcagtggttgagtaggatgtcgcacccccggctacccggacgaatgatcggccaaccgaacttccgatcagtcactccgtcgcgagaacgactgcaacgaacgttccatcgtttggcggtgcccaattcgagtcactcccaaccttaaaattgtaaaattcgcaaa

SEQ ID NO: 51015 - DNA, 836 bp, Heterodera glycines
cgagtaaatctgaaaaagtcccacccccggccgacttcgactcggatttgcgatcggcgctggccaaaaggcgcagcaaagtgcagcaaaagggcgaaaacgaagcggggacgagcggacagcagaacaatgagacgatgccaagcagcacctgcaacacaacatcagaaaacaacgacaatagcagaaacaatggcaatggggtgacgatggtaaagtgagtgaatcggaggggggggggggacaatgccaagaaaagggggcggggaaaaagaatgtgggaatgccaaagagaggagaaagcgccaaggcacgcccaaacactagagaaatattctctgagtttagccgttacaatgccggccttagtctgcgagagtcggtcatggaaaatgttgcggccggcaccgtcaaaggcgtgcccggaagcgccgtcaaatcgacgcccaattcgcattcgcccacgggcgctttcaccggttgcaaaaaggacagcgggtgagttgggcgggtgattagctattagcattgctttgaatgcttctgctgcttaatccttttaatcctcccctcttcagttacacttcctcgcgcacttcgctggagcccagcgactacggcgacacagaacaacagaaccaaagccatccaaaccaccaccattcccaacattcactggtgcccccgtctctgcctgttcagcaccgcgtctccgttctcagtcagcaaatggaggcggcggcgagcgcagtgcagtcgcccgtctctctgcgcggactgtcggcgccgcccgcggaattgcaaccacaggcacaaaaaaaccgactaattgctaa

SEQ ID NO: 51016 - DNA, 489 bp, Heterodera glycines
gcattacggaacccggcgccgtgcgacgcgtgctccactacggactgggcgagttggagttggacaggttggtgggcgcgttcgaccaatgcgggcagatgatgcgcttccaatgcaaaggcggtgggtgggtcgaaggacggatgggccaataaattgccaaattggccatctttaaagcattgccactggaactgtttcaggccaacgtttgatgcattatggggcggaaaatcggccgtccgtttggtacgcgacgcgcaacgcgcagcacgggctgcagtggggcgacgcaccgcccttctcgcgcgtttgcacgtgcgcaatgaacgactcgtgcacggggcacaggtgaagcggaccgaccaaaatttaaaattcggaatgccttcgagactcaagaccaatccgagtgccgaaaaagccctcaacactttcccaggggctgcaattgtgacagcggcaacgacgcgctggacattggcatga

SEQ ID NO: 51017 - DNA, 915 bp, Heterodera glycines
atgccaaaacaaaacgaaatcgttttaaaatattcctttctggacttgacttggtttcttgatatcgaagctgttttctacgctatttctaaaacggttataccaaaccccagatttttgaatccggttttcagaaaaaatgccttgtggtgaaaacaatatttcacatttcactccataactttgtgagttcggcacggatcgagaccgggataagaccattggaaagagcagctcgagctctacaagaaggtatggaaagaaaaaatagttatttctgggactttttcagaaatcagaattaattctccaatgtggcccaaattttaggcccccagccacagccccttgcttctcccagttttaagtcttggatttgtcaaataaattcaagacttcaaattaataatcaaaaattctcttaaaatttttttgaacccaattcaaaaaaggaaaaaaatttgcagtcaaaaaattattcgaatttctccaattttgtttccataatttccgaaagttattcggtatcataatgccaaaacaaaacgaaatcgttttaaaatattcctttctggacttgacttggtttcttgatatcgaagctgttttctacgctatttctaaaacggttataccaaaccccagatttttgaatccggttttcagaaaaaatgccttgtggtgaaaacaatatttcacatttcactccataactttgtgagttcggcacggatcgagaccgggataagaccattggaaagagcagctcgagctctacaagaaggtatggaaagaaaaaatagttatttctgggactttttcagaaatcagaattaattctccaatgtggcccaaattttaggcccccagccacagccccttgcttctcccagttttaagtcttggatttgtcaa

SEQ ID NO: 51018 - DNA, 1888 bp, Heterodera glycines
  unsure (1)..(1888): unsure at all n locations
ttttgaattggcccgagtataacctttaccgtgggatggtcaaatcgcacaaaaacggctctaaaacggtgctggactcgttcatgatcatcgtcacttaccatggcgtggagttgagggagtggcatgaacgggcggtgatgatgcaacggtggcgcaaggtggccgacaattatgtgaaggatttcaatgtgtccgtgctccatgatgacggtctcttcttggatctgctcgaaaatatggtccataattttatcataataataattaattttatttttaaattatatatttttaatttaaatatatttataagtgcgcataaaatttcagttccccgataaattaattgtaaaaaatttataaaatttttgcaattaaatttcaacatctaaaatgaacctatggtcatatatagtatgtatatatatatgaccgatcaatttccattttttccaaaaatttaaattaaaataaaaatttaattaaaattcattatttttgtttagccaactgacatttggcaatcggcacttggcacattggtatgcatgtccattatttgtgcggcgttcatgaacttcaacccatttgttgttgctgtgacgagcattgtcattgcctgcattctcaccggtaattaatatttttaattaattaattaattatataaatcataatttttcagagacacttggcataatggcattgattgggatgacaattgtgagtttttttttttaattttttagtaattttgctaagctcgagcttggattttggggaaggttcattcccgacattttttggcatattgccaagtccctatcacaaatgtatttgttatctaagtctaattttcaacctccggacctctgtaactctgacccacaactctatcggctttaaatccccgactttttgtgaactcctaaagctcctaaaatcaatttttctttgacacatcctcccaacccttgacgtattaatgctaggagaaaaatgccattttcataaaaattcatttggatttaaccataaatcttttggcatttaaaaatatatgtatttacaatttaatttttgtttaaaattatttctccatttttccaggaccccgtggtgatggcagctgtgatcatttccatgggcttcagtgtggacattccggcacacgtctcctaccatttccacatcgcaaaatggacagaagatgggcaacgacagcggacaattgaggaacgaattcgaatgtcattcgcttctgtcggctttcccgctgtacaagcatcgacatgtaagcaacaaaatgccaaaatatgcaaaatttaaaatagaaaaaaaaatttgcttggaaataattaattagggattaaaactcgccccgaacccaaatttttggccattttgactcaaaccgctttaaaacacgacaaatactactgacctcgaacaccaacccccgactcggtactggtgttactttataccatctaagaatgacatttttgtaaaggaaaaaattattaaaatttcattattaggcaaaatgcctatttttacgcacacttaaaattaattcattgagataattacgaaaagcatactcattaaaaaaagtttttgaaaaaattcaaaccaaaatttagattttaataaggattttgaattaaaaaaagtatatttttagtttactttttatgattatttatcgtttcaggtacaaacatttgcattctttgtctactcgtcgtccctgtctatccggcacaagtaaaaataattanattttcaaaattgataaaataattttttaaaattaattttcaggtttttgtgcgaatcctttgcacatgcatcacactttgtacaatccattcactgtgcc

SEQ ID NO: 51019 - DNA, 430 bp, Heterodera glycines
atggaccatattttcgagcagatccaagaagagaccgtcatcatggagcacggacacattgaaatccttcacataattgtcggccaccttgcgccaccgttgcatcatcaccgcccgttcatgccactccctcaactccacgccatggtaagtgacgatgatcatgaacgagtccagcaccgttttagagccgtttttgtgcgatttgaccatcccacggtaaaggttatactcgggccaattcaaaactgaaatttgaatgaattaatatttaataaattaaaatttttgcctttttaatcgtttttttaattttaaaatttcattttttatatttgagtcataactcatggagactttttgaactaattatcagttatttatttattgtacaattttaattatttttaagagtttggcgatgtcatag

SEQ ID NO: 51020 - DNA, 1112 bp, Heterodera glycines
atgatcacccggtgcaacaacaaaaactgtttctttattagtgattataaaagccttaacatcatggtgacaaattttgatgtgacaatcggcgaagaaagagcgagaaaggcaggccaagagagagcgagcaaggcatgggaatggttattcaatgttttaccaacattcgaccgaagcattgccgatttgctttggactcacataaagtgggtttttcatgggtatgggggagttgtcaaaccggacattattcgttcaaaattgtttttatttttaaactcaaaacttttttcgttaattaactttaattttctttacatcatttaaaaaaaaaaataagttttgctaatttttgcaagtttatttcaattttaaaaaaatggtaaggttttttttaatttttccttgagacttctgatttttaagaaaattctaaattagtttttaatcccaatgatttatataaaattatgtacaaactgccattgaccaatgcaccgtgccgattcgaataaactcatggactttccatttcagtgcaaactacaatatcaattctatctccgttcttcttgagaattttgaaaaagcggaattcatttcattaacaagtgatgacttttacagtaacctttcggttttacgtgaatacggtggtggtacgggtatgtgtggtgtttcgagtgtccaagtgtatgaaaaacttggaaaatttttttcggctggcgttgtcacgtattattacgcaggatcttttttgcatcaatgtgaaagttttgttatcctgttctttgtctagattaattgctaagtaatgcttattttgtagttgaggtcccacaaagaattcaatttatgaaaaaattccaaaggacatgaaaatttgaaaaattgctttaaacgcattgcattttggagagtgattttcgtagaaaaaatttcaatgtccatgcagggatttttaaattatgcttgcttttttaaattttttttttcgtaatcaccttataactagggatgggatttatatagataggtatattaaaaaacgaaatatttaatttgttatgaaaaagataaatattaagaaaagattgaatttgaataaa

SEQ ID NO: 51021 - DNA, 941 bp, Heterodera glycines
  unsure (1)..(941): unsure at all n locations
atgaaatatgtaaaaacaattttagctgtcttctccagtcaattatcactggtaaaaattaccaccgaaaagaagttgaggaattcatgaacatcataagatatgacgttctgcaattggtattaatgaactttatataattaaaaatatttttcaatgaagaaatattcaaaaagcagattttaggttttggaattcagttcgacagcggtagcgctgaatttttcacattttaaattaaatataataacaaaattcgaaagttacgttggtaatattttaagaataaaattttcagttgactttcggttccatttgcgccaacatcacatttgaaggtgaaaaagcaagaatggagtggtatttggggcgtctttccaaaaatgctcaaatgatactcgacaacgtggagccttatgtttcaggcgaacttgtaagatgattcttttacattaatttaaaattagtgacaaatttgtagtgacctttatttctacttaaacaatttaccacttttaaaaatttatattccttaaaaacctataattaagtcttttatgacagctttaaccgattaatgattacggtataaagctttcagattttaaagttactattttaaaagaaaaagaaaaaattaggaaaaaatgaaacttttcattttgtcctttttatataaattcatttatagtaagaagtaaatgtttagcatatttttaaataaatagaaattttttgttaattttaattaaatatgttgtttttattttaagctaaaatcattccccaaaattgaaaacgcagttgctaaggaagttattgatgaaatgacgtttactcagcccgttacggacaacgcgacaatcttccagatagctacaaatgtgttcgagattcttgatgaatacggccatagaaagtcagcttgtatatttanatag

SEQ ID NO: 51022 - DNA, 1005 bp, Heterodera glycines
atgccaaaaattgcgggtgttcatcgccaccaccaccataaacaccaaatgaatggcgcacataagcaaaacaaaggaccaaatggagcaaaaaaagaaaagtataagtcaatggccgcgagggaattgggccaaaacgtgcgaaaggatcagcaaaaagggcacaacaaacagaaggccaaagtttgttgggataaaattcgtcatgtgaattgggcagaagaaaaacaaaaagtttttcggcaattttttccaggcgaatgtttgaatttttcatttaattccgctttcataattttaatttctcagagaaactaaagattctataaaagcttaattgattgaatcctgagaaatttatgaggaattatggggaaaatattcatgaaagcgaaatttaagaaatgaattccaacgcaccaaatggagagaaaagataaaacattttttgatttttaagaaaaattcgaatagaaagaaaaaggaaaagaagaaaaagctaaaagaaaaggccaaagaactagcggagaaagcacttttgaaggcattggacaaagtgaaattgggaaaaagtgaagaaaaagagaaattgaaaagagcactgaagaaagagatgggaagagaagaagagaaagaaaacaaagagatggaaagagaggaaaagaaacagacagacaaagagagaaagaaagaaacggaaaatgagaaaaaggaaaaggcagagagagaacaggtaaatgaagagattgatgctcgagagtctcggtcagaggtctcgtcggcccgagaaaagtctcggctttttggggactttggccacggatttattaacggactttttgaaacacagctaatttaaaagaaaaaattcaacacctaaaaaatgacattttgctaagtaagaaaatctatttttaaattcaatgttttaatgaggctttttaaatgtataagaaaaagtctcacttgggtcatgggtctcgggaaacgatcataacaatacta

SEQ ID NO: 51023 - DNA, 460 bp, Heterodera glycines
atgacagaaatattagccaaagtatggaataaaatatgctcagtgtcatcaattgtttatctaaaaaatggaaaaatatgtgaggctaaattttcgtaagaattgggaaaataaaaaaaaattaaatcgattaaaattaaaaaattcagtaaattacaatgaaaaaacagcaacaaaggaacaattaattaattcaacatataaaaaaagtatatttaaaacaccatatgaaatcaccacgagagattaaaaaaaattagcaatgaaaaatatgtaaagtgaaatttgtgaaagaattggaaaaatcaaattaaaacgtttaaaaatttatatcactgtaattagttacataaacactgcccttataaaatgtacataagttggagagaattaattatgcaaatgacataagaattgataattatttatgtttaatattttatttattcccttaaataaa

SEQ ID NO: 51024 - DNA, 701 bp, Heterodera glycines
atggtcaactacgcattgcacaaaatggttcccgttttggtcggtgaccaaagtgttctcgtgtcctttgaactgttggcagaacaattggcggacttgggacccggacaaattaacgacgagctaaacaaaatgggcataagtatgaatcaaggacgtgtctcaataggtaataatgtctttttttcggtggaccccaaaactcagccgccgaaactcagccgagacataattcaaattttcaagaaattttcagcgattttttttttaaattttttgaattcttagtaaattttgaaaaaaccaactgaaaatttctttttaaaaaaatttattcacggctgaattatgtctcggctgagttttggtcggctgagtttcggcggctgagttttgtcctgctccgtctttttttaccttctggacaatgcgacaagcaaaacgattgagcaccattttaaaggcgagcggacggaccaaattgagcaacatttgattggtttcttttgaaccgttctcaactaacttctgaaactattgttaacgaatctgtttcagtcccaaatgtgatgcacctgaatgacgaaacatccgttgcaatcgatgcacaattgcagaaagcgttcttttccaccgttgacaattgcacacaaaacctggaaaattcacaacatcaacaaaagacgttctctgccaaatga

SEQ ID NO: 51025 - DNA, 1128 bp, Heterodera glycines
atggttgtaataggtcaaattgatgctttgaacgacgtatttgcctttgttaccgatgttaatggcaaggaatttcgtgtcccgcgggaattgtaagttattgcgtaaataatacaacaaaattccaccaaaaaaggattcgtgagccaatgttcggaaattactatcagtttgatggcacttttctggaaagtgatgttcttgagccaacttctgtcacggctttggctaatgacagcaaagcgttgttggacgcccgggccaaactttgggatgaaaaattcggaaatgacaaatgcacattgcagaaaatcaaggaaatgggcatcgattcgttagtgaaaaagtagggaaaacagattgaacatgacaagaaaagtaatttagaatttttgattcgtctgtgagcgaagaagcgatggaagagaatgaaacggagcaaaaggcaaatggaaatgttaaggtgggtcgagttcgccatgacgtctgacattgtaattcgctttggtttttcagttgcacgtcgaagtaaagcgaagcggcagaaaaaacaaaaacggggcggagatttattgctcggacaattttccattggttatcgacagcagtggcctcttgaacagattcttggaggatgagccaatcataagacacgcgccggaccgaaaattcggtgtttggtgcgcgccgcgaaaatattcgatcgacggaattcaatggaaaattgtgcggattgatccggagagcaaaccaaagaaatcggtcccgaacggagttagcaaaatgaatgggcgcagcaaagaatgtgtcagcaatggagggcagactgacgaatgcatttcgagttctccatcgaccgttccttcgcttccatcgacgactgttcgaaactccccgaaattggaggaggaggaggagaaagtggatgagaatgaactctttgagggactcatctgctcgcaaaatgaaacccatttcctcgtcttttcccctgggcgtcgttggttgggccgtttggacaaggcaaagtgtggcaaggacagtgcgtctattctcgggatgtggatccaattcaaaatgtaataaaatattttcattccataagaaaagtctctcttttcagcaaga

SEQ ID NO: 51026 - DNA, 715 bp, Heterodera glycines
tggtgcatattcgtttaatttgctcattgaaacttcgggtgggtaattattgcataactgaatgttccgtcatttatttacgtgttctgaccacttctttattcaaggcaccgactcggaacatgacttagcgaagatggaccgattcctcgaccgatgcattggcgacgcattggctgctgacggagtgctagcgaagaatatgtccgaggctgaacacatgtggaaaattcgcgagaattgctcattgggtcttcgccaggacggttacgtgttcaagcacgacatttcgttgccattagaacacttttacgaggtgacagagcaaattagggagcgcttgcgtgagacgaacgtccgacgaatttgcacatttggccatttgggtgagtgaaagatgggtgccatttacttggaactcaaaacaggcgatggtaatgcccatctcaacgtcaccgtgccaacatttgacgaggacgtttaccaaaggtggattaattgtcggtgtaaagcacaagttcttttttataggctttaccccttcatttatgaaacagtggcctcaacaggcgggagcatttcagcagagcatgggataggactgttgaagcgagaataccatcacaaactaatcgaccaaaaacggcgaatgtttagttctggtattaaacgactgtttgaccctcggctgatattgtctccttacaaaatgata

SEQ ID NO: 51027 - DNA, 845 bp, Heterodera glycines
atggcattattaaaatgcgctatcatccgggggttgcttcatacattcaatggtcgacatttgttttcaacagtcatcgaacggagaggagaatttgccgaacttactgaagatgatctgcggaattttcgtggaattgtcggcgaccgttgtgttaagacagaagagattgacgagtgaatgcttttctcttcgttcctgttcactttcaattttaagatacaacactgactttatgcgttggtacacaggtgggatttcatttgttcggagttcccaagtgtgcttatttccaagatttgtgcttatttttgggtttgaaagttaaaaaaaatgcaaaatttgagctctagtattatatttttgttgatttttaatcattttgaataaaactgttcaaaaaactggtttttgaccccaaacgatgatttttgtcggccaatgctaattttgaaaattttcagttcacagctctggtttttacgctaataaaatatttattaagtcgatttttcatgtttttattgcgttttcttcgcgctactattagttttggaaaaatcttatttttggggtccgaatcttagtttttcagccattttgtcttattttgaaaatagaaacttgggaactctgcatttgtttgatttttctatttctcactgaatactttttttagtaatttcatttccgttttttggttcataaatcccattttttgcaggtcgttctcagtgtgttctccttcctcagtccgttcagcaagtgtccgctgtgcttaaacattgcttccatcgtcggttggccgtggtgcctcaggcgggcaataccggattggtcggagg

SEQ ID NO: 51028 - DNA, 587 bp, Heterodera glycines
  unsure (1)..(587): unsure at all n locations
atgaagttaagtaattaataaaatgaaaaatataaaattacccagcccttataatggagcaaaatttgatttgaaaaaatgatttctcaccagtaggattattcaaatcaattttttacttaatataatttgttttttttattaaataatgatgcaattatttaaaaatttgttttaaatcccacacctagcttcctgtgctttagtggtttatcaagcgacaattagtaatttatgcttgagagtcttggtctcgggatcgagtcgcgatgtcggtctcgagtctccggaaattcgtcatcttgagcatcattaccaattacaaatatacatttttttgctttctctaaatgtgtccaggcacaaatgattctgtcccttatctatctatggcccttagctggggtgaaagacggcattttgtcatgacagagaatttatccctaggatatacctaaaaattaaaaacaattgtgatctttagaaatcaccgcctaggctctccccttataaaatggnantgnantgttnatgttnagataaatnaatnantttgaggnggtagaaggatggaanaaaagaataaa

SEQ ID NO: 51029 - DNA, 211 bp, Heterodera glycines
atgctaattgcatttgtaagaaatgatcagaaaatgcaaatcagtgaatattcaaagcaaaaatatgaggcataccttggaactatttattttatgagcaagaattggcaatgtgacaaaatagcagatgaatttaagaatatgaacggacagaatgccaaaaatttagctaaatatctggactattttgtacgagatatttgtctagaaa

SEQ ID NO: 51030 - DNA, 732 bp, Heterodera glycines
atgatgagcgacagaaagagaggaacaaaccaaacgacgaaaattctgtgagttaaagcaaataaaataaaaatgataatgataattcatttttaaattttacaaataattccttacaaattaggtaatttcccagttttaagtagagctgagcgggactggtactgaaaaaaggtacaaatgagtaccaagtcccggtttttcccggttttcccagccaaaaagtcacggtcccggtttttgtcaaaattcccggttccgctcattgtcagctctagttttaagtcattgttatctggaatttcccaatttaaactgtccgatcaaacaaaagcagggtgcggcgaaagctcccaagtctttctgatcaattgggtttcgtctgatcacccgttttttgtcttatcatttgtttttcatctgatcggaaaaattgtgaagtcctgcaaaccctgcacaatcacacgggtccatctgctgattattttcctcattttcagcattttaccactgaccaatcgttcggtgcttccgtttccggcgccgcctttaaaatgcctttcgacgagtgaaagtgaaaataaaatggaaaacgatgagccaacggaagcggcaaaattggcggaggaatttgccaccaaaaatttgacgacgaaagaacggatggatgccattctgaagatgatcagcggaagaagcggagaagaaggagcagaggaggaggaagagtaa

SEQ ID NO: 51031 - DNA, 274 bp, Heterodera glycines
atgatcaatctgagctccgacaattggaccgggtgccattcggccatttcggacgcactttcgcgccattccaccggggcggacgccgcgtatggcgacagtgagctggacaagaaagttgagaggagattctgcgaaatttttgagactgaattggctgtttttctggttgggacaggtgtggccaaattggcacttttcatggctaaattcccactttttgccccaggcaccgctgccaatgcgttgtcaatggcttatgtgaatcgcgcgg

SEQ ID NO: 51032 - DNA, 1550 bp, Heterodera glycines
atgtacacttgtgcctatgtgttcaccaactccgacttcgacttttacacgtcggccgagcttctgaacatgcgtgccccgcccttctacggtaataccgtattcatcggcctgaataaaagtctttcttcccgggttctgtttctttttaccctcccaaattcgtccccggtgcccttttgtcctttgtcccaatgaatgccatggttattcatttcccttctcagcttggcaacggcatttgttgttcgtctatttgggtgctcagttggccgttttcttggcacttttctctctctgtctgtccttccattggccctctcgtcgtctctccgccttttccttcgtcgctttgatggccgttgctggtgggtcaatgaatcggcggtgttttggccatgccaattcgctttttcttccacagttttggcacattgcgccgccactgtcactttcgcctttctttcccaaatggtcggaataagtgccaataaattagtcaactaaatgcccccgcttctcaggtcgaatatcgtttcttccacgtcagcgtcagcggaatttacgaggtgttttttcaattattctgttatgactttctccccccccccgccttttgattttctcttccgtttctaattttggcattttttgtctgtgccaatgccattttcatttgttcgcttcagaaacaccgcggctattcttttttcgtcgaatgtgctgccatctttgtgctattcagctcgttaattcctgcactgcttcatctcctccgattgggccgcgccgattcgcccccgggccaacaattccactccaagttacagtacacccgtgggacctctccaccgactctcgtcacggtatttttaattaattatttgagctgtttagtgctttctgttccagcaaagggatccaagcgaagagcagcagcagcagtgggaggcgcggttcgccatgcgcgagttgccgcctctgccgcccgtcgcgggctttcgatgggccgactgatcgaatgatcgacaaacattgacattttgatcgggtgatgatctcaatatgattgatgccttgaagacaatttaaaattgcatttattcacattcttcgaaaagtgaatcttttgaatattttccaccaatttttcttttgatttcttcgttttgtcctttggttgaatttcatgcaaatttccccccccccccccgccaaggacaatcgatagggtgggcaaccaaacggcggatgaatgatatgccctccgcgcttgccgagaatattgccaattaaaatatccacacttttatttatttttatatgtaattttaatttctaaataatttctctaagtaaaaagtgaggagaaataatttttaaataataattattttttaggaaaattaataagatttgattaattttgcattttcaattttttgctctgtattatatttttatacaattttaatcaattttaccatttaagattcatgacgtcgagaaaaagcagtttgcattgccgcaagcgatgaaggaaaaataaa

SEQ ID NO: 51033 - DNA, 833 bp, Heterodera glycines
atgccggccgaccagtgcaaggacgtgctctatttgacggttgtgccggacgtgaacgtgatcgcctccaagtgcaaagtgtacatggaggagctgagcaagtcagtccaatgggccgctcttccatcacaaaatttggctaattttttttgttatctttagcatgtatgaacggcgttgccgactcggcatccacgtgcccattggcatccgggaggcgccacgggacggcattttccgtgtgggtcgcgaggagagcaattcgctcagcagcggctcaacgccggcagccaccgtcgcaattcccacatttccgcactcggtgcacgccatgttcatgcagttcgagcccgagtttggtgacgacatgcagcccagtctgcagcgcttgcgaatgtccgtgttttaaaaatcaaaattctaaaaataaatctgtttttcccattttagctttgtcgagtgctgctacgccaagttgtgccgcttcttcctgcacaacgaccatctgtttgagcgtcgcgccttccacgagtccgcctatcgacagcagcaacagccgccccagggcacgtcgttggccacggtgccggacacggtggcaatgccgcccccggctgtaccctccggcggaagtgcgcttggcaccatcggcggctgctcctcggcgggccctcagtcgggaccggcttccgctaccagtacaatgcttcaccatcatcacaccggcggtcccggctcgtcctcctcctccggctccgtgctgcactcgtcgccgatggcccaacaccaacaccagacttcgcccgccacgggcaacaacgggcccaactcgg

SEQ ID NO: 51034 - DNA, 1277 bp, Heterodera glycines
atgcattgccttttctcaattgtctacacgattctgaccatttttatggttgcgcacacactttccaagggcaccgtgggcggccaaccgatgaaaacagagcgggtgagttcggtataatttagttggttcgggacaaaggaaccgcagggaatatttttatatccatgagtcatcgtcgtggcatggcattttctgcttatgtggtcgtggcatggcattttctgcttatgtggtcttgaccgtggacatttttgattatgccggtcttgaccgtggacatttttgattatgcggtctcggtcgtggcattttttggttgtacggtcttagtcgtggcattaaatgccacggcgacgactcgtatcgtgctatggatgagttgggtatatggatgagttgggcatggatgagttgggtttggatgagttgggtttaccccatccctaagaaatgaaaatttctcaaaaatttctcttcaatccctaattttaagggtttgagactattttccatttttagtgcttattttggcggtttttgagctaaaaatttttaaactcacatttattgggcaaaatttagtcaaatttacgaaatggccattcatggatgtttcaattccaaatcttggccgtgtatgcccctgaattcctcgcactattaattaaaaacgaacatgaatatgtacaacccattatttatcttcattttgtttaagccagcactttaaattataactgtcactcccaaaagtgaaagatgactgctaaaaatgtgtccccatcttccaaagagagcagttgttcaaggacttcttgcaactctgacacgagtgaaactcgtccactttccatttgcaacgcgcaatccatcgtcaatttccaaaagtcattgcgcgtttacaacggcaaatcggtattttcttagttttttagttttggctttattgcaatttacacgaccataaaaaaatagtttttgcccgatatcgaattttcttggctattttattctgctttattttcttacattattgctatgctttagccaaattatgcattaaattgaaaaattagtaactttaaaaagggttccgattcgctattcgaaatttgtccatcatccagaataggttacccatttattattttggtgtgcattatgtgattttcgaggacgctactcagatttgtcacatgatgtcacctaatctaatattttcaaatctcggttttttcaagtgtctgttttctcaaaaatgcgtcaaaaataaa

SEQ ID NO: 51035 - DNA, 1026 bp, Heterodera glycines; identical to SEQ ID NO: 20495

SEQ ID NO: 51036 - DNA, 1197 bp, Heterodera glycines
ctcaaatcccctttgcttgtcctttgttttgtggtcccttcgtccttttccgatccgtgtccctttttcggcgattaccaatgccccgagggctttcactgtgcatttgacaaatgccaagatgagcaggggattgagccaccgggcgattgtgccaaagtcagttatgcgcctcaattaaaacgcgaacgcatcggatagatcagatgtggcaaggaatcggagtgtcggcaaggcaaatgcgttctttatgtggggcgaccgtgcggaaggaatgttttggtggcggagggattggcccgtgcggtggtatccgattgtgggccccaaggcaaatgcattggcgggcgatgtgccattgacagtaagcgaaagaagcgaacgatggcacaattggaaattgaaaggatgtgcggacacagtctgtgaggagatgagcgagctttgccgggatgggatgtgcatgcaattgtcctccatgttctgcttctcgcccttcgattgcggccctccgtcacttttcgagtgccatcaaaacaaatgccaacggcgtcgcgacacaattgttccagttttttcaccatcggcacaaaaatgtgaccccggagaaactctcagcggtgataaatgtgtgactcaggaaggtaatcagcaacagctggtcctcttttattcccactgcttaggatgtgctcaattggtttgctcatccggccaaagctgtttcaatggcttttgcgtcccgacaagcaattccaattgcgctaattccggtgaatgtgccgaaatgaatatttgtcgcgaaggacgctgtgtggcggacatttgcaaagcaaatggtggcagatgtctgccggagaatgcctgctctccggtgagtgtgcccgagggcgagtgccgtcccttccagggcattccgtgttcgctctctgccgctgccgaggactgtcccccgccatacttttgcataggcggaatttgttcaaaagatggtgagtggcagtgacatggcaacaaatacaatgactccccgccaaagagtgctttcgcaaagtgtgccaaatcggagaacgatgcgacggcggaatttgcattcgcgtggagggcaacggatgcagagacgcgatcagagagtgcggggagcacttcgattgtgtggccggctattgtaaggacagaatcagcgcgtacaaagag

SEQ ID NO: 51037 - DNA, 286 bp, Heterodera glycines
atgcccttagatcggttggttgccttcttatccataaatgtgcatccgtttctttcctctgtctctaattccacaaatcccaccacacaactgagcacgagtcaaaatatgtaagttcagggcgtccgtagctgtactcgcggctgctgctgctgctgctggtgccgaagcagcaacaacagtcaccactgctgctactggaattgttgaaaatgaaaatgtctcctccaccccgtcgcccgccgttgtcagctgcagccaaaatgcacgagcaaatggcgattag

SEQ ID NO: 51038 - DNA, 910 bp, Heterodera glycines
  unsure (1)..(910): unsure at all n locations
atgccaagaaaatcattgaacatctcaccccncaaacggaagaagaacggggatcagcaggagcagcaccaagaaagcaacaatgacaaggaaaaatatcaaaaatggcttgaagaaaatgctaaattatacaagacagtctacgcacggttgtttcctcaaaatgatgacggtaatttacagggctaggattttaggtgctaaaaccgaaaaataggttgtaatcctaatagatgctaaattcgattgcaaaattatattcaaacaaatttcaagattttcatgagtaaaaagttttcgattgtccgccaaatcatgaccaggatttttgatttttgaaaaatcgattcttagaaaacctaagcatagtcctagttatttgttttaaaatggctaaggcgagggacttacacctactgtgatagtgcataaaaataaattttaattagcagttttggtggtaattagtagaggaaattcattcatttttcttttaatggcatatgctgtattctgaacattgcttaaattttttgctttttaacccatcagatgcaaaaaagggacggcgtcggcgtaagcgcggattcagaggaggatcagaaacttccggctgttccagaagccgcgtggattggagcgcatggctccaatgcatcagcctgattctgctgatcatcattctcatttgtctgatcattgccgcactaatcgccatttgctcgtgcattttggctgcagctgacaacggcgggcgacggggtggaggagacattttcattttcaacaattccagtagcagcagtggtgactgttgttgctgcttcggcaccagcagcagcagcagcagccgcgagtacagctacggacgccctgaacttacatattttgactcgtgctcagttgtgtg

SEQ ID NO: 51039 - DNA, 778 bp, Heterodera glycines
atgataattttatattatttttttatctcatatactggtaaattcattcattattatcatattctattaatattgttaaaagtaaaaaataaacaattataattctttttttatttagtgttgctttgtatgggattatcaacaaaggaattgaaagatttgaacacacaaattgatataattaagcatgaaataactgaaacaattgggagggtaattttgaaaaaatattttttttaatttaaaaaataatttttaggaaaatgaaggaaaagaaacgatggatgacaaagtgatcaaaaagttggaagacattgccaatgccaaaattgtcattgaaacgctgagtaactttgccataaatatgacagcacaagattatgcaaatttaatgttttttgagaaaaaatttacaattcccgaaatccaagaggagcataatgccagaaaagaaatgaataaattgcaaattttgaaaaaggaattggatgacaaaattgaagaagccaaaaaattctggaagaaaaatggaaaaggacgcaaaaatcaaagccaaacagaaattattgaaatgaaagtgaaacttgagttgatggatttgatgaaggaaagcaatttgctaatgacccgacaatacgaaaacttagcgaaagaatgcgcaaaatttggagaaacggaaaaaaatgagtggggcaaaaaattggtggaaatgtttctcaaaagtttaaaagaaaagatggacaaattgagagaaaaattaacgaaaatgattggatga

SEQ ID NO: 51040 - DNA, 1716 bp, Heterodera glycines
atggacagtggtcataataatcaacgacattacaactttcgccgccgtgtaccagtgaattatatggagcaggagtcaggttcatcacaatggtctcaaaatttggggaatttaagaaattctggacagcaactaaacgaaaacactcatgcgattgtgcaaccaaacaatgcgcagggaaatttttccaatcaccccctcgaaaatcagcctttcccggcccccgctcaaaatcaatcaaaccctcaaaactctaaccatggacagcagcagctcgcagtccctctgaaccctgtcataaattttttcggcgggaacgagcaaaacattggaaacccccgtgcggcgtcaactccaatttcaccgcacatttcttttcaagaagggggcaactattttgtgaattttccccgggaaatgcaaaatcgagatcttgttcagaaccgatataatcataaccgccaaaatcccgcacaaaatttttataaccctcgcgtgtttgtgaattcacagcttaaccgaaacaatgaacggccaaatcgaaacgagtttccggttcgggactcaaatcaccgaatgcattcacaattcgccaatcaccaaaacgagcaatactcggctcgagatgctcggatgtaccaacatttgtcccgacaagaggcaaattcgaattttgtgcctccattgaacctgcaattctccgaaaatgaaaaccgacacaatcatggccagtttccgaatccaagaaatttccaacaaaatcccgaaatggtttatgcacagataaatccccctgtttaccaaaaccaagcgttcccagcccaaaccattcccatcccggacattattatggaattacacaaagtcacactctccaaccaatatgcaaacacaatgagagaaatcccaatcttgaacggaacggaaggaagtgacaaaatcaatgatttcttcctgactgttgaaatgtgtgttggagagtggcgacatgaaaaaaagctggaaatgttgaaaacgaaattgaagggaaaagctctgagggcacttaacatggcactgagtaaatttggaaataccgcgccattcgagacgataaaaacggaaataatgtcgacattgagggagacggattacaaggaagcaagtgcttttcaggaacttacacagacggggaaacgaaaggagggcgaaagtgttatgaaatttggtgaaagaattcaaaggctggtaaattgtgcccatattggtttaagtgaggcacaaagagacgaaatttccaaaaaatttttcgttcttaatatcaatgacacgaacatggcaaaatttttggagtgtcagtcaaaaccgtcccaaacatacgacgaacttttaatggtcgctaatcgtcttagtttggttgaagagaaaactgaggaacgttcggttcaaatccgaaattcacaaaatccattccacttgccaaacgcgaaccaaatctcataccaaaacgaacaaagtcgttattttggtcaaagaaatttccaaaattcttaccagcctcagccaaaatattttggaagaaccgggccaccgagtcattcttacggaaacaattttggaggacgaaattttccagtgaatcagaattttaaccggtaccctagcaatcagcaaaacagaaattttggcaacgaaagggcacagagtaacaaaccgagacaaaacgaaaagcattga

SEQ ID NO: 51041 - DNA, 981 bp, Heterodera glycines
atgacaaccatcgacaaagaaatacaatttatcaataatgaaattgtcgcaaggtggaaaaaagaaagaaaaattattatggaggcagatcgtttagtgtcatattgtaataatatttctttctatgcgaaaatatatatgatcatcgcatttagtgctccaggaatacatcaactatatgaaaaaatattagagatagcgcaaaatattaggctactatatctacaaattttaaatgaatataaaaatatttcaaaaattcttcgtgataatgagaattgtttaaaatataaaaatataaaaaaatgtcaggaaaatgagaactcttcaaaacacagcatggcaacctgttataaatacaggaagcagctgagaaaatttcgtacagaaattgatgatttattcgaaaatattgtatcattagctaaaataaatccgccagaagaatctatcaaagacaaaaatgataataatcgtaatgaaatattttttacaccataccgtaggaaccgaattatacatggacaacaattatcagaaatttttttgaattgaaaattaaccactaattactaaataatattcgtcttctaatgtggtaatgcggttaaataattatatttaacgtatttaaattttaaaaatggatttattaataaactatttgtaataatttcttatattatagactctaatatgttgatgcagtgttgatttcaatttattctgttttctaattggtttatttgttatattacttttcatttgaactctcatgttttttatttatttatttacttgattccctcattctcctttacttttcttcagtttatcctcactaatgatccaaaacaatgattattcaaagtatttcaatatatatctaatcaataatttttaatatttttttaaatatttcgtatacaaaacaattcaaaacaatctatcttgctgtttaaaaaaagaaaaaacaataaa

SEQ ID NO: 51042 - DNA, 516 bp, Heterodera glycines
atgtcgataaatggttcgtgtgtgaaacgttttcccacgaatttaaaatggatttctctcaaggaaaagaaagtcaatcgcgccgaagtgatgagtttggctgaacagattattgctccggaagtgaacgacaatgagctttttgacgaaattacggcgctgaatgaaatacttgaaagtatttctgacgagaaatttggcgaaatgaacgcagaacagaagtggatgaaggttttcgaggcggaattacccaatcttgtgttgctcgtcaacaaaattctttcaattcccgtgtccaatgcatgcgtggagcgcgtcttctctctttgttcagctcagttgactgatgtgcgcaatttattgaaagttgaaaccgtgaaaagtggcccaaatcaaatcgaattatgatctcacttgcactgaaatgtacgatttgctcatttcctcgccaaaattgttaaaaatgatcatgggaggtgaaaaatataatatttaatacatttttgattgaataaa

SEQ ID NO: 51043 - DNA, 691 bp, Heterodera glycines
atgaaagcgagttgtctgactggtgcgtgagttacattttttaagaaaattatgagaaaaatttttgacaaattttttactcgtgaaaagggatcacaattccttttcaatttttttcgataaaatcctaatcaaaccaaatttccttgggtgtctttcattagctcttactttttagaaatccttcgaaatttcattcggaaatttggctgggcaaaagaaagttaaaactaaaaagttgtgaaatttgattaacttgagtttttcgagttattttggtcaattttttttttaattttgcaggtttaagaacagattaaaaattaacaaaaagaccaaatgtttttgatttatttgtttaaaaaataattaaggggtgcacatgatgaaatggaagaaggaaaagaggaagagaaaaaggaagaaggagcagatgaagagaaaaaggaagaaggagaagaggaagagaaaaagggagaaggagaagaggaagagaaaaaggaagaaggagaagaggaagagaaaaaggaagaaggagaagaggaagagaaaaaggaagaaggagaagaggaagagaaaaagggagaaggagaagaggaagagaaaaagaaaagtggttgattagtgacaaagggtgaggattagtttgtcaaaagacaattctagaattttgcaatagaaatttattaaa

SEQ ID NO: 51044 - DNA, 552 bp, Heterodera glycines
atgaagaggtgcaaatgtgatttaaagaggtacaaaagtgataaaagatacaaagtgataaaaagaggtacaacagtgattagaagaggtacaacagtgattagaagaggcacaacagtaaatagaagaggtacaacagcgattagaagagtgattagaagaggtacaacagtgattagaagaggtacaaaagtgattagaagaggtacaaaagtgattagaagaggtacaacagtgattagaagaggtacaaaagtgataaaagaggtacaatagtgattaaaagaggtacaacagtgattagaagaggtacaacagtgattagaagaggtacaacagtgattagaagagttacaactgtgataaaaagaggtacaacagtgattaaaagaggtacaacagtgattagaagaggtacaacagtgattagaagaggtacaacagtaaatagaagaggtacaaaagttaacttgttatgagatgtacaaaaataatatcataattttatagaattaggtttatttaaaaatttaaaaaaaactaaataataaa

SEQ ID NO: 51045 - DNA, 1788 bp, Heterodera glycines
atgaactataagatagtttttcaggtttgagttaagacttttttggggcactgtatttctctcacaaaaatgtgatttgattgggaaatattaaatagtaaatagaaattataattatggccagcagatctaattaatagattaaatagttatattattaattaattaaaatcattattcggtactgaaatgacccgccccttccgatcaccactcattcggactttttgcacttcgactcaccacgcaaaaaatcctatggaaatttatttaaaaattggaatgtaaaatgaaattgactcgcttcttcgagtttttaaattttctgaaatggatctcaaaaattgacatgtccaaaccctttttggggaaggggtaaaatttatgcaaaaaatcctccgacaaaattaattcctacaaaaaataaattaaataaaatgaaatttaaattctaatttaaaaaaagcatttgcagttggtacggacaaatctgaaaatttacaccgatgggaacatcgacgaggccaatgagcagctgcgggcggcaatccgtcgcatttggaagcgaacgccgattaaaatgctggacgaagtggtgccaccggcgggaagtgagtggggggggggggggcggcaattaattaattaatggcacatataattaacattaattaattaatttataataaattatttattttttatttatttatttattaggtagttgaatactttattaataaaacacataatattggctaattagcagggaaaatataataattaattaaatatttatatttatcagacatttttgaaattgctaattcattggtttaattaacttaaattaaacacaaaatttaatttgaataattaatttttaaacaaagtataaaatttatctttttaaaatttattaactttactttttaggacatatttaaaaattcactttatatttattgatttaaattaaaactaaattattatttgaataaataattttggaatcaaaattaaatttttctttctattaaacttacttttttccccaattaattcattttcttttacaggagacgacgaagtgaccgtgggcaaattctacgccacctttctgatccaagactatttccgacgcttcaaaaagcgcaaagaattggaggccaagggaatggcggcaccgaacactcacgcgatggcactgcaggtgatttggccggccgatcatttggtgccaaaaacgaaaaaaggggcaatttgagtaccgcaaatcgagtcctaccattggcatatgatggattttgtccagcaaagtataaaaacaggagcaatgatttccaagatggatcccacaaccttaaatcttggccaaaaatattttggttttattttgaggcaccgaaaatgaaaagcaggattcggcacggcacaccaaattggaattatttatttatttatttaaaaacacaaagtctgcccatgaatcagtccatgcaaatctattagacaacatttttaggccggtctgaggacactgcacgaaattgggcccgaattgaagcgggcgatcagtggcaatttggacccggactttgtgcacgaagcggaggaaccgcagcatcgggtgaaaatgcatttagtttacatatatttgctaatttatttttattaaattattcttttttaatttaaatatttttatatataaattttttgcgatagttttttaactgatttttttcaattcaaaaatttaatcgcattttttagtaaattattaaa

SEQ ID NO: 51046 - DNA, 890 bp, Heterodera glycines
atgccatgcgttatctgtccggcgggcccgccgggccaacggtaacatctcaccagcagaatatataaaataatatagtacgataaaaatttatttgcaacgagaaacgaaaaaagcaggacggaatttcccgaagcctttttccctttcccgtaaaaattccgttccggcaaaaaggcggttaacaggttcacagggcttcgggattcccgggttttccggcgggaatcccattcccgccgatttctataaaatatccaaatggaatgttattttgtatgcaattccagaggctctcagggggagcgcggacgtatcggagaggcgggcccatcaggcgaatacggctcagagggtaaatgcaaaatttactgttagattccatacggacacagcgggagaaaaaattttatgttttcaggcaaagaaggaattatgggcccaaatggagcacgtggttacgttggtgccatgggaataaaaggggtgccgggcaggcccgggctgcagggtgaccaagtggtggcaggcaagtgacagtccgtccggcagcaaaaaaatgaacgaacattgcaattttaaggcatcggcatcaaaggacctccggggcctgtcggagcatcaggccccaagggtagggagcaatattttttgggaaaaaaatgaagaatatatacattgccaaactatgcatttgaacagttaaagcctaattggtcaatatgggctataaatccgggtttttctgtcgagaaaaagcggttgaaatattacaaatcagggggtaggattaaattgctgtacagcaattccgggatttttggccggaattccacattatagcctccgaacaactcttgatacacaacataatatgattcatcaataaa

SEQ ID NO: 51047 - DNA, 874 bp, Heterodera glycines
atgggcattctctgcagcacttgtgccctgctcgttctgctgttcctcgtgccgataattgtgcataaggcaaacattttgcgtgcagaacttgaggtgataaatgacaaaatgccaattgtctatgttagcatttggagactgtaaatgggctcaaagttactgttaaaaaaagaaaaagttttacctgtattaagtctagaccaaaaatcacaggaccgaaaaatcattttctatttaatggcaaaaaaatttttgctatttatttttattttcactatatctgtattggatcaattgtaaatgggtcaaatcattgatcaaagaatttatttcgaaaaatttcgttcattgattgatcaatagattattgatgcgaaacacatggtttgatcattagtgattcatcaccattatcccctcatctgcttgtttaggaaatgtccgttcgattcaagcaaaactcggacagggcgtggcaccaaatgatccaaatggagccaattaatgataacccaacgatgcatacaacaattgttgcaagtcgaccggcacgtgcatcgtggaacaaacacttctgccaaggctgtcattcattggcatgcgcaagtggcacgccaggaccgaacggcaaatgcttacagcagaataaatattaattatttcaacaaattaaatattaattatttcaatttccttggttttcaggtcctccggggcctgacggttcgcccggagaggtagaataatgcctttttacatgtttttatagccaaagttcccgatcataatagtgaatttttaagcgggaagttaaatcatgcatgtaaacaaaggtttttgggaagaaaaaataccaaaattttaaaataaa

SEQ ID NO: 51048 - DNA, 1530 bp, Heterodera glycines
atggaaatttttactcgttttcttcacttcaacaattccctattcacaacaattatttgttcgtctccaagtctcgtcaaacgtctgcatttattgttcatcaatccttcatcggttgccacccgcgcgcacttcaaaatggacgccctcaaaagacttgcgagccgtgcacggcaggtaaaaatgaacagattctggggagtctatttttaaaaaatgccatccctgcacatttcagaagtcggcggagatcattctgagcgcggagaagaccgaaatcggtaaggagggcatttttggatttccaaaaatcaaaaaaaaaaaattccccaaaattcaggcgccgagcttgaacaattgctgaccaagaccgacaagacggaggagcacatgaagaagctggtgcatgccatcgaggtgtacctgcagccgaaccctggtggacacttggaatttgcgcttttttgaggaaaacactaattttttcccccaattttcagcagtccgagcgctggacccgcgaaaggacaaatccggccgacagaacacgctggacggtcttggggaggcgatgaaggtgtggtttttggcattcacaacacattttaatgcccaccaaaatttaaggaagcagcatcgaaagcggtgggcgccgagtcgaccttcggaggtgagagaatttgaatcggaaatgctcaatttaattaaccccactaattgcattttctgttcttttcagccattctgctgaaggtgtcacagacggagtccaaaatggcagcaggggaacgccaactcatccaatcggtcaccacgcaaacattggcaagcctccgacacctcctggagaacgaactgcgcaccgtccaggcgtggatttgcaatttttcactcaattttcgacaatttttaatccaaatccctcccttttcctttacagaaggaacgcagcgtgttgaacaagaaacggttggatttggacgcgacaaaaagccgttggaagcgcgcctcggacgacaaaaaaccctctgtacgtcgtgttattttcgtcgccgactccatttttcaaccattgactaattccactgtttttcaggttgaggcagagttgcgcaaagcccaagacgaatttgacacccaactggagaccatcagcactgcgttggaggctcttcaaacggccgtggtgagaattttacacccagaaaaaaaattgtttgacaaaatttcaattattttccaggatcgtcaggctgaacaattggtgcagttcgtggcggcacagatcgaataccacagcagcagcctcaaacttctgaaggacctgaagcgcgacttgggagcctagtgattgatgagcacaacagcagcagaagaagaagcagacggatgatgggagatgaattgccatggaaattcatattggacatacccatatttgtgtattatactggattaatccaaattgatgcgtatatagcgtatatattacttgtaacttgtactgtacataattgtgtgtataataaa

SEQ ID NO: 51049 - DNA, 1510 bp, Heterodera glycines
atgcccatttctccaacaacgcccccttattcgccgcccaagaagcctgatgatgctacattatcgcccctcgagcagaagccagttgataaatcgccgcttacgaagaaatcgaaggcaaaatctccgttcaagaagaagcttggcacgaaaccttcaaagaagaaggctggcgccaaaacaccgttcaagaagaagaagcttggcacgaaaccttcgctgaagaagaaggctggcgctaaaacaccactcaaaaaggagccggaggataaatcgccgcttaagaaggagccggaggacaaatcgccgcttaagaagaaactggaagataaatggccgcccaagaagcccgacttttcttcaccgtccaagaagcccgttcctctgccacgtgctgcaccgggtgccaaagtgagttttccgcaatggcaattttctgtggcatcttgtctaattacaaacacaattaagactgctgccgctgcttctcgtcaaccgatcaaaaaaggcgccgctgcatcacctctcaaaaagcatgctcttccattgcgtcccctttcgccggcgggcaaacgaccggctcctcatcctcctcaacgtccactaacagcagcgaaagtgaaaactgatccatctcatttttgctgtactttttttaatcgcaacaatgttttagcctgttgcccttcctctgcgtcctccgtcgccagcagctcatgggcaagcagttcatcaacctgtccagcatggtctccatcaacctgttcatccttatgcaccgcctcatcagcagcagccaattcatcctcgttattcaccgccacaaccgctgccattccaaatgccggctatgccaacaattgcgactggtggtggaccgctgatccaagtcaacgtgcaacgaaaagagaagccgacgccgcaacctgttgcaccgttacgtgctggtgtgaagcccattccgctacgaaagccagtgaaagctgatgatgaggaggagcagaacgcggaggatgacatgtacagcccaaaacagcaacaaccattggaccatgggacaccgaagaacgcacttgacgaagatgacatgtacaacgtgccggacgcactgaaaagcgaccatggcagaggtgacgtgcaacagaatcatggtacgacgacaccgaacaatgctcttgacgaagatgacatgtacaacgtgccggacgcactgaaaagcgaccatggcggaggcgacgcgaaacagatgggtgcaccgaagaatgatgtcgacgaggatgacctgtacaacgtgccgaacacaacgaaggacagtacagacgacgatgacttgtacagagtgccgaaatcatattaatgttgtaacgtgtgtctatgtatgtatataaaagtgccaccccctgcgtattgtgcctattgtatatatattttatgttaatgtgcttgtttggttgtgattgtaccattacgtttgcacataaaaaatttgatttgtgtttcatataccaaa

SEQ ID NO: 51050 - DNA, 823 bp, Heterodera glycines
atgatggcctgttattatttggcagctaaagttgatgagtttaatgtttccattgacaattttgtagacaatttaaggtaaaacattatcatttttattaattttttccgttttttatggaattattttcagaaacggcaccagacaatacaacacggagaccatcttaacactcgaaccggatgtgatgcttaaacttgtaagaattgaaaaataaaattgtttctttttaagactctttaattgttccgttagaattacaatttgaccgtccacacgccctaccgccctttcgaaggccatctgattgaaatgaagactaaaattggcagacaattgtcagaaattgagttcgacttggaatcaatcagaccaatgtcaagcgaatttctgaaggtctttctttcctcgcggaatgatttttcgcaaaatgaaatcacttttcagaactctttgctgagtgatgcgatgtttctttactccccttcacaaattgccttggcagcggtgaaattcggcatggataaagcattgggaggtgctttttctctatccatggattggtttcgaaacaaatagttaaattggcagaagtccgttcctccactttaatggtcgactttctcgccgctttgctcgacgtggacatcggcgacactggcggaagaggcacagcagacattttgcagttggagaaactgcaagttcggcttgaccaaatctgcaaattggttctacaacaatttgcccagggcgtaagtgccgaagaaagcgcatcccttcaagtcagtttgacagagaatatcaaatgtattttagtgaa

SEQ ID NO: 51051 - DNA, 1101 bp, Heterodera glycines
atgctggaggacgcagaaaagaccggcacagacatcactctccaaaaggtggaagaggaattgaaggcgattcaaatcgtcaaggaaagtgccctttctctgcttactcaaccggtctcaaccagcgccatccaattgcgacctcagcaatggcgagagaccatcaaaggcaaacacaaggcaaaaccggcacccaaatggccacatcatgaaccggcacccaaatcgtcacatcatgcgccttcgcctaagcaaaaatcggacgacaaagcaaaccgaggccatccatcgcatccatgcgcatcatgcggaagcaacgatcactggcgatcggactgcaaatttgccaacgcattttgcaacaaatgcaaccggcaaggccacattgcgattgtctgccgtcagcgctcgtcgaacacggcacacaaatctcagaaccgatcatttcacacggtcgtggtcaagtcacattgtatggtgattggcacaacccaaggccgatggtggaagatcccggtcacgatcaatggcataaatttgaagatgaatggagacagtggagcccaagcaacagtcatcagcttcaaaacgtggatcaaattgggtcaacccaaactctctccaacggacatcgaaacccgcaactgcaatgacaccgcattttcaaccgaaggaaaatttcattgcaccgtcagttgtttcgatcggccatccaaaacactgatcgcttacgtcagcagtgacttaaagcatgatttgtttggccttccgtggattgaggaattcgagctcatcccaagagaaattttgttcccaaagagcatcaaaggaaagccaaacgcatcaatcaacgccaatgtcgtcaaggcaacaaacccggcgattggcattacggatgaatcctcgctcaccgctgtgttgcaaaaagattttgaggaagtttttaagaacggacttggccattgcgcaatcaaagcgcacctgattctaaaaccggacgcccgacccatcttctgtaaagcacgaccagtcccccatggtgcaatcgaagctgtcgacaccgaactggaccgcctcttgcagattggcgcaatcaaaccg

SEQ ID NO: 51052 - DNA, 618 bp, Heterodera glycines
atggtgaccaaaatggcaaaaatagtaatttttggtaaaaaacggctaaaaaattttagatttctcggttcccgatcccgagtcgagaaatttctagggttttttggggtctcggtcgtttcccggggtcatttcccggtctcggttctcgattctcggtaaaaatcatttctcgcacatccctaattattgcctgtcaaattgtcatcacaaagaatcaaatccgaacaatttcgaagtgtgattcacgacaaagggtcatccataattccattaattggacgaaaaagcaatttgataaatgtaattgttcaactttcactcttaatgagtgttaaatgttcagcacaatgtcgctgagcttcgccgcgtgcacgtcgatttgggggagcacagagtgggacagttcagtggacaaaccggcaaatatgagtacaatgcggagaagcaaacgatggaattcgaaaatttggaagtcgagaaggacgatggcttctgattattgaagtttaaatgcgattcttatgccattttcaaaaggaaaaattattcaaaaaaaaaaaaaaattattttttacacagtgatttctatttatttatttggaaattgaaaataaa

SEQ ID NO: 51053 - DNA, 1028 bp, Heterodera glycines
ataaatgcctttccaattttcactaattgtcgcaatttttgcgctttgcgccgtccctttcactttgggccaacttcaaaacgcagtgaaaggcaaaaagtgcgcgaaagatcaggtgaagtgaaaattggcaaaattcaattttgaaaatccaaaataaatgtttaattcccaaaaaatatttgaaggtggtcaacaaattgacggtgtacgaggacggcgccattgaggccgagtgcggcccgttgccgtgcggttccaccgcttcgacatgcgcggaagtgaaacttgcaaatttttaatatcaaaatttagaatttaatttttaattaaaatttaattcattaattaggacttgagcacgtgcaaagcgccgtcggaagtgttcagcggaatgaaatgggcacagaatgggcaaaggcaaaataaaataaaaaatatttaaatgaaaagtgttgcaagtgtttcttgtttttaagatttgtgctatttggagaggtcgaagaattttggaaaaaatttgggtttttctcaaaatgttttcaattttaaaaatatgtactttaaaaaatatttattttcgaaattcattttgttgataaaagtaaaagttaatttgtggtaatctgatgttataatgtttaatattaaaaaaataaagaaaaaaaaacataaaagataaaaggcataaaatttttaccttttacaaattaattggtaattaatttaataattatttgtttgttattaccttttacaaattaattggtaattaatttaataattatttgtttgttattaccttttacaaattaattggtaattaatttaataattatttgtttgttattaccttttacaaattaattggtaattaatttaataattatttgtttgttattcttcagtttgttgctccgatgctgttcaatgcgtgcctccaacaagttgtacattggcacagaccttgtcacattggtaaaataaaaaataaattccatttttgcttttttgaaaatttacttttt

SEQ ID NO: 51054 - DNA, 527 bp, Heterodera glycines
aattttctgctgtcttttggcgagaaagtgatcaaaaatggaggaagaaactcggagaatggaccaacggaaatcgaaacgaaaagcattggccaattcggaaagaagctcagggggaagttgaattttgggaggaaagcgcatggcttaagcaattaaaaataattagttaattagagggaagttgaattttcgggggaaagcgcatggcttaaagcaattaatcgaaagcgaaggtccgttttgaaaatgccggttttgccctcatcagttggcaaaatgtactttttgttttatttaggttaaattaatggggaattaaatattcaaataggctttatgttgataatttgctttattactgatgtggattgagagtgagttttgcgctttcctcacttttcttattggtgctcattagaagagggcaatggaacacaaaaacggcaaaaatcaatgaataacaaatacaaatgtgcctaaatggcgttggttctcacagtcagaaaatggcacaaaatggaaaa

SEQ ID NO: 51055 - DNA, 521 bp, Heterodera glycines
atggaagcgagccactggcactccgccgccagcagtaatgctattaaatgagacaggaacaaacattgagccagatttgcccaggtcgtacaaatccaatcaaaattttatttcttttttcctcaatttagtgcctttctgtatattgaggaaggctcaggattaagtgagttttttaatgtcaatgtaaatcaacttttaattcaagattttaatgaaaaagtttttggagtttagaattaattgctttttactaaacaatttaattctttttttaatctattaaaattataattcattctattgtaattaaaatacagtttcgcgcaataatttgctggatgcagacacaaagccaaacgaatttcgaatgctaatttccgatccaattcattgcatgggaccttcgagcattgacctgaaatttaggcaagaaaaaaaattgaataaacaattcaataattaaatattgtttagaatatggtcaacaaaaggcataaaagtaatgttaaaacatttaa

SEQ ID NO: 51056 - DNA, 696 bp, Heterodera glycines
atgattgatttgcttctcaaagaccacaacctgttgatcaatgagatcgttgaccgcgtggtggttacccagcgaaaatccccatctctttcatcttcatccgaaacctcgtgccatccactgcattttcaacatcaacgtgttggcacccctcctttgtctgttccgtcttcaccgatggtttcaaatgaagaatcatcgaaaaaacaaccatctcatctaactaattctcgcattaccggtgccgcatctgtgccggtctcgccattagttgtggtgcaaacgcagtctgcgaacaattcaaacattggcaattcccctcctgcgaatgtgtggcagaaaagggctgaggcgattcgggagaaaaaaggttcgaataattagtgttctagtgaatggtacatctccttcatagccgtattggatggacattctctgcatggcattgtttcaccgattgcggcaccaacaaacaatgccaactgccccggcattgaccttcgaaagtctgaatatgctccagcggttcatgtggctactgggacacaagtgaagtcactcaacgcggaagaattggccattttatcaagagaagaacatcaacggaaggcgccaggttacgcacgacctcaatcatctgcttctatgaccaaacaaatgctttcaaatatggagaaaacggtatttaatgcttaa

SEQ ID NO: 51057 - DNA, 1993 bp, Heterodera glycines
acactgctctcacgctcgcttgcgttggtggtcatgccggattagttgacttgctgataaagcgtggagcacatattgagcaccgcgacaaaaaaggcttcaccccgctgattctcgctgctaccggaggccacgcggaagtctgtaaacttctaattgaggctggagcacaattagacgcacaagccgaccgtaccaaagacacagcgctttctctcgcctgctctgggggacggaaagatttacgtattatgttatcaataaaggactggaatcctaactattgccaattacgacgtacgattggtctagagtatattaaaggataaaattgaatacaacgagtctattttttcactgacactgacatgggaacctgtaaaactagtgtatagtaaatagatttttttaaattttcctgtgcttttttaagataattggcaatggggaagaccaatagtgccgatgggtcgattgaaaattaaaattttaataaaatttgaagcgactaacatttactttacacccccccccttccttggccaaacccttggacgcatatgttgtattaacaatttaaaaattttaggtagcagaattattgcttaaaagtggcgcaaacaaagaacatcgcaatttgagtgactatacgcccctttcactggccgcttccggtggttacgtggacatcattcagcttttgttgtgcaatggcgcagaaattaattctcgtaccaattccaagttgggcatttctccgttgatgctggctgctatgaatggacatgaagaggcaacacgtcttctgcttgagaatggatcggatatcaatgcgcaaattgaaaccaataaaaatacagccctgacattggcgtgtttccaggggcggacggaggtcacccgtctgttgatacagtatggggccaatgtggaacaccgagcaaaggtccctctaactttctttcaacttccctttcagtttttgtttttagaccgggctaactcctttaatggaagcggccaatggcggatacgtggacgttggcactgtattaatccaggcaaatgccgacgtaaacacaacgccggtgcctacaagtcgtgacacggcgttgaccattgccgctgacaaaggacaggctgcttttgttggacttttgttgagatataatgcacaaatcaatgcacgcaataaaaaagggtgcaccgcaatttggcttgtaagaaaattgtcaatttaatttaaagaggagacttacaacaatacgaatcagttattgtatttcattttttaggcgtccaataatggtcatttggacactgttcatgtattagttgattacaaagcggacatcgaagcgcaagacaatcgaaaactcacccctttgatggctgcctttcgcaaaggacattcgaaggcattttttatatgtttaaattagtcagcattcattttacagcttgttcatttcctcgttcaacatgtaactcaattccccagcgactcagattgccagcgtttcatttgcaccttaacggaccaagtctcattttaatattattctaatttggctcgtttttttacaggaacttatcgaaaagtgtggtcaatctgttcaattcatttcggaagccaaagaaaagcaggcagaacaggcgaacaaagccgcacaatcacttctggcactgttggctcatgaagtttgacttttattacacatttctaaacttgtacttttccaacaatgtaaaaaatcaaattaaaataaacgtatttggtcagccttcattgaccttcatttaggaggcaattgaggaatcaaaaaaacggagcaaagaacgtcaaaaagaaaagaaaagggcaaaaaaacaggcaaagaaagaaaatgaacaacagtcggagacgacggaacctgagaccgttgatgaagaaaaggaagagttaaatgccgaaaaaaagtcaaacgttgcacctgaaggcaaagcaatcccg

SEQ ID NO: 51058 - DNA, 1342 bp, Heterodera glycines
atgctcctccaagctggtactgacattaatgcgttgagttccacacataatactgccttaatctacgcttgtgcatccggatatatcgaagttattacttgcaacaaagttctttacttagtagcctttgcttcgttcagtgcgtgaaagagttgctagcgactgggcgttgtgacttggatattcgcaatgaatcgggtcactgtgctctgatggaagcggcaagcattggcaatgtggagataatgaagctgctagtcaagcatggcgcaaaggtcacaaatgtggttgaaagtgttgagtacaaggtgtactacatctcgtgcttactattcgaaattacgttttcttctcccaggaatcggcacttactctcgccgccttcaaaggacatttcgatgcggccaaataccttctctcactgatgccggacaccaaagatgcgcttgaagaggaggaagtttacactgcgttgatagaagcatcaatggacggtcatgtggaagtggccaaattacttttgagtgcgggtgcaaaagtcaatttggccaacgaatcttttgaaaatccactcactctggcggctggcggaggacacaccgaaatggtaacaaattgtaaaacatacaatccaatcgaattttacattaaggtgaaattattgctgagtgcaggtgccgaattggaagaaccgaacgatgagggatacaccccactgatggaggcgagtcgcgaaggccatttcgatgtggtggaaatgctgttggaccaaggtgcaaatgtgaacgcgaaaaatgaagacggattggagacaccgctaacacttgctgcttctggaggatttaagttagtctcacaactaactgaactttttaattattattgactgttaagagatgttgttgaactgcttgtttcgcgaggtggagatttgaccgtcggagagcgtactccgctttatgaagcgtgccaagaggggcacgagaaagttgctcagtacatcgtccaacaattgcgcaaagcttaccccctccaagtctcttttaatgtgtaatttcttatttcatcaattatttcaggttgtccagaaagacctcaacgaatcccttttgtgcactgctggcattgatagtgattcgatttgcaagttgcttattgaaaatggcgctcaaattgtaattttttaaaaattatatttcctaattttttgttatggaatttcattttttgatttaacaattttaaggactgcttctcgaaggacaatcgtacgccattgatggaagctgcccgtcaaaattgtactaaagttgttgagctgctgattaaaaacggagcagat

SEQ ID NO: 51059 - DNA, 805 bp, Heterodera glycines
atgtgtggaactcaacgcattaatgtcagtaccagcttggaggagcattcgaactacgtcagagtgcccgccacaacatgcctagcaaaatggaaatacaatggaacattccatggaagtgtgaataagtaagtacctccatcagcggagtgctgtcagcctgctggacaaattcaggagaattgcgcatgtacccgggttttaattggtcgcaaactaccctaatgaaaatattaaaaattgttgagaacatataagcggcactgagatcggggcacatatatagagtgtgggtcgacaaaaaatcagaataggggtcgaaaaactaaagttttttgttaaaaaaccaagagggaaccttttgatgtgcaaaaaggaaaatgtttttgagaaaacaaaaataaaaccaaaaaggggaaccttttaacttacaaaaaattttttttaagataacgaaaattctataggtatatttttaagtagagtccggtaaaaaaaaatttccgggagcgggagaggggatcgggagttcaaaattttccgggacgggagtcccgaacgggattcccgtaaaaatcccgctcccgttaaaatcccgtccatttttaacgggagtcccgggcgggagcgggagtaattcgaaaatttaattaaaaactcacaaaaatatttttaatgcacaaatttaaaggacaatcaatttattaaattaaaaatatttagaaaaatttataaaggagaaatttgaaataaaaaaatcttatttttgagtcaaaaatcagaaaaattttttcaaattgcttaa

SEQ ID NO: 51060 - DNA, 818 bp, Heterodera glycines
agtctttcgtttttatttattttttgcaaaattaattcttaaatattttttcagaaagggttctgaaacgcaccaaattttatttacatgttagtttaggcactctgatgctttttctatcaaaaagggagatgaataaaatttttaaaaatttttaattcctttttaaacaggccaaaaagtttaggcttaacttttttttcagaaactgatcagaagcgcaccaaactttgcagggatactgaaaggaagagaaataacctattttaaatattatctagtcagttcatttaaataatttttatccaaaaaatttttttttgggttttcggggcagtccccctgaaccgatgcgcccagatttatggggagaccgaatccttcgggaatagcttccctatagcctgtactttaattctgcgttggatttttgctccccataattgtttgagtaccccaaacggacacttgaaaaaatcgatttttttgttttcggggcagtccccccgaaccgatgcgcccagatttatggggagaccgaatccttcgggaatagcttccctatagcctgtactttaattctgcgttggatttttgctccccataattgtttgagtaccccaaacggacacttgaaaaaatcgattttttttgttttcggggcagtccccccgaaccgatgcgcccagatttatggggagaccgaatccttcgggaatagcttccctatagcctgtactttaattctgcgttggatttttgctccccataattgtttgagtaccccaaacggacacttgaaaaaatcgatttttttg

SEQ ID NO: 51061 - DNA, 354 bp, Heterodera glycines
atgggcaaagtgaccaaagaaaatgctaccgtcactgtgctgttgctcaaccaggcaatcgaaacgtacgataccggtacggtaccacggatgcatattgtaatttccttttgctcacactaaatttaaaacatcgccattcgacagataaaaacatccaatttgtataaagaaatgaataaaatttcttaaattttcaggattttcttttatcacttttcctcccccccccctttcatttagttcataattttgggcataattcaaatttaataaataaataaattatttttagtgccaaaaagtgtgaacgatttcatggacgagcaaggggctgtgatgggttttgtttaa

SEQ ID NO: 51062 - DNA, 1485 bp, Heterodera glycines
  unsure (1)..(1485): unsure at all n locations
atgaacgaccagacaacacggcagtatattattgacagaaccgaactcattcttaagacggtctttcattttttcgaaaagtgggaattttattttattttttttagatggtcacgcaaatctttcacattcgaagccaacatcttgaacaattggacggagtgaaggaaggggaccaaaaagagcaggagcttagtgaatttatgcgttccatttgcaactttcttagcactgttagtgaaatgccatgaaacggatttcataacaatgccactaattcaatcccttttagctgactaacgaaatgaccattatgcaacggataagtacggatactttgcgttcattcattgattcacttctttcgttggtcagcgatcagcgtcttaaaatacttaacaaacaggtgattttttaaaattgatttggcttttttttaatgtttcaatcattttttataggtattccgttctctcaacattattgtgattcgactgtgcgaattcacaaatccgaatgtgtgttttgtggcgctgatgaaattggtcatgaaataccaggcctctgatcctggcggtcaattgtcatcgttggtccgcaaatgtctcaccaaattcactgacgcaattgttgagccgaccaggattgaaaaagtttattaaatagtttttttttgtaaacaaaagttttctttttaggttgacattctgactgtgctgcacccaatccacgagtattattcgcgtttttatgttgccgatggacaaaccaaccaaatttccgacacagtgaaggacacgtccaaattgttgtgtatttttttgcagcgtttggtcatcaaccaaaaatatgcggtacgtttgtcacttttagtgaaaaacactgtaaattttattaagaattttattaacttttggtttaaaaagggatttttaatttattttttcctattattttcgactaaaaatttttaatttttttgtaggggtgtgcatatacttattgcagcctttctaaatggatttttgctttttgttagatgctcaactatctgtatccgtttcccgaaagttcccaattggtgagttatgtgcggcgatgtatccgaacggtgggccgaaaagcgatggaagagaaacggcanggacggtggcgcaggcggagctgcccaaaatcagaataatnncaccaaaatgggcggtgatgatgaactgtcgtcaatattcagccgaatttctggcgacattttccatggggtgaatgaaaatgaatttttatgtgaaaaatttaaataaaaatagcaaacaaaaaacggaaaatttgatttcaggctgtcgaggacttgtacaacttcatggacatccatcctgaccaaaatttaaaatttgaacaactgatggctcggtgcgaatacgcttccattgttcggcgcgcatttgtcgaaattcgtcaaactcgtcttaatcgggagccattgaaaccggg

SEQ ID NO: 51063 - DNA, 1035 bp, Heterodera glycines
  unsure (1)..(1035): unsure at all n locations
cgaggaggccggtccgcaagggcacgattcattttggtcgaaaattcgcattntaagacggactttgtgtgactttgacaaagccggcgatgaaagtggaggtctgtaattcttctgggagttccaatttcgcactttgtttagacgccaatgaccagcactttcacccacgacgaccaatgggaaatcgaccggcgaagtctccgattggtgcgccaagtgggcgcaggacaattcggcgaggtccgatcataaaaccaattcgtaaatgaagcaacatcaaaggtgtgggaggcgcggtggaaccattcgatgcccgtggcagtcaaaaaggtgccaaaggcaatcgaatgccaccaatgcgctccctcttccattttaagctgaagcccggctccaccgcttgtgtcgcggattttcttgcagaggcaatgcccagcaaattcttttatatcagcaaaaggtcgcttttaggctcaactgatgaaacgtctgcgacacccaaaactgcttcagctttacgcggtgtgcactcgggaagagccatttttaatagtgacggaattaatgcagggtaagcaattaggggggggggggggtagaccggctcatagaccggtccaattcccaatggtatccaaatccaaagccacaaacatcgcttaatccaaaatcccatgacaatccctggggaggagaagcagagaagggagcatcgttcgcattcagagaatctgctgcactttctgcacggccatggccgagtgtgtaacgtcgcgcaggttgaagaagcgaaggacgcccttttcacttttctttttcagttggtcgacgtcgccgtgcaaatcgcctctggcatgcgttatttggaggtgccaaagcgaaagtgtttaaatttccaaaaattcgcaggagaaaaatttcattcaccgtgacctcgctgcgcgaaacattctcatctctcacccttcggtggtcaaaattgcggacttcggacttgctcggcttatccgcgagaacgaatacgaagcgcga

SEQ ID NO: 51064 - DNA, 110 bp, Heterodera glycines
tgccacgggaccgggaccgggaccgggccgggaattcccggtcatccgaggtcccggtcccggttcccggtcccgggttttgaaaagctcaggtcccggtcccggtcccg

SEQ ID NO: 51065 - DNA, 64 bp, Heterodera glycines
tgccctaccgggaccgggaccgggacctgagcttttcaaaacccgggaccgggaaccgggaccg

SEQ ID NO: 51066 - DNA, 1039 bp, Heterodera glycines
  unsure (1)..(1039): unsure at all n locations
gtgtgaacacnncgcgctgcaagcggagtgccanttgcaacaccttttttcaccgatatccgacgcagcgagtcgcggctgagcatgggactgagcccggatcagtattgtctgaacgtgcgcgacattgacgaggtgtggaaaataaaactgagatggcattggcatcctcgaatgcaaatggacatttttggatattcattggatgtgtcctaggcgtcaaaagggggtgggtacggtagatgggtacaaataccgtaactgatcgaaataacggcaattatttttttaacatacgcattacatagatagaaaagggtctatatttatatactgtaaattcattatgcaccaaaaaaggtaattaattttctgatccccgcccccttttttcacagtgcgctctcggccttcacaactgttccacctatgccacgtgcaccaatttgccggatggtcggtttttggtctaaaaaatgcatttttatttttttgcaatttcattttgcaggttacacatgccaatgcccggccgggtgggaagacggcaatcccgaactgccggtgggtggggatggctaattaattgaatattgggctgtgcgagtttttccaaaatgggggaagggttcaagtgtttttcaaaatccaacaaaatctcggcaaatctcgactgttatatatatatatatatatattccttttaaagggtcgcatttgtgccagtaaattgtgcgctcagtgcagtgaacacggcgtaagtgatcaatgggtgctttgtcagacttttctctgatgcttttcctcgtttcgatttgttattttgactgatcaatcacagtactgattgggttaattgttccaatgccccgctacttcagtcttgcatccccgacccagccaacagcaccaacgtggtctgccaatgctttgacggatacgccggcacattctgcgaaatcgcgccctccgcgttgccgctggtgttggccatcattctggcactgcttttcctcctcctcgccctgtggtcagtttg

SEQ ID NO: 51067 - DNA, 2914 bp, Heterodera glycines
  unsure (1)..(2914): unsure at all n locations
gtcgacgtgccaccccatgcgccagcgccgcgcgagttggcaaactccgcgacactttcgtctcgctcccgctcatctacgcgtcgtcgttcgcctccgacgacatcgccgcttcgattgatgttcacggaagtgctcgctttggcaccgccgccgccgctggactgaaactgacgtgtgggggtgacaggttcgtcatgctttcagcctcaaatgccatgcaatggatcgaatacaggtgagacccaaccaacaatcgcacatgcgttttgtcctacaaccctttctccaaccgctgcagtatcatcgcccacattatctccgcctattacggtgtttcttattccgccgtcgattggacttcgatggtttacatgctcacttacatggtgctgatgttccccggaaggtccgtttgaacgaaggacagctaaagaatattttttgttaagttggtttcttgagaaatttggccttcggaagtccattctgatcggtgccttcggcaatagtttcggcgcctggttgaaaatgctctccacagccccgggcactaccaagatgtcattgccactaattacctcccttttcgatcgattttggcttacatttattgcccaaacagttaaatcgaagttcatcccaacccatcgctaattgcccttttaattcagatcgtcgttcttccccagtgttattcttggaattcccccgaggcttgcggcggtttggtttggacctgaacaagtccttccattgtccttttcccacttgggttttatttgggattttaaggtttccaccgcttgtgctgccggtgtttttgggaatcaggcaaatgtttttggcatttgattgacaacaattgtcacctctagctcggaattgccattggctttgtgcttcccccgtggcttgtccatgaaaagcacgtcgcgtgcgttcctttatttgtttagctcatttgtccgtccgttccttcccccggcactttcattttagatctgactgtcctgtttttggaaatttctgcgtcgagatttcgtcggctgtagatttggggtgcacccacacggggtacggacttacgggataaaacccgtaaaacccatagcctgtaaaaacccgtatcggccgaaaaatacggactacgggtccgtaaaaatccgtatacggttcaggctcggattcggactctaatagcgcacctctacccttttcccctaaaaggagaaaaataaataaaaaatgtattgaaaaaaatctgtcgacccaggtggaggcggtcggacatagcacgaaaagcgaagaggcaaggccaaattggatgtgatggcacacttttgccgttttgggaattcattcccaggggaagagtcccagttggagtgggggggggagaccaatcggacggggatttgcattatttaggggattggagagacgagaaatgcttttttttgccgggatttacgtaaacaaataaataatgccgagacactgcagcagatgtgttttgaatgacgtcaaaggagagacagacaaaagttgggacggaaaaggggcgaacggaagggaaaaagcggtcaattggtagtcaaaagatatctcacaaatcagcgcaattgattaaactgatttactaattagcaaattagtaaaaaaaaattgttgactcaaatgagtgttgtgatggaaagataaaaaattgaaaggggggattttaaatcttggagattggaaaatttaagagtttaatcgaaattaagttcgtgagttcgttagacagattagacattttttccgatcattttgaatagttttggtgacaatccaaggaaaggcccggcatttcctcccttttgggtgattgaccaaactgaccacagggcgaggaggaggaaaagcagtgccagaatgatggccaacaccagcggcaacgcggagggcgcgatttcgcagaatgtgccggcgtatccgtcaaagcattggcagaccacgttggtgctgttggctgggtcggggatgcaagactgaagtagcggggcattggaacaattaacccaatcagtactgtgattgatcagtcaaaataacaaatcgaaacgaggaaaagcatcagagaaaagtctgacaaagcacccattgatcacttacgccgtgttcactgcactgagcgcacaatttactggcacaaatgcgaccctttaaaaggaatatatatatatatatatataacagtcgagatttgccgagattttgttggattttgaaaaacacttgaacccttcccccattttggaaaaactcgcacagcccaatattcaattaattagccatccccacccaccggcagttcgggattgccgtcttcccacccggccgggcattggcatgtgtaacctgcaaaatgaaattgcaaaaaaataaaaatgcattttttagaccaaaaaccgaccatccggcaaattggtgcacgtggcataggtggaacagttgtgaaggccgagagcgcactgtgaaaaaagggggcggggatcagaaaattaattaccttttttggtgcataatgaatttacagtatataaatatagacccttttctatctatgtaatgcgtatgttaaaaaaataattgccgttatttcgatcagttacggtatttgtacccatctaccgtacccacccccttttgacgcctaggacacatccaatgaatatccaaaaatgtccatttgcattcgaggatgccaatgccatctcagttttattttccacacctcgtcaatgtcgcgcacgttcagacaatactgatccgggctcagtcccatgctcagccgcgactcgctgcgtcggatatcggtgaaaaaaggtgttgcaantggcactccgcttgcagcgcgnngtgttcacac

SEQ ID NO: 51068 - DNA, 65 bp, Heterodera glycines
gccccaaatcccatttcccataaatttggctgcaaatccacaaattggacaaaatatgtaaataa

SEQ ID NO: 51069 - DNA, 565 bp, Heterodera glycines
atggagcaccacgccaacacatccatcgacgacgcactgctcgtggatgacaatgaaaagcagaaaaggctgttcagtgagttttatgggaaaatttgatcagatcagagggaaatagggaagagacagagagaataaatattagcaaaaatcgggagtctcgagccggaaaatcccggtagaaaaggcctagaaaatttggaaatttttcacaaaaatgtataaaatgcgtcaaagttagtcacctttttcgtgtccggcactgatttattatgtcaactgatcagtaaagataaagatgctttcttcaattattacacatcattaaataagttagtctgaacaaattccatagatatgatcggaacaaccaatgaaaagactgactgttctgatcatttatcagtaaaaaatggagaaaattgtgaaagtgatagctgatcgagacaatttctatttcccattttgagaaaatttgtgtaaaaattttctatttttttcagtgctcggcctgttcatattgttttgttgggtgggcgtcataattttgtgtgcttatccccag

SEQ ID NO: 51070 - DNA, 1300 bp, Heterodera glycines
atgtcagacaaccgaaaagaggcggaggaaaagatggcaaaagcaatgtaaaattaaaaatgccaatttttcaatttgaattttaaattttgttttccttttttcagcttcatctccggtgattgttggctttgtgtcttcgatttgctgccaccttctcaacttggccttggaattgcgctgatcagccaccgatttgacttttacgtggacgaacacttcaaaacgcgcaaatggacgctgaaacatattcaaattggaagcaaaattggaaagaatggcacaaatgaaatggaaattgtcaattctgattggaaatcgatgccaattccgcaaaatccgttgccaaagaaaatcgtcggattcgaacgcatcgacatcttgtaaaataggcgattatgcaaaaagttcggtaacacttcccattcattttcagattcatcgaccgaaatgccatcgcttttttccaccattttcgtccaatttttccaatcaatttggccatccggtcgatcatgaacaataaacgcaatatggaattgattttgcgcaacatttggccaatactcggaaaaaacatttatggcatggaattgtccgccttcattttccaccgtttgcgcaaattcgtcccgtcttttctcaacgattgtccatcacctcgttttgtctctttcaaccatggcggtctcttcaccaagtttccggccgatgacagtgccatggcgtcggatggacaagcattggccaaatggcttttgactccccactcaacaaatttgccaaaggtgttgaaatgcatggtggacagggatgatccgaatttggcgtcgaagattgaagcgttcaaagcggtgctttcatttatcattgcgtctttcttaatcaatttttcaatgttttaggcatttgccaattcttcgtctcctaccaatttcatcatttccgtttggtttccgcgaccttttgctgactccgttgtgccatttgatctgacaaatgaattgactcgggaacaattggcgttcaaaagaacaaacatcagccttcattttctgctgatccgttgtccaattgcgcgagaggcgagcaaatggacgaaatgggaggaggaagcgattggctggcgcattgatgatcaatggaactttattaaaattcatgttgatgctgataatgacattggggatgggtcagtgaatgaatgctttattcaaaaaagcaaaatttattgccttgcctttcactttttaggcttctcaacgcaatgatcggcccgagtgatcagcagcagaagtga

SEQ ID NO: 51071 - DNA, 945 bp, Heterodera glycines
atggctcttgttcgatttgaagaagcgaaatccaaccgtggcaaaattctcctttctcgtcttgggttcgaatatgcttatgagagcgactctcgaatcgagcaaggctgggaatactggaaatgcccaaaacgtcccccttactgtcctgggcgagcttgtgttcaaatggcgtggcacgtcgatgcaaatggaagtcgttacaagatgggtcgcatgtcagccgaccacaaccatgccgcagtttttggccaactcaatgtaagccaaaaaagcaaaccatctatttttggtatagataagacaggcaaatgagcaaattcgccaagaggctcgaagtgattttccgacaaccagtcgaaacattgtccgaaatgttcgggctgaacttccggtcgatgtgcgtgtaaacgcaccaagcgccgtaaacatgcgaaataaattcaacatagcaaagagaaagcatcacgaagaggtgtattttagtgtaaatggtttaaataaaaattttttaaataactaaatttaataactaaaattaaaaggtcggtgatgttggtcttgatgctttgccaattgaaaatattgtgattcccaatgctcttcaaaatcgggtcattttcaaccaaattttaaatggacatcggatgattgtcttctgctcagcgcatgctctcgaaatcctacgtcaatacaataccgaatgtgccattgatggcacatttgaagtaaaaatattaccattttctttaattactgttttttaaccgttaaagtcatgcccgcggggatttgctcagttgtacacaatgagcgcaatcatcgaccattgttcagtcccatgcgtttatgggctattgccaaataaggagggggcaacatatgtacgtttctttgaggcaatcagagacagcattggcaacaattggtcgccgcaaaggctaa

SEQ ID NO: 51072 - DNA, 1070 bp, Heterodera glycines
atggagaaggaaaaggagcaaatggaaaaagacggtgaaaaagaaaataaattgtaacaatttttgtagtttaaaaagcataattaagctaatgccaatcaatccaaagaactcttggagcggatcattgaattggagaagcgacagaaacaacaaaaggaggagaatgagagaaaagggcggaacttgggagacaacatcggtatttaatggcaaagatttacactaagaagtcccgcgggattccctctcccactaatctctaattttagatcattcattttttagtcattttttaaatttcatttttaacttctcggtctctgttctccagcagaaggtcatttctgctgatggtctcgaatgcaaaataatagagttgagcgggtcgggtcgggaaaattcccgggtttttcaggtcccggtttttgtcaaaattcccggtcccgctcaattctacaaaaaaataatattcgagctttcttttcatctgaaacttgctctaattttaagtttctgtcactcaattaacggagttaaatcgccaacaaaattgttgggatgtcaaattttgccacaatgagctcgaaatcactgacgacgactgtcttactgtgctcaataagcaaaacaaatcaggtaaatggaaatgaacacaaaaaccccttgtgtcatacacactaattctttaaaaattcccccccccccctcccttcgccccaaccgttccccaaaacttttttgaaaaaggcgccacaaaaaaaagaaagaaaagcggtgcgaaaaaaagtcgagctggatggagaaaaatttggactatgaaattttggtcccgagacacccgcccctcccccgtctcaatcgttcgtcatatgacccttggcctgagacaccccttgtatatgtatgcttggtacgcctcctctatgtcttttggcggtggccgatcatttcgtcactgagaaataatttttaaaaaatgttggcaaaatgtcattatgtaaattattttcattaaataatattttttatttcggaaatgattattaaagaattatgttgaaaataaa

SEQ ID NO: 51073 - DNA, 556 bp, Heterodera glycines
atgctttcttatgcacaacaattaagaactactgaatatataaaggggtcaaagagactttttggatgcacagacggtgaggaatttcattttcatttacccatgctgttttttacgaatttcagctggatttgtagcgatgtgtggatggacattctccagggaggcatgaaatgcacgaaaaatatgtttttagcttgtcaaaaataagcaaaaaaggcaaaatttcgctttttgggttgatttttcgctaaaaatgataaattttagttgtatcatgtttttttcttcaaaatggttttaattagagatcggatacggacgggatccgtatacggatttttacggatccgtagtccgtaatccgtatttttttcggccaatacggattttttacggactacggatttttaatccgtaatccgtatgggtgcctagtccgtaatcccgatcctgatccgtacaattcttgatacggattagggatttttttttggcttttttaaagtgaaatggattatatttttaaattttgtgcagtcaattcgccaataaa

SEQ ID NO: 51074 - DNA, 1960 bp, Heterodera glycines
atggccagaaaaagtcagttttttaggtttttggccaaacttttttgtatctcaactagattttttgaaattttgcaggctattagcgactatcaagcgcttaaaatcacatcaagattttttaatttgaatgataaataaaaatgttatagcgtttggcgccaaagtgggtactctttaagtttgggtccacatttttggtcaaattttttcaaaatttttttttaataagcacgtaaaaaaatgtgatgaatttatgtctgtttcaaaattgtttttgtgttctttttgctctctcatttttcccaactctctctttttaagttacataacaacagagttttgccttgccttttttgacacaccaatcaattggaaaaagggaaaattgagccacaaaaatgaatcgacggtaaggaattttttttaaattacaaaattttcatttacccatacatttttttacgaatctcagttggatttgtggtgacgtgtggatggacattcttccatcttttgaccgtcctcaacttggccttcagaattgaaaagggcgaaggaccaaaagcgaaactgtctgttctgatcgatgacaaatgcgtggcatttccatttcccgaccatccgttgcccaacaaaatccgttttaaggaccttcagatttagtaaatcaaaaaatatacagaaaaccaatcttcattttttcactttatcagctacattgaccattctgtgctcgcatttctccgttccaacaagcaaatttgggacagaagtggcaccaaattggaagtgtttgtgccgttatatatgaccgacgtcaagctcatttgggatgtttttacccgcgaaatttggcctatttttgcgaaaagcattcgccatttttgcattcgtaatgccaatcatctggacaatttgcgtcgtctcatttcaccgacacttctcactgatcttgttcaattgtattcaatcacttcctatggactgtgccccgatggaatttctgacgatgggccaaatgcaactgccggccaagcgttgtccaaatggttgcacacgccgagcaaaaatggaaaagcgaatgaattgtattgctgtgcttatttttgtgaaataacatggatcaacactttcaaggaggtgatcgagctacttaattgttcattaaacgattgactaattattgattgattgcatttgattcgtgaccggaaaatcggtcagtggaaaatgcgtcagtgatacaaatattttaaaataaatttctatggcattagtattgtaatataggactaaacttctataagaaaatcgttctcaatttccaaccccggacccgaactcgaacaaaaaatcgaaaagtcaaaatttcgaaattagattttttcttaaaaatcggtttaatacacggaaacaaactataagccatcaatactgcaataagagatcatttatgctgtttttgaaccaaaaatgctaaattagaaaattttgtactttcgagttttttgttcgagtccgggttcgagattcggaaataggccggaatggataccggattcgtggtcagtgacctcgaaaacgcaaggaacttgtttttaagacaataaaatttcgctgacgcattttctgctgacgctttttccactgacgcattttccgggcgccatttgatttacgctcccttttttgtttagacatttctccgtgccaccacttctgtcgcttacaatgttcggcttgaacttctaatggctagcgaaatgaatacagttgaacaatttgagttggtgaacgaaatgacccaagaaaagttgacactgacgaaggacgaagagatttggctgttgaaacggtgtccaattgttggggagacggcggcggttcaatgggaaaaagacgaaaatttggaccatgtgtgcggactctacttcaatcttcatggaaattgtattgg

SEQ ID NO: 51075 - DNA, 799 bp, Heterodera glycines
atgggcggtggtggaatgatgggcggaggtggcggtgatatgggcgggtcgatgagtatgggcggcggcggcggagatatgagcggaatgggcggcggaatgatgagcggaggtggcggaatgatgggaggcggagacatgactgggggcggcggaatgggatacggtaagtggcaaaggctttatatcggttcaatccgttcgtccgattttaattttaaggcaattcgtcgtccggctggtgtgcatttgaaggtggtggaatgggcggcgggggcggtatcgccatgggcggtgggggcggcggcatgggaatgggcgggggcggcggaatgccaatggaaggcggagggatggacggcggcatgggcggatttggaggcggaggaggtgcagcaaagcctatccttacccaaattaactaagaaaatacaaacaggttatggttcgaatatgggcggaggtgcgtcgggcggcaattacggcgcatcaaagggcaacttcaaccctcaaggtaaacaccgatcggacataattagcccattttgggctgcccaattcaccaccggccacttagcctcattcagaaatgttggacccgtctggccaacttccgcccattcaaattccgccgtattcggccgaagaaggtgaggagaaaaacgtaaaggccaacattcgtccgttgcaccgatgagaaacggaaaaagaactctgcgcgtaataatttattatcacttttgaaagattgacaaaagcaaatcgaagaattaatgtttatttaattgtcacaaataaa

SEQ ID NO: 51076 - DNA, 575 bp, Heterodera glycines
cgccgtaattgccgcccgacgcacctccgcccatattcgaaccataacctgtttgtattttcttagttaatttgggtaaggataggctttgctgcacctcctccgcctccaaatccgcccatgccgccgtccatccctccgccttccattggcattccgccgcccccgcccattcccatgccgccgcccccaccgcccatggcgataccgcccccgccgcccattccaccaccttcaaatgcacaccagccggacgacgaattgccttaaaattaaaatcggacgaacggattgaaccgatataaagcctttgccacttaccgtatcccattccgccgcccccagtcatgtctccgcctcccatcattccgccacctccgctcatcattccgccgcccattccgctcatatctccgccgccgccgcccatactcatcgacccgcccatatcaccgccacctccgcccatcattccaccaccgcccatcgctgaaagtcaatcaaatgccaaactcaaactgtgctaattaccgccgtcgggcattccgccgccgctttccatcccaccgccgccc

SEQ ID NO: 51077 - DNA, 1699 bp, Heterodera glycines
atgactgttagcagtcacttggaaagctcggatgatcggacagaagcgcaacggacgggcgaggagaagcccgacctgaacaacgtggactatgctggactccgctcggacaacagcgaagttcggcgcaaacagttggacaacatcgcagtggccgcgttggaatttcagccgaagggcaacacactcgagaccacggaagtcgggaaaagtttaaattccaaattaaagcgaattccaatttaggtaaaaactgaagttccctttctgattcgaggcgacctccgcgagtatcagctcgtcggactcgattggctagtcactctgtacgagaaaaatctgaacggaattttggcggacgaaatgggccttgggaagacaattcaagtaaatattacttctcgatccattatctactttttcttattcgccatttcgttgtttcctctcacccatttcagaccattgctctgctcgcccatttggcttgtgaccgtgccgtttggggtcctcatctgatcatcgtgccaacctctgtcattttgaattgggaaatggagctgaaaaagtggtgccccgcattgaaagtgctgacatatttcggtacagcaaaggaaagagccgagaaacgaaaggtgcggcggtgcctttttaatttgcccattttatttgtttttagggctggtccaaaagcaatgctttccacgtttgcatcacttcttataaattggctacccaagacattcgcgcgttcaaaaagaaggcctggcaatatttgattttggacgaggcgcagaacatcaaaaatttcaaaagtcagcgctggcaaacgctgctcagaattcagtcgcgtcgaaggttactgctgacgggtaaggcatagtgaaaccgaatgttacccaaaactcgaaccataaaaagaccaggacttctctcgagacacgagacaatttttttgaatatgccaaaaatggtcgtttttaagtattttcagcccaaaaactgccgtaacaaagttaaaaggatttaaaaaaatctaccaaataagaaattttaccaatctttttttgatttagaagaatttttcttatatttcgtaattatcctgggtttgttttggagatccctcccccccccccccctctcaatggccgtatattttcccccttttcccgtccatttttcctttaggaactcccttgcagaattcgttgatggaactttgggcgttgctccattttctgatgccgcatgtgttcgcttcacacgacgacttcaaagaatggtttcactcgcccatcactgacatggtcgaagggacgtccgaagtggaccaggcgttggtccaatgcttgcacaaagttcgcttttcaaataatcgagaattaatcgcctcataaacatcagatacttcgcccgttcattctgaggcgactgaagtcggaagtggaaaagcaattgccgaccaagacggagaagatcattccctgtccattgtcaaaaagacagcgctttttatacaacgaatttctgtcaaggcgaacgtaagggaaataaaaacaaccaaatgtttttaaatcagaaaacggttcgttattttttgcaggacaatggacaacctcaagtccggcaacatgctttccgtgcttggcattatcatccagctgcgcaagtgctgcaaccacccgaacctttttga

SEQ ID NO: 51078 - DNA, 582 bp, Heterodera glycines
  unsure (1)..(582): unsure at all n locations
atggccgacaaaactactattaatcttattcttcaacgacttgaagcgattgaacgtaaagtcaacaacaacaacaatgccgttccagcgcagttgaatgaacaactgcaaagcattgttgaccgtttgtgtgacatcgagcggaaaactgacaccgcaaacaacacaactgcaacgcgacggactcagaggacaaagagcggaagcgcagtcttgtactgatctaccttccagaatcaaccaaggaaaagccgatagaacgggccaaagaagacgccgacatggtgtccgacgttttggacgctttggatgtagaagtgtgcccacagatggtctaccggatggggcgccggaatgatgacaagcggaggggccctcgcctggtcaaagttgtgcttccggcgagcacctttcaacgcttcgctttggcacaatggggacgacgccgaaatgtactccgcgcaaaaaacgaggagtgggatcggctgcttgttcgaccgtcgttgacaaaagaggaacaaaaggcggaacatgaggcgcgtgtcaagaaaagggaggagtacgaacaaaaacngggatgga

SEQ ID NO: 51079 - DNA, 558 bp, Heterodera glycines
atgtgttatagtaaaaaaatccatacttttttccagagatttttggaaccagtgggttcgggttcaatgttttgactagtgaaaactgagaagaattgtttagccaaggcgtcagatttatccttatcggtaaaagcaacctttgaataattttcttagaaattccaatatatttttcccttattctttcttttttaatgtctttccaaagtaattttcgataattaattaatttctgaatgtgttcaggcaatttgggctcaaaattgctttggactaatgggacatattctctaattaaaaacaacaaaaattgattaattttatgaaacattgagtcaatctcagtgcaatctgaaaagaaaaaattccagttaatcgaagaaagaactgagttaatcgctaaataattagctctacgaaaatcgaaaccttttttagaattttcttataagtttttagcttaatttcacacgaaatactgttatgatcactaattgttaaagggagggccaacagcacattttgatattaattgtggattattttgaaaataaa

SEQ ID NO: 51080 - DNA, 1207 bp, Heterodera glycines
atgtcggacaatccgaaagaagcggagaaagaaatggaaaaagcaatgtaaataattaatctaaatttgattttctaaggtcattttgcttttcccttttcagcttcatctctgccgactgttggttgggagtgttcgatttgcttccgccatctcaacttggcctcggaattgcgatgatcagtcaccgatttgactatttcgttgatgaacatttcaaaactcgcaaatggaaattgagaccaattgtaattcgaagcaaaatcggagagaatggcgcaaaggaaatggaaattgtcaattccgatggaaaagaattgccaatccctcaaaatccgttgccgaacaaagtcatcggattcagatgcattaggaccttgtataaatttaaatttttaatgatttgtgtcaatcatactttcttatgattttcagcttcatcgaccaaaatgtgctcacttttctcggccattttcatcgttttttcgccaattgtgcaacagaattggacattaccactgaaaatgttcgcattttggagtttattgtgcacaacatttggccaatgttcaaggacaccatttatctgttgattttgaacatcgtcgcttttcgtcaaatgcaccaattggccccgtcaatgctcaacgactgtccatcccttcgcactttcaatttgtctgacggcatttctcttggatttccgcctgatgacagtgccaatgcgtcggatggccaaacggttgccaaatggctgttcacgccacgtcacgacaatttgaagaagaagttcatatgcgttatggattcaacgatggaacaatggttggcaaccgtggaacaaatcaaagcggtgattatttgattattccaaattaattcgtatttcccctattttttgtcttctttttaggcattttcaaatgcttcgtctcctgtttatttcggcatttctgtttactttacgccgtcctcttcacttttttcttccgttgtgccatttaaactgaccaacgaattgactggagagaaattggaactggccaaagaagcggaagaagaagaagatttaattagttttcggcttaaccgttgtccaattgtgcccgaagataagaaacagcagaaaatggttaaggaattggacttgttgctatggaaccgaattgaaatttatatcgaagacgacggagtcggcgatgggtga

SEQ ID NO: 51081 - DNA, 1331 bp, Heterodera glycines
atgtatgtaaatatccgtcgattcccaactgatcagttcgccgatcaagtggatatctaccgggacgatcccagggaggatgtgcacgaattgtggcgcaaattcacggaaagcatcgattggatccatcggctgaactgtggacgaaaattgctccaattcattcagctgctgcaccgattgttgccaaagtacacggagatgaaccgattgaaagcggaagatcaaagggagcaattggaggaggaaatgttttgggcggcggaagaggaagaaactgtgccaacaccggcggaaggggcggcgcggggagacgatgagggaaacagtgccaaaaacagaggtaaaaattgggaaaagatttcaaaaaaattattattgtttaaattttcaaattatgctccataacaaaattataaactcaagaaaaaatttttttgccacttcaataatatctcacgaaaaaaattttccagccccctaggaattttttctgaaaatttcccgatttcaaacctgtagcaaattttgttctctttctttttgtcttcaaagttttgagtttacctatattttgttacgccaaatttgggaccattttcggaaaaaaattcataaaaatttttttcttttagctcttagtatttataggggaaggtatgcttgaaatttcagctgaattagtccacgggaaattgctgaagtggcaaaaaaaaaattcttgagtttataattttgttacagagcataatcttaaaaattttacgtaaagttttattttagttttgagagccttcgccacattggaactcgagacaatttacaagaaaatcaaagagaaaatgttggcacagtttgagggctggtggaagcgcgtgccggaacagaaggagccgctgtacgagttcttcaaacagctcgaggacatctcaacgcgttacgtcatggcaattgttgacgcatttttcgacggcatttccattgagagttttcggcaggaatattcactgggcgtcaaaggtggggctgtgagcggaatgatcagaattggatttgacactttggcactaatccaaacttcgaaatttgtttattttaacgaacattgggaaaaatgccaacttaatctatcagttttaattagagaccggacaactggggtcggaggatcccgagtcttgatcccgaccgaatcccgaacaatcccgacgattttgaaagaacgatcgggacgaatcccaaatttaatcccgctggattccgaaaaaatccagcggtatcccaatcccgtccggtctctagttttaatttaaaaatgcgacccataccaa

SEQ ID NO: 51082 - DNA, 266 bp, Heterodera glycines
atgccggacgctgaacaaatgcgacaacagctggagcatcatttcgtctcgaattggttgatggacaccggcagactcgacgaattgaagctggtgagttgatggaaggggctttaaaatcttatccaactaattaagagggaggaggaacgacgggagcaagcagcggaagacagaacgaacgaagaaagtgatcaagacgccgacatcgatgtcgttgactgatcgaggattgatggtttattttcattacacgtataaataaa

SEQ ID NO: 51083 - DNA, 156 bp, Heterodera glycines
cgtccggaaactgagctgctgtaccaaaaaagatttgtatgtgtggcgaagtggtttgtgagaaggtcaccaaaggggtgggtcccaggttcgattcccagtgcatgctattgatgtatttcgatgattttaatgaataaataaaaggaaaagtga

SEQ ID NO: 51084 - DNA, 700 bp, Heterodera glycines
atggccacgcactgtgtgaagggctgtgcgcttgccaatggccgcttgatcattgcgccgactgttgtgatcaccaccggcacatttttgaacgcggaactcgtgtggggcgcgcaacgaaagcccggcggtcggatgggcgaggcgaccagctcgggactggccgggtgagtcctcaaatcggctagggctacggcatgccgtccgtgttatgcctaacttaatcagcaacagcatgaagcgggttggaatcatggcatttttttgtgtgtggattaggaattttccagtccaatataaaagccctagttctatcgaatgatctaaagttatcaaattcagccaactgtgaaggaatttagaatcaaaaaaccggactggcgcccagttgtccttttcaaatttggattatttaccctatgccgttcgttgtgcattaattaattcatccatttaactctcatttttaattgatttatataaatttgatcaaatccccattttttttttctagcacatttcgtcgcgttggatttcgcaccggtgtgtttgaagctattttatacaaacattttgtctaattttgttcccactcccctcggggaccggtaaattggacaccaagcggaaaaatggacaccaaaggaaaattggacaccaaatttctttttaaaaaataaccccaggaattagcttaaaa

SEQ ID NO: 51085 - DNA, 1108 bp, Heterodera glycines
tgtgaaactagaaaattagaattggtggagaatagaaaagttcacctggctcccaaaaaaaaaattgttgaaattttcttataaaaattttctatgcttttctttggaacatttctttcagctcctttcctatgtcggctacacggatgaacgtctcgtcaaaattgtgtgcgaaaatgtggacgaaagccattcgctgatcagtgcactgaacgaaggcatcaaagggccccgctattgtccgtcgttggaggcgaaatgtctccgatttgggcacttgaaacaccgcgtgcgtatgtggtggcattcttcgtctctgatcagtgatcaagaactggcccaattttttgtttttcaattgaaatttcgactcccgacgggtttataggcacaaaattccgatttttaaaaattcggacgggttttttatgaattttttttttttgattcatggtgtttttcggtcggaatttcaatttccaactgatttttaggcattaaattatgactttttaattcgagattggtgccatctgtctcaaaggatgccactcttgtttttatgattattattaaaactttttgttagatttttttggagcccgagggattcgacagcgaattgatttacccgcaaggctgcgcattggggtgagaatgaatggcggaagggggagcaagcagcgcattctctcccctctccacggaaaattttagatttttttaaactaaaaaattcagtttttaaaaaaaactttttcttggcggggaggaaggtgacgaagaaaaaaaaacaatttttatttttattgaaaactataaattttaaaaaattcaaattcttaaatcattgacccgcattcagtttcaccatggatgtgcagcagaaaataatgcgctccatcgacggcttggaacgggttgaagtcgttcaaccgggtaaaaaataaaaaaataaagcattttgacaaaaaaaaatatcataaaatccaaggatattccgttcgctacgactttgtgcacccgcaacagttgtggccgagcctggagacgagaaaagttgtcggactgtttttggccggccaaatcaacggcacgacgggtgaga

SEQ ID NO: 51086 - DNA, 370 bp, Heterodera glycines
atgaccagtgagtgagaccgagggtaccccctttttggcagaaaaatgtttgaaaaaattgcttaaaagacagcgttttccacaaatttttcaatataacggcggaaaaattaattaaaatcaataaaattttgtttgtattggaattttaaattttttttcccaccaattttcagtcgtatcgcctctttgggttggcgcattgccgcatgttacagcaatgctcggctggacattggccatccatttcatttcgaaatatacccaaaattaaaaaataatttttttttatcattttcccttttttgcaccctttttaattggcaaatattggaaaacaattattatttttcttaaaatttcttttaaa

SEQ ID NO: 51087 - DNA, 872 bp, Heterodera glycines
atggtgcgaatttgaatcatagctgtacaaacggcaacactgcgttgtgcgcaacgaagttggggctgaaagacatcgtcaagcgactgttggaggcgggggcagtcgctgaccaagcgaaggaaaagggtaaataccgtaataaatatttcaaatactctttattagtgccaccaccctctaataaagcccccacaaatagcatggggttgaaaatcgggtacattatcatttatctcccgcgacaaataatttatcaaaaaaaaacatttttagaaatgtttatacccatatcttgcgattttctatcccgtatatttgtaattccatttgctattaataagtttttgtttatccatccaattcaaattgcccttagtttaggcgtcgatgtgcaagaagtgtcctcgagttccgccgggcccaccagtgataagtgaaagaagaagaagtgatcatttgaggaaggaaatgaaatgattattttaggcaatgctttatccgctaattgtttgctctttgagctttatccttttgttttggctatttattgtttgcttttttaggttgatttttgcttccgaatatgcttggatacataaatattttctgcttataaatttatataaatttctgtttttgattagtcaaatcttttttaacatccggattcgtgctctgcaccttaaaatagtcctagaaaattttttccaagattttcaaaaaaaaacgggaccagtaaactccatgattgccgttattgccacccaaaaagttataaagcattgaacatgctatgggctttgttgtacaagcctttgctcggctccattaatccttaacacaccgagtcaaaaacgagacatgtgtca

SEQ ID NO: 51088 - DNA, 968 bp, Heterodera glycines; identical to SEQ ID NO: 3607

SEQ ID NO: 51089 - DNA, 1100 bp, Heterodera glycines
atgaccaaaaaagtggcattggcactgattgacttttggtttcagttggacccgcggaaacgcatctcagctgcaggtgccatgctgcacaaatatttcaacgaaatgccaaaaactttgcacgcactttcgcccacaggtaacagaagaagaaaacatttctcaaaaaaaaatttttctgccatttttagaatcaatttttgccgcatttgatggaattattcagcaacaaaaactttcaattgcatcagagacgacaaatgacagtgacgaaagaagaacgtgttatgtttgagaagaaaggagggggcttgtttattttcggtggaattgtgttaaatgaaagagcgatgttgtataaattacatcattatcatatcaatgcggcgcttatccacacactacaaacaaaaatttgaatggtcatttgggatgaaagacataacttctctaaaatgtttaatcgttctccggttccttcagtgtaatgtcaacttcactgtgcaaaaaaaaaccgtactatctcgtcgtttctcttttaaatattgttttgttatcagtagggctgtatttcgagatttttgtgcatatttgcatattttggctttttctgcacatatttcgtgcatattttgccattttttgtgcatattttccgactttttgcatattttgccatttttcttcaaatattttccgattttttgcatattttgccatttttcttcaaatattttccgactttttgcatattttgccatttttcttcaaatattttccgattttttgcatattttgccatttttcttcaaatattttccgattttttgcatattttgccatttttcttcaaatattttccgactttttgcatattttgccatttttcttcaaatattttccgattttttgcatattttgccatttttcttcaaatattttccgactttttgcatattttgccatttttcgtaaaatattttccgttttgaatatcccttaagtaaatttcggcagacaataggatgagctttagtgctgaaaatcttgagaaatttttgattttcaattgcaaaaaaaaccgataaaatttatgagga

SEQ ID NO: 51090 - DNA, 416 bp, Heterodera glycines
gcatatcccggcgcagaaggactgtgcagccctgaaattgaaatttctgaaggcggcacaatgctcgatggcaaagggaaattcaacgatttaaaagcgatgttggacagcaacagggaaaacatcaaaatggatgcaatgcgcaggataataaatgcgagtatttagtaatcggatcacctttacccgaaacaattttaaatctcattttttgttcattttttagatggttgctcgtggaagggatgtttctgaactttttgctgctgttgtgaaaaatgttgctgtaaaaaacttggaggtctaacacttaattagcttggattaatcaattaaaagagcaaatttttagctcaaaaagttggtttacgtatatttggttcgttatgcggaggagcagcaggacttggcacttt

SEQ ID NO: 51091 - DNA, 686 bp, Heterodera glycines
attttcctttgtttattagtcatcaaaatgggaaacattgtctattctgacaagttgtcctgttacgaaagtgccgactattgtaagccgtcaaatttttgttttgtttttttgaattgcgtttcttttggaggtgctcgttcatgctccgcatcttcgcagtgcgtttacgtggacaattgtggcgactcggccaatgcgcattacgcgtgtttgcccttcgacacgcgactgctcacgtctgttctcgttccgatgatgtaaaagcattcagagagagaagaattaaaacaacgatagatagaaaaagttgtccaatgcctcaacaattaatcaggtggattttggtcgtttccttcctggtaatcgtcctctgctgctccgctttggtggtgttctacgcccttagggtgatccgacgatcattccgaaatccggtacaaactgacggagacatcgttttctacaatgccaggtcagtctcaatgaattccaaaatgaattatttgtccctttgtttcagaaacgtgcacaattttccgcaccctgcagcaatgaaacagccaacggtcgaagacgacggcagacaggaatattattacaacaattcacgtagaaatgattattactgattggttgtgaatgagtgacatgggattgttacggaaaaagtttttctttgccca

SEQ ID NO: 51092 - DNA, 757 bp, Heterodera glycines
acatcgcaagtggaaacacaacacaaaattcaactgaaacgacaattgaagttgaagaaggttgtctaaacggaatgaaataaaaaaagtatgtgaaaattcgttgtagaaattccaacagcgcctactgtaaccgaagctagcaccacggcgacatcaaagacaacggaacaatcattggatgaccaaacatccaatgggacatcttcaccaagtacagtaaacgaaaaacaaccaaaaaccattggaaacgatacaacaacagcagaaaaagcaaacacagaaaggacggaagcgacaacagaaacagaaacgacaccaattcacaattcatctttgaatgtgccaattgatgagcagcagaaaaagtaaagaataaaggttaattattgaattttaataacaaaataacactttagcaacacaacaattgcaaatgaacacggctcattaaatgttgctgaagagacaacggtttatggaaatgtcaaataattttaaaattaaacggcatgttcaggcaacaacccgaattccgacctcaccaacaacatttgcagcaaatacaactgaaagtgggacaactgacggattaataatggaaggacagcaaaacgaaacaattattgttccgccagcaaacaaagaaagggaaaaaggggagaaggcacagaccatcaaattgccagtggcaaagagtgagaagcaaattgaaatcagtgaacaatcctctcccaatttcccaaggcaaatgtga

SEQ ID NO: 51093 - DNA, 506 bp, Heterodera glycines
atgtgcaaatttctaaacatcacgttgattgctgttattttacttaaaacagtcaaatcggcctatttgtccacgaaatgtgggttccattgggccgactactcaattaaatgggcattcgagcctcaaacacaaagcatagtgttcgttctgaaaacaatgccaccaagaaacttgagcagtgaaggaattctaacaacaggaatagcatttgaagcggaagtaagtgaaattagggtttaaagtcccaattaatcattaatattactgcgcaggaacacaccgaattcattggagttgcaatttcaaagcaaaaagatggagaaatgaaagtgatcagagcaaaagccaaaggcacagaaggactttttgaactgaattctgacaacacagcaaatagagtgagagaaatcacaatgaaaaaacgacagaatggagaaataattgtcgaatttgcacgtcaattgaagggggagaatgaacgaaggttgcttactggatgcaga

SEQ ID NO: 51094 - DNA, 1665 bp, Heterodera glycines; identical to SEQ ID NO: 20550

SEQ ID NO: 51095 - DNA, 990 bp, Heterodera glycines
agccctcgaagagctgcaccggatgcgagtgccgccgttgctgtacgctcaacggttgctgtgcaaagacggaaaattgcttatcagaaaaaacgaaataaaatcaggaatactcacgcccgtagacaaaccgttggatatatggggacaaacctatattggactaccatacccaattaattatttttgggatgcgaattgttttgtgcgaaactgttatgaaaaaagggttcgaaaaactgggaaaaccccactcagagactagctaacaaaatcagcataggcttggacttccgtaccaattattatttttataatgggtttgttaaatgcaaaacaattcacaaaagttgttttaactccattcagagatgagatagaaaaaaaacaaaaataagtttgaagagcccttgaagagctgcaccggatgcgagtgccgccgttgctgtacgctcaacggttgctgtgcaaagacggaaaattgcttatcagaaaaaacgaaataaaatcaggaatactcacgcccgtagacaaaccgttggatatatggggacaaacctatattggactaccatacccaattaattatttttgggatgcgaattgttttgtgcgaaactgttatgaaaaaagggttcgaaaaactgggaaaaccccactcagagactagctaacaaaatcagcataggcttggacttccgtaccaattattatttttataatgggtttgttaaatgcaaaacaattcacaaaagttgttttaactccattcagagatgagatagaaaaaaaacaaaaataagtttgaagagccctcgaagagctgcaccggatgcgagtgccgccgttgctgtacgctcaacggttgctgtgcaaagacggaaaattgcttatcagaaaaaacgaaataaaatcaggaatactcacgcccgtagacaaaccgttggatatatggggacaaacctatattggactaccatacccaattaa

SEQ ID NO: 51096 - DNA, 64 bp, Heterodera glycines
atgtttgaagagcccttcgagagctgcaccggatgcgagtgcccgcgttgctgtacgctcaacg

SEQ ID NO: 51097 - DNA, 488 bp, Heterodera glycines
atgggcaacgaaaggtgcacaaattttgggagacgaacaacagtaaaattgggcttagagaagagcactagtgcaaatgggtggattaacgacacaaaaatggttgtattaaatgcgcttaggctggataagccccacactaccggtactaattatattttctgtgtttttttctaaagctgagggtaaatttctcatttaaaatttaagctaaaaatctcgaatatggttaaagatggtatgaaaaattatttcaggtgaaaattttaaaaaagttgctaaatttattaattttgagaaaattgtgacttgtatttgggcacaaatcgggcgccggacttttcgacagcaaaggacttttcgacagaaatattataaattttaggaggggacttttcgacagaaaaagtaattaactttcaaattaaggggcgtaaaatcgtaaaattttttccaaaacaacaaaatgaagccaaaccagtattgaa

SEQ ID NO: 51098 - DNA, 3130 bp, Heterodera glycines
  unsure (1)..(3130): unsure at all n locations
agtgacgaaatgatagggagcccaaaaatgagtttataaattaattaaattttctgtaaatttttcagaaaatttttggcattctgtcttgtaaatttttcaaaaaatgcaatgctaatcccgtgggacccctacaaaaatcaaatttgtgtaccccgctgcgggattggaactcaattttttttttttttgcggggcgggatcccacgggattaaattgcctttatgaaacctcgtagtgttttaaacaaaaattagttttttataggtcatttaattaatcttctttttagaatcttttatgttagtcattggtccacgctttcattgagcagtgaaacacataaaattttaaaattatgagttgtgttgaataaaaatactttttatgcgcacaattatattcaaactaattagtggatttttatatgcatattaattcgatagtcccgaataatcccgagaagcctataacaactgaattcatctttaggcttaccgtccgctgattcgatcaatcgccgcacatttcgtgcacttttttgcattgtcgccattaatgttggcggctatttaatctgttcgatttatgtcattctgatcaaaccgtcactttcgccgatcactgcttggtttggacaccaaatttttgcactctttttgaacattgccgctgcatcaaacggacccattttgtactttacaaggtgttgaacaaatgtttataatttagtccatcgccaaaaccaaaaaacgggcaatttttagcaaatttttcaaagttgataagcctaaaagcattcaaattatcattattatttgatatttttcctatttaagtagttgggcggtggaatatattaattggacatttgaaatgaaaaacttaaatcaaattatgctgttttgaggcaaataaaaaaatataagatgttttaaaaattgataaagtttacaaaaatatatttcaacatcgaaaacaaagatagtcttgggaacaggatttgtcgaatctctaagattcggctactctcctaaataagggaaatcataaaaacaagggcatttggcagctctgggatatatggaaatgttcccacctttgtttagtacggaatatcggcaagcataccataaggtatttccagccatattcaaaagaaactcgaacacaaaccaagtggcaacactccaaaataatttcgtgcgaggtaccgtatgacgacgacagtatagcaggaagaagaaatcaattacagtagaacaattgcggatcaaaaggctcagataaggatatgacgttttcatataacccatggaactctaatcagtaacaaaggcatttgcattttcggatttgggccaggggtggggcacggacagaatnatcccgcggtctcggattgcgcaaaaaaattaccgcgcatcgtggatcgcgtatttaaaaactcaaaaattttccaactttttcacattaacttttttttaattttttaaaatttccttataatgtgccgatatgggccgcacgaaaaattttaaaaaatttgattgcaaattggtaaaagatttttaaaaaatcaccttattttttgatttagatacaattttttaaagaaaaattaaaggtattcagctccgtcgaggaaaaaagagaatttttaaacgaattttttgagaaaaataatccaacttttcaaaaaatttatttaaaatttgaatattcaaaaaagacaatcgcttcaaattttctttataattttgtcccaaaaaatcccgcggtcgcggttcgaggattcaaattaaaagcgcggattacggccgcgtctcacccctgatttgtgggctcccggacttttcgacagtaaatataaaaacaaataattcttattaaaataaattatattgcttgtcaattttactaaatttcttttaaattaacatacaaatatggattgctaaattagaattactagagatacgttttttacctgggaaaattttttttagaaaaaacacctttaagaaccggtccttaaattttcaaaatacactcctaggaagaatgaaacaattttcttaaaaattcatgtccaatttttttaaatttattttctaggtaaaggattttagattttataaattatttatttcaatactggtttggcttcattttgttgttttggaaaaaattttacgattttacgccccttaatttgaaagttaattactttttctgtcgaaaagtcccctcctaaaatttataatatttctgtcgaaaagtcctttgctgtcgaaaagtccggcgcccgatttgtgcccaaatacaagtcacaattttctcaaaattaataaatttagcaacttttttaaaattttcacctgaaataatttttcataccatctttaaccatattcgagatttttagcttaaattttaaatgagaaatttaccctcagctttagaaaaaaacacagaaaatataattagtaccggtagtgtggggcttatccagcctaagcgcatttaatacaaccatttttgtgtcgttaatccacccatttgcactagtgctcttctctaagcccaattttactgttgttcgtctcccaaaatttgtgcacctttcgttgcccattgaatgtaaattatgaactggactggtgatgatccaaaattgtaatacaattgcgcatattttattttttaaattaaatttgtaattttatttaataggtctacgacaagtcaactaataacagttgtggaagattgatacgaggcaattataaatggaaaaaatgttgactgtatttatattgattttcaaaaagcatttgactcagtgccccataatttacttttatacaaattggaaaaaattggtataaagggcaaacttttaatgtggataaagggctttttgagtaataggacttttcgagttaaaattggggattctttatcctaagtaaaaaagttacctctggcgtcccccagggctctgtcctgggccctttattatttttgatttatattaacgatcttcctgatgctttgccatcaggagtgaaaataaaattatatgctaatgatgttaaattatatatttgttataaagccaagagc

SEQ ID NO: 51099 - DNA, 1426 bp, Heterodera glycines
atgggttatatgaaaacgtcatatccttatctgagccttttgatccgcaattgttctactgtaattgatttcttcttcctgctatactgtcgtcgtcatacggtacctcgcacgaaattattttggagtgttgccacttggtttgtgttcgagtttcttttgaatatggctggaaataccttatggtatgcttgccgatattccgtactaaacaaaggtgggaacatttccatatatcccagagctgccaaatgcccttgtttttatgatttcccttatttaggagagtagccgaatcttagagattcgacaaatcctgttcccaagactatctttgttttcgatgttgaaatatatttttgtaaactttatcaatttttaaaacatcttatatttttttatttgcctcaaaacagcataatttgatttaagtttttcatttcaaatgtccaattaatatattccaccgcccaactacttaaataggaaaaatatcaaataataatgataatttgaatgcttttaggcttatcaactttgaaaaatttgctaaaaattgcccgttttttggttttggcgatggactaaattataaacatttgttcaacaccttgtaaagtacaaaatgggtccgtttgatgcagcggcaatgttcaaaaagagtgcaaaaatttggtgtccaaaccaagcagtgatcggcgaaagtgacggtttgatcagaatgacataaatcgaacagattaaatagccgccaacattaatggcgacaatgcaaaaaagtgcacgaaatgtgcggcgattgatcgaatcagcggacggtaagcctaaagatgaattcagttgttataggcttctcgggattattcgggactatcgaattaatatgcatataaaaatccactaattagtttgaatataattgtgcgcataaaaagtatttttattcaacacaactcataattttaaaattttatgtgtttcactgctcaatgaaagcgtggaccaatgactaacataaaagattctaaaaagaagattaattaaatgacctataaaaaactaatttttgtttaaaacactacgaggtttcataaaggcaatttaatcccgtgggatcccgccccgcaaaaaaaaaaaaaattgagttccaatcccgcagcggggtacacaaatttgatttttgtaggggtcccacgggattagcattgcattttttgaaaaatttacaagacagaatgccaaaaattttctgaaaaatttacagaaaatttaattaatttataaactcatttttgggctccctatcatttcgtcactgatcgtttcgtcactgttcagttcgtcactgatcatttcgtcactgcgaaaatttttaaaaaattgtttggcacattgtcaaaactgaaaatttttttaaatttaacaa

SEQ ID NO: 51100 - DNA, 1183 bp, Heterodera glycines
atgataccaagattgttggatttggatgcaaaagaaaaaagctataatggaaaaacgagctggcgcccaaacgtgagcgctcaaacgcagtgaacccatttttttatggtaaattttttgaaaaaactccaaatagttccgaaatagttttttaaaagtcacaagacaaaattgttcttaaaaagtttagcaaaaaataaatgaaagcctaaaaatcccatccctgtttataaacaaagaatcgagattgatagatttgcttacaacaaacatttacttaattgataaagcagtaattaagttagcttaaaatctttgtatttaagaaatttacttttttccatttgaaggaaaaagcctgcaaacaccagaagaagtccttatccgatggattggtgagtttcaattagaaaatgaaaaaattattataaaaaataataatgaaaaaaacatttttttattcaaaacatttgctttccacctttaggagaagcccgaaaatggtcagatggagaagagtgttggagtgaactcctctgatggtgaatttaaatttatttaaataatcaatccttaaaattttggaattagtcatttaaagtttaaagcttgaaaattatcctgggatataaaatcacgaaatatggccataaaaaatggccaaaatatggccataaatatagaaaagaacaaaaattgatacaataaatatgcctataaactcctaataaagctaaaagcttttttcatgcctttacaattgaaaaaatgggaggattttcaaataattttgaatttacacaattagttattcattttaaaattaaaaataaatgtttaaattcgttttcagtgccgccaaatgccaccaccactgcgcttactgccattccgatcccctgaagcgaaggagaatgaagaaaaggacaaggacaaacaaatccaagtcaccaaagccataatcaaatccaaattccgccataatcaaatccaaatccgccaatcatttatatcttaatttaattattatttttactaattattttattcataatttatttaatgtttttgcttcatttgggtttattcaattttattttcattcaatttattcatttatcaatttatccaaaattcgaccgggattatacttatttcattgtaatatgaattatatttttaa

SEQ ID NO: 51101 - DNA, 321 bp, Heterodera glycines
atttataagcatttgaagggttctcagcagtttccctgcaaaatttggtgagcttctgatcagtctagaacgttgggtgatcaaatgcaaaaaataattaaaaaaaaataatgctggtgtggtaagtgtgaagaactgtgttcctccaggcaaaaaattctaagaaaatttataagcatttgtagggttctcagcagtttccctgcaaaatttggtgagcttctgatcagtctagaacgttgggtgataaaatgaaaaaaataattaaaaaaataatgctggtgtggtaagtgtgaagaactgtgttcctccaggcaaaaa

SEQ ID NO: 51102 - DNA, 705 bp, Heterodera glycines
tttggtgcgctttagagcactttctgaaaaaaatatttatgaaacaaaaaaatcgattttttcaagtgtccgtttggggtactcaaacaattatggggagcaaaaatccaacgcagaattaaagtacaggctatagggaagctattcccgaaggattcggtctccccataaatctgggcgcatcggttcggggggactgccccgaaaacaaaaataaatcgattttttcaagtgtccgtttggggtactcaaacaattatggggagcaaaaatccaacgcagaattaaagtacaggctatagggaagctattcccgaaggattcggtctccccataaatctgggcgcatcggttcggggggactgccccgaaaacaaaaataaatcgattttttcaagtgtccgtttggggtactcaaacaattatggggagcaaaaatccaacgcagaattaaagtacaggctatagggaagctattccggaaggattcggtctccccataaatctgggcgcatcggttcggggggactgccccgaaaacaaaaaaatcgattttttcaagtgtccgtttggggtactcaaacaattatggggagcaaaaatccaacgcagaattaaagtacagactatagggaagctattcccgaaggattcggtctccccataaatctgggcgcatcggttcggggggactgccccgaaaac

SEQ ID NO: 51103 - DNA, 1321 bp, Heterodera glycines
atgtacaaaaaagtattatttaataaattgagcaaatttcagtgtccaccaaagtgtgcagtttcggtaatgaagtggtggaaaaggttgaggtgggaaacaattaaacaaatatagaatattattttaaatttgttcacaaattttcagatttactcacccattgacgaagaggaagaagccaaatgctccggagtttggcattttcggctggaaaagtcaccaatgtgcgaatacatggtgagttacaaaatacctattaactaatttgatcatttaagaaaaacatttaccaaaaaacctaacaactttgagtaaaaaaagacctagaattttttttctccatctaaaaacaaaaaacttttgaaaatcaaattttcataaaaagaccctaatttttgcttggcaaattttaggtcaacttttgaaatcttatgggaattttgtggcactgcggcgccgatagtcgccgacgggaaaatttcttttgggatttttcatgaattttgttaaaaaatatattcaaaattcaataattttgctctctgaatccaaaaaaagactaaaataaggacaaagtgcttaaataaggacaaatcttacaaataagaacatttaaaatttgtaagatttgaaccctcaaaataaggacaaatcttacaaataagaacatttaaaatttgtaagatttgaaccctcaaaataaggacaaatcttacaaataaggacaaagggtaaccctggtttagtgtataaaaatccggtctctaataatttattaaacccaatttaaaaataattatttgcaattaatatactgtgattcgggtttagccatgcgatttttgctaattatccctgctcaattatttcaggtacgcttcatttctgagctgaaaaagttgcaggagccgtcgctgatgaacagtgtgttagagaattttaccggtaattgtccaactacagtaatcacacagtgttttttaaggtcatgaaatgtttgcgaaattgagcgaattttctgtttacaaaaaagttcttgctgaaaatcaaatctttgttttacctctctttgaaatttacttaatatgacattgtttttatttttatttttatttcaactaaaggtttttcaattttctgttgttctaaatttctcatttttaattaatattttctatattttataaatatttaatttaaattgttttaaaaaaaacttttaattaaaaaaaattcagttcttcaaattgtcactgataaacaaagcaacgacacattgatggtcatcgcgttcatggtcggaatacgagaggagtaa

SEQ ID NO: 51104 - DNA, 1879 bp, Heterodera glycines
gaagattgacccgaaaattacgaccgatgacgttcataaattcctagaaaagcagaaaacatacacgattcacaagcccatcaggaaaagattcccgagactaaagacgataccaagtggcttccataccgattggcagtgcgatttgtgcatatttgaccagttgaaaaagcataacgacggttataaatatttattggtctgcatcgacgtgctgagtcgaatgatcttcagtgcaccggccaagtcaaagaagagtgaggacatgatcgaggcttttgatcgggtgttcgaaaagtctaaaattatcccgatgaaaatatatagtgacagggggcttgaattccaagcaggaaaaatgaaaaaatattttgaggaaaaattcatcatcaaaaatgtaatgtatagtcctgatctgcacgccggagtcgttgaaagggcaaatcggacaataaaggagcgcttgtacagatattttacaaagaaagacactcttcgatgggtcgacgtaatagacaaaataataacaaacattaacaacagtgtgaatagaacattgggagccaaaccgtcttcaattaattttgaaaatgcccgtgcgctctgggaaaaattatataaggctagggaatttaaaattttaaaaaagaaaaaatttaaaatcggtgatatcgttcgtattaccaaggaaaagggaaaattttcaaagggatacctcccaaactttaccgaagaattgtttaaaattgttgttgccaattcgacgacacccgattcatacaggatcgaagatttggaaggaaatttaataaaaggaatattttataacctggaattagtgaaaatagatggatgacttttacattgtgctaccctcgaacacaccgggaccagggaacagtacatcaaaattcacagtacgactccccgagattttggaattgggcacaaatttggtcagtagctctctcatcaattatttacccctactcattcaccttactcggtataaacggtcaagagtttattaaagtatgggaaaacgacagcagtgtcccgactcaagtttatttaccggacatgaattttaaaaccgccgggggcctgggaaataaaattaacgaggcattcagccatcattacaaaatcaaaaaacaacgtggaaggagagaagccaaggctgaagataccaaagattcaaaaattgatgtcgcaaagagcgccgcagaacgcgccgggagagatgtagaaagacattttaatcagatcaacaatatctcgaattccatccaaacccaactaaacacactacgagaaacaaatcctcacattttagaagagcctgatataaaaatttggtttgacaaaatggttgaaatgggaaccgaaattcaaacatcccgaaatgaacttaagtcttttcaagaagaagtagataaagccaaaaacataacattggagcatgtggaaaagaatgacttgaaaaaagcaaagaaatcagccgacgtcgcaaagggaatcgccagacaggcaaagaccaaatatacatcaactctcgagggatataatgataaatcggaaaagggttttagcgggatagtgaataggcttaatgaggcactcggtgagcatattaaacgtaaagatattgaaaatagacaagtatctgaagctgagaaaggaccacaaaaaagagaaagactagccaatgaggatgttcaatttcaatatgacagcattgatcaaaaatttattgtctatctttccgctgctgtctcccatatagatttgtcaaaacacctagcctatgtgctcggttttaagaatacaaggctatttcacgcggaagaggcgacttatatgccggatttgacgggag

SEQ ID NO: 51105 - DNA, 307 bp, Heterodera glycines
atgtgtgtggcaaatggcaacactgatcagataacaaaaggggagatcaatggtaaattaaatggtaattgcaatgacaaattagggagtaattaaaatataaaaataggactagaaaaaattaacaaatttgtggtaatattgaaaaaaacaaaacatgaaaaatggcaaaaaattgtcgtccatctccatttgcagaagaagggcatttcaataacgagtcgaaatgctgtggtattacggtatcctactgtaaatcaaaaacagtaccaattcaatacagtaattatggaacaaaaaaatgaaa

SEQ ID NO: 51106 - DNA, 95 bp, Heterodera glycines
atgacgagtgacgaaatcggatggataccatctacacggcgattcaattttgggctccaagtacaattaagttggattttccgtcttagtggtct

SEQ ID NO: 51107 - DNA, 729 bp, Heterodera glycines
atgattgatcaaatcttgatcattttggttttcattgggaccatatgcgataacaagccttcgtattgcctgatcattaagcggcggattttaagcgaaaaaaataggtaaataaataagggcataaaaattgcgaaataatgcgaaaaatggtaaaataggagcgaaaatttgaaaatcagtgcgttttttcaatgaaattaaattaaaatcgatgaaaataacttattgagaaaattaattacaaaggaattgaatttcattcttttttcgaagcaaaaaaataattggggtttctacagaaaattctttttttcagttttttgttagtttgtattcttaatcattttttcatatctttgatgaacctattcaatgttaagattttaatggttaaaaaattgaatgtcaatctttgtgactagtaattttttcgaattttcaattagttatttttgtcgatggcttatagttttagtaaaacttattgataatagtggaatttttatgaatataatatttttgacagcgcggcgcaaaagtccatttttgctgggcggcgcaaatgtcgcggcgcaaatggagcggcgcaaatatccgcggcgcaactgtctgcggcgcaaatggcgcggcgcaagtgtcgactttgctgagcggcgcaaatttcgcggcgcaaatgtctcatcacgctaattttatgtaagaaaatttacgaattatgtaaataaa

SEQ ID NO: 51108 - DNA, 572 bp, Heterodera glycines
atgtcatccaatgtcacggacactgacagtttcccattttgcctgcttgccaaacttccggttggacttggcgtatgcgaagttggaaatggagaggacagcagtggcagagaaaatgcgtcattagccgttggcttactgtattattattattattgggaaaattagtgtttttcaggggattaataaatgatttaaaccactgacttggcatcctgtaacggtgactctggaggcaacgtcaaatttggggccgtgttttgttcttgaataaaattaaaacatgagaataaattaattatcttatttgtaagtgctcccaagtgtacgtgactgactgattttttcagatttgtgcggatttttgagggttgggagaattttttttttttttgaaaaactattaacacacatatttttagaacaaataaatcaaattaaaaattttaaaaaaaaaattcatgtggcaactttcggaatcattagattcaaaattcatattattattattttaaatatgattcaagactgcaaaatttagtcatttttgattgtaaaatctgttaattata

SEQ ID NO: 51109 - DNA, 1266 bp, Heterodera glycines
atggcttttgtgagtcccttgagtcccttcccctctctctatgtcaccaacagcaaatactataaaatttttccaaatcccttttcattttcaactcttaaaatctctcttctgtgacgcaaccgcgttaagtccaatcttacatatatagcttaatgaaaggatgcattagtgccgtctgcccattaaaattccataaaaacatatatttaaaatggggaatttttggcatcacacgcataattatttatatatttatatttaaaatagtttaaattattaaaaaataatatttattaataaatttacctattgaatttttatgtatttgaatttaggggaaaattattatttgtattcacattaaatttttgcctcagaaaaatgtatcgacaacttctgcaattcaaccatgtaatctaatgcttaaaacaaggatttttgaatttttaaatttttaataacccaagaattttcgaaaattccataataatttaagaaaatgataaattaaaatttttttaaaaattccatgttttcgcagctccaaatctattgcattcgtggcgattggtgtgactacgattgtgggaagttccaccgccgaaagctgaacatttcagacaataattttgtgcgtgcccatgtggacaagctcgaaaaagccgccttgccgaacaatgaaaatggtgggtggtcaaatgtccattgtggccaagggaaggaagagccatggccaaaactcaaaaattgataaaagaaattttttactaaatttttaaaggaaaaaatcaatttatttaatgtttatcaccagttttcttctcttttacctctgaaaaccgggcacgaaccctaaaaattcgaaatttaagactgataccattgtcgatggaacccaaagttcaaaaaatgaactttttaaatttttacacttgtggctcgatttttttctaaaaaattttttcgaaaaggagggggtatttcgaatttttggcttaccccaccccccccccccccccctcccgaaaaattttaaaaattcataattttttggggtcaaagtcactgatcacgaatatggtgtcatcaaatgtccaaacaaacaccatattcatgatcagtgattttgaaaaccccaaaatatgaattttaaaatttttcggggggggggggaagcaaaacacggaagtaccaaggagggagcaggcgaaactcccgcaaaatgtgtcattggaaaatgcgttacagtatttcaaaaataaa

SEQ ID NO: 51110 - DNA, 1837 bp, Heterodera glycines
atggcattaatgccattcttatgtattattattcattcatgtcagcaacagttgagccattttgaatgtgatgccaaacgacgatggcacaaattgtggtgcgcgagcggacaggacgggcatcacacgaaaattgatgaatggaatggcaaaagatgaatgaaatgagagaagatggtgtgacggcacttttagtcatgtaaatatgctgaaattggaaattgttgtttttaggatgaaactaaattgtaaatatttggaaaacggcacattttgtcgcgtaaatatgccgaaattggaaattgttatttttaggatgaatcaattgtaaatatttggaaaacggcacattttgtcgcgtaaatatgccgaaattggagtttgttgtttttaggataaagttagtttgtaaatatttggcaaaagagacactttactgtattgaaataattattctctagctaattaatttgtaaattttttgaataatttttatgaaaaacaaaattatttatataattattaatttaattaaataataacggatattttaattgaataaattacataatgattcatcataaatatttttctgattctatcgcattgcccatttattctgtcacaccaattcgactaaatgttttctccttttttgtttgaataattatttttgttttttttcgacggatcattccatcggttttatattttatattatggttgaccaaatcgtttagggaagggttgaatagaaaaaaagcagatgtactttatcttcattatcccgatttggttataattatctattttttggaaaaaagattaatacgaaagcggacgaccgacttttattcaggcaccatttcaaagtttttgggctgggacaccagcgccgaccttgtcccccaaattccggcaaaatttgtccaattttggcgatttcccggcctcgaaaatctataaattatgatgatgatatgagtaattagcgtttcattgtttttcagcccaatgcacaactcttttttgtcattttgcgttcttttgtcgctttttcattataattttgctggtgccagtcaatgtccgacaaaaccgtaagtgatgattattacgctcgagatcagatttttcaagttttaattttaaatccaatgacgagaaatgaatttttgtctcgaattctctggtctcgagcatagaaaaaaaatttcaaaaatataagcaacaaatttgagaattttgttgaccggcacaatcaaagtgccaaaaaatgttgtcgattttaattcgtcggcacaatgcttgccatcatgcaaccaaacgggtcaagaagggaacaaaacttttgggcttactttccggcttcccattgatgttggacaatgtgacgaagggtaaaaaaattattaattaaaattaaaataatcatgaaaaatacaataaaaaaatttaattatcctatttttaaataatttgccggatttatgcttttttaaagcctgcttatctgctatccggggacattagaacgtgttagcggtggtggtggcggaggttggcaaaatatggcggctgccataaaaaaacaatacaaaatcagcgactacaaaaatgtatgaaaataatttttaattaatttttaattattcaattaaaataattataattaaattcaatttcagaatacaaatattccaaatgaaaagtgcaggcaaaattgggaaaaagatggcaagaaagatggaccaatttggcatggtgtttatgtgtacacagaacggaacaatgaagttcggcacataatgttggagttatcattttcaagcgaaaa

SEQ ID NO: 51111 - DNA, 986 bp, Heterodera glycines
atgacgcgccatttaaaaaattcaaggtacaactttggcccaaaccgtcgacaaatttcgattccattttttggcaatcaaagtgaactcgttggctacggtaatgttgaagaaaactgtacaaaatttttttggccatttttaaccataattccaattgtcaggaggagatgctttcaaagaatttgacgatgcttctcttggcacaagcttcatccaaaatatacaggaaggtgcatttttgaaggattttgtcggactttggacgcttggccatgacatgatggcaccaccatcggcagcaggcacccagcaaagtgttgtgctgtacttttaccgtagttgcagctgttccatggaggcctgggtgagtgtaaaatttgatagaaattttatggaaaaaatttaaaaataatgttatttttcgacttgggtggggtggggttacaaaaatcagttttttttttaacttggtttaatactttttacacacattttttatatgtctttttgggattttttatttaatctttttttttgataacttgaaataaaacatggtcactccaaaatcacaaattttaaaattttttatgcctaatctgcaaaaagccaggtccatgaaaaatccagcaggcctggatcccagatccagattatctctaattaatcctttttgtttgattaacttcaatccgttaattcatttatgaacgcacaaaattaagtttactcggccaacggacacagaaatgccggccaaccgagaagcaatttctgttgggactgctgattgtgccaaaacagtggacacaatgatcccatttgactataatgaaaagagcgaatttgccttcaccatcaatggcataactgatgaaaatgcggtcaacatcagtgtccaactgttgcaggaggctcgagctggtcattcattagtccttgaatttcaaaattcttattttatgaaaaatatataaatttca

SEQ ID NO: 51112 - DNA, 1453 bp, Heterodera glycines
atgacccaaattctgaaactttctgagattccaatgattttccctaaaatttcatttttcagcaccgacaacatttctcatgctgctggtgaacaacaacatgaccaaatagaaagcaaagttcaatttgaagaacagaaacaatcagaaaactatgcaatggcatgctttttcttcacgaggctttaccgaaaattggccggactgttggaaacacccttttatggcaaaacacggtcaaatgtaagtaataataaatgaggagagagagagagagggggaggaagagagaaggaggagggagttagagagagaaatgaaacagagagagagagagagagatatatagagtgggaaaagagtgagagaaagaggggggaggaaaaagggagacaaaaagagtgagaagcagcgagagaaaggaaagaaagagagagggagggagggagagaaagggaaagaaagagagagagagaaaaagggaaagagagagagaaaggggagagagagggagaatgagacagaagaactcaactttttccaattttttgaatgaattaagcgggtcaaggagacgaagtgacaaaaatatcagtgagagactttcagaggggtggcgtcatttcagtacggaagaaattaatttaattaattaataatataatttaaaattgaataataagctaataataataaatatatttgttctctatttcagtttatacggccacaaaaatacacgaccaagtaatttcttgataaatttcatgcatcataactttttctaaaaccatcaaaattatacatttttggtatcttttggtagccctaagtgttctctattttcctgtaaaatttcaaaaaatttcgttgagtttaaaaaaagttgtggtcacaaaggtttaccaaatcaatttatgaaatttacaagccacaacttttttgaaccaacaaccaaatttttaaaattttaaaggcaaatagaagacacttcgggctatcaaatgataccaagtatgcttaatttggatgcttctggaaaaagttatggcgttgatcaaaaattgatcatttttatggtgatcaattattcaaccaagtataactttctatgtgcaaatcgtagaacaaccatcccaaaaccaattcggtagaaaattttgtgctctttccagttggcttgcccattttctttagaaaaaatttcccaaccccctagggatttcgaagtttcccgattttcagtgtattttggggtgcccggtcactacaaaggagtgatctgatcaagttggtataagagacttttttgatcagcaccaaaagttgtgcaagcatgaattatttcaagtttttaaatgaactataagatagtttttcaggtttgagtcaagacttttttggggcactgtatttctctcgtaaaactgtaacttgtttgggaaatattaaa

SEQ ID NO: 51113 - DNA, 204 bp, Heterodera glycines
ccgtccgcttcggattttgggctcgctgcttcatcatcatcgacatcgacaggagaggaggatgatgcgcaactgttcggacggcgagtggtcaaatttctgcgcagtttaaacaacggacgccgcaggcgccgcgcatgcattggcattgagcaagtgatgatcgaatttgaaacggaggaggaagaggagcaaaagcgatga

SEQ ID NO: 51114 - DNA, 383 bp, Heterodera glycines
atgccaaaacaaaacgaaatcgttttaaaatattcctttctggacttgacttggtttcttgatatcgaagctgttttctacgctatttctaaaacggttataccaaaccccagatttttgaatccggttttcagaaaaaatgccttgtggtgaaaacaatatttcacatttcactccataactttgtgagttcggcacggatcgagaccgggataagaccattggaaagagcagctcgagctctacaagaaggtatggaaagaaaaaatagttatttctgggactttttcagaaatcagaattaattctccaatgtggcccaaattttaggcccccagccacagccccttgcttctcccagttttaagtcttggatttgtcaa

SEQ ID NO: 51115 - DNA, 1296 bp, Heterodera glycines
atgatcaaaaactatagaggaggtaaatgtccaaaaaaggcactcgctccgctgcctttcgtccgaccgctcatttgtccgtgtgccattccgtttttgccactctgtccgcccgctcatttgtccgtcccattccgttttcgccgctctgtccgctgcattttgacttgtgctgtgccaatatttaactgttcttccacttccgggcgagcattggacaaccattgccttagaatttttaaaacttatctgtttatttcccaaatttagtcaaaaattcaatttattagtgaagtcttgattaaattccggctaatttcacgattttcagcgattttaaaagtctaaaaaactggaaaacgttgaaaaactgttacgaaatggagaataaaattctttgcgaatatttgtttaattccaacattctttaaatttgaagtgcaagctattttaatgaaatttgctaaaaaaaatcaaaaatttaaattgtttttctttgttttgtttttccatcttttcattccaactttttcttatctgctggcaatttgattagtttttgtgcctcccaattttcctttgactctaaatcgatcgatgttcgttaaattgtttctcatcgaattttgttttgcgaaaattaaagtgtttggatctgagattggtctactctctgtgtttggttgaattgcgtccctgtcttgagtcaaataaaagcacaattacacaaataatgatcgtaattggcataattaaaaagtgacactttatgacattttcatttttccaatgtgttcattccccaaaaattcgggctaatgtaaacaattttttgttttgtttattttcactctcttaaaattgttaatgaccatccggctgtaataattgcttaaattgttgccgtaatggacaacgcttgagtttgtgtttattatggccactcacataaacgtgataattacctaattaagatatcaccaatttgtacattgacgagggcttttgttaatttatttcttaaaaaggaaaatttaatttcaattgaaatttaatttttccatcattttcttttaggaatacgcgacaatcaaaatgcaatggccgagaaaatgtcgggaattgatgcaaaattggaacaaattgaaaatggttaaaataattaatgttcatttttcatttattttaaatttgaaaatgctggaaaatatttttaatttatatttttctttagcattggccgagaaagtatcggaaaaaaattgtgcaaaaaatttttcacgagcaaaattatca

SEQ ID NO: 51116 - DNA, 529 bp, Heterodera glycines
  unsure (1)..(529): unsure at all n locations
atggccactttaaatgtggcccatctcatcactttaattggcgttggggtacaaaattataaattaaaatttattattaattttttctaatatttatttttgttttagtcaattgcttcatccgttgttgctgatgagcaacaaaatcaaaacaaaactcaaaatggaggaggaggcttaaagcatttgttgggatcggatggtaaaaattatattttttatttgaaatttatttaaatntaattaaatanaatattttaagggttaatttttgcttttagttttcactgagcttcgggccaaacaaaatgcgatggccgagaaaatgtcgggaattgagacaaaattggaaaaacaaattcaaaatggtaacaattttattctaattaattcattttcgactttcgttgattaaaatttaaaaaatgaaaatgaaataatttattttataaatttaaattaaaaaacaaatgaaatgaaaatttcttatttgattgttaaataatttattaactattgtaagagataa

SEQ ID NO: 51117 - DNA, 580 bp, Heterodera glycines
atgaaattaatgacagatttaataaatgatggaagaatgaaattgaaagaaaattcaagtgaaatactaatcaaacaagaaaaagaaaatgaagaaaatattgaaggggaaaaaattgaaaaaaaagcaaaacgaaagaaaaatggtaatttaaatgggatattttttaacttaaatctattgcctttttcttttattttcgaaaaatttctttaaaagtgcgcaaaattttaaataaattcaaataaacaagaattaaggaaaacaacattacgacgcattaaaagaagaattcagagaaaattatcaaatatttaagaatgtacacaatatgaaagatattgaaatttccaaattattcggtattaatcgggaaacagttcgaagatggaaacaagcatttttttctggtatgatccagaatccagacaaaaaatcgcatgggcttatgattttcctgtaatttcttttcgtagggaccgaaaaattcccgatcaaagatgaagagcagcgaacaaacgaaaaagcgaagtgtggaccgaaaactggtaagatgtttgtttgatcttttgataataaa

SEQ ID NO: 51118 - DNA, 418 bp, Heterodera glycines
atggcagtgctaatcgattcaatgatggataatttaaaaaataaaggtaaattttacaaaaaatatattaaaaaatgtaaaatcataaattaaaaaacagaaaacgctgatttggtcgccccgttgtttccaatcacttttgtcatcttgggtggggaattgcttgttgaacgtgaaaacttagagatcgactacattttcaactttttgagcggctcagtgacagacgacatctaaaagaaatttgttttgagggcactgatggagaaatgaaaagcatccatagagaagagaaaaatttatcattattattgatgtatgccctagtcaaagaaaaaaattagaaatttatctttgtgattaagtaacgatcattggttctttattttggcgattttccaaatttagcgtaaataaa

SEQ ID NO: 51119 - DNA, 893 bp, Heterodera glycines
ctcgtctgctgaattggcattgaatgacgagaagagttgggcaaattacagacgaagattggcaacctttgatgtgaaatatttggaattactgtttgagaatgttgtaaacattgaccaaatcaaaaggtggccagtcgaattgcgaagccgaaggaaatttcgcctgttgtgtgcgcacgtcatggatggaaaaatgtgggggaggagtttttgcaatgcgacgactgtggcaaagtgttatacatcaaattgcccggcgacgaagtgtccaatcgcgtgctgaaccattgcattcggtcagtggcgactgaattttatggaaactgaaatctcggcagaattgggagttggtttaaatgaaaattcaattcgggatcatcatcaaaaaccacgaacaaatcaaaggagcgcacacatactgttgtcgtacaaatttagacacattcaacgcaaattggtcgaagcgcacaccgtcatttgcccatggcgcattagcccggggctgaacacttccgcaacctatgacatcactgcgcgttatcaccaactggtggacagtggccagcccgaacttccgttggcggacaatgtactcgacgaagcgttggccgacaaatttggcgtgcagagccgatttttcttggctttggccatttttggatggcttccaatatcaaagtaagttgaaagagtttgaactgcttgacaaaacccaaaaatggaattcaacgacatgaaatgattattttggggtttagacaagcgacaaatcacgtggagatgaacaaaccgcagccgaactttcactgtcccctctgtggacgacatctttgcgcatcggtgttttccagtgacaatccgctggacccacgcgaacaacaccagcatta

SEQ ID NO: 51120 - DNA, 432 bp, Heterodera glycines
atggatgccggattcgtgatcagcgaccccgaaaacataagaaaaggtgttctacccgactctttattaattataattttttcgaaaaatttatggggaccaatcatacaagagcccagaattgttgtcttaaaagtgaaaggtaatgtcattatcagggctcccaactcggctctagtggtgcactttatgcgtccaatggattttagtagagtgccacgggaccgggaatttttgccaaaaccgggaccgggacttgccgggacctgagaagccgggaccgggaccgggaccgcaagaaaaaccgggaaccgggaccaaccgggaaattttaaaaattcaaaaaaattttaaaaatttaaaaaaaaattcaaattttaatttatttcaagtgaaaataatacaaaattatttggttttttatttaataaa

SEQ ID NO: 51121 - DNA, 1626 bp, Heterodera glycines
atggtcaccattggcacattggatgtgcagtggattgacattcacttcaccgaccgcagagcgaccgatgaggacagacagcgggtgatccgagtaccggtacctaaggcatcgcatagcagggttgaacagctcagagactttttggcggtaacattgcgaaaccgtagcggagcaaaactgttgccaacacccagtgaggtggaagctaacaggaaccgaacaaagcttcttgattctccaccaccactgaaaagagagaaaagagatgtgtcatcaacgccaatgtttgacgcgagtggaaaacgcctccaggactctcctcctttgtataatataaatgaagacgaacgacttgaggagtcaccgcctccttttgaagaaacaaaaatttcggcggcaccaccaccgcctgtcacaagccccgttaagccaacaacaacggtcaaaacgcccgctgctccagctgcagcaccttccgcaactgcaaaaccagcaacgcagtctacagtaacaaaacaggcaccccaatcgccaaaaccaacagcaaagcctactaccgccacccctgttaagtcaacaaccgcccctccgccaactgtaaagacaacaacagcccctccgccaactgtaaaggcaacaacagcccctccgccaactgtaaagacaacaactgaggtaaagagcccatctgttaagccgacaatttcggctcctccagctcagctaaagtcgcatgcaaagacaactgcgccagccaaggcgccacctccagcttcggtttccgctgaattggctcctcgcgctcctctggcagactctccaccgcgttttgatgaagaagaaaataaaacagacaaattaaccgccgcaaaaccttcaactaagacgacaattacggcgcctccggcgcaactaaaaagctcggcaacgcctcatcaacaaaaacagcaagtgcccgtaaaaccatcagctcccatttcggttcccgcaaaaccgtcaggctctccaccgcgttttgaagaaacgagacaaaaacagcagcagccaccacccccaccaacatcagctgctttaacactagcagatttgccagaaaacaccctcagcgttcaaatagaccctctctcatatgtgcccaattccgtctcaattcaatatcttgagaacatggaacgattcaagctggtgttcaatgaggcgatcgtcagtcatgtgtccttctcaccgcagttgggctatgtgcttggctttgaaaaccctcaacatgtcgtgtcaaatgaactgtcaaaatatcctgtggatttgcgcggaggcatctcaagctttgctgtctactcgaaagggttgaccgaaaacatgatcattggcaattcactgagttcgctgcttcgtgttgtgtctatcagcggtgccatcccttgggagtacaacgagaagatttacgactcgccaatatttgcccgtgtgttaccacgggagatcaatgagattgagattgaactgcgcacaatggacaaaggccgtctcgtgccgttcgcctatgggacaacgatggtcgtactgatatttaagaaagtgataaacttctgatttcatcattcattttgtttttatttgacacta

SEQ ID NO: 51122 - DNA, 1491 bp, Heterodera glycines
atcattttgctgggaagatacaattcaaaggacataataaaagaagctcaggacaaagtgacgaaagtgatcattttgctgggaagatacaattcaaaggatataataaaagaagaccaggacaaagtgacgaaagtgatcattttgctgggaagatacaattcaaaggatataataaaagaagaccaggacaaagtgacgaaagtgatcattttgctgggaagatgcaattcaaaggacataataaaagaagaccaggacaaagtgacgaaagtgatcattttgctgggaagatacaattcaaaggatataataaaagaagaccaggacaaagtgacgaaagtgatcattttgctgggaagatacaattcaaaggatataataaaagaaatccaggacaaagtgacgaacgtgatcattttgctgggaagatacaatttaaaggacataataaaagaaacccaggataaagtgacgaaattgatcattttgctgggaagatacaattcaaaggacataataaaagaagaccaagacaaagtgacgaaagtgatcattttgctgggaagatacaattcaaaggacataataaaagaaacccaggacaaagtgacgaaagtgatcattttgctgggaagatacaattcaaaggacataataaaagaaacccaggacaaagtgacgaaagtgatcattttgctgggaagatacaattcaaccaacgatgtcattttatgtaaaaaattgcactcagaagaaatttaacaattaaaattattatcttaattaactgtgaatgaggcgggtaaaagggaagaaaaaggataatataacataaattattttcataattctcaattttattttcattttagaattgattccagtaattccacatttttagaatactgtattttttcctcacaaatgggactttttagaatggtttaaaaattaaaattcaaatgaaaatttgaaaaattggagctctgagcccaaaatcatcgtaagaaaagtaaatcgaagctacataccaaaagaaatttaaaatttaaaacaaaaatgcgcgcaaattcactaagcgcgttcagcaaaagaattttaattttcaattccagtacaaatttttaaaaaactactcataacttttgtcaaagtcaaccaaattaaacattcttggaaacattcgatagcctatgggttctctattagctcactttaattttaaaaaatttggtcaagtttgagcaaagttatggctaaaagtagtcaaagaaccagtttttcagacatttttggtcataacttttttgaaattgaacgaaattttttgaaattttgcaggctaatcgaggaaacgtagggctagcgaatgatatcaagaaaccaaaaaatcataacaatttataacgtaaatcttttcatttggcataaaataattttgatgatcaaaaattctgaccaaaacattcttagaacgaacaaaataaa

SEQ ID NO: 51123 - DNA, 365 bp, Heterodera glycines
atgtcgcaattgcaattcgtttggcgtggatcaaaggtaaaataaataattaatttttcgaaattcccaatttatccacttttaaagcgcataatcgcagttggaactcagaaggggcttccgcccaatcgtcggacaaagacagcggacgaatcactgcgacatgctttgccattcatatccaagcttgggcttatgtgggggccaattcagcggccaattacaagtggtactccaactttatcaactgtcatccaatcggacaaattgcttttttccccatccaacttttcgtgtgcatttatgtgatatcggacgaggcaatcaaaattaaaatttaatggaattttgaaaaaatattttaa

SEQ ID NO: 51124 - DNA, 1337 bp, Heterodera glycines
atgtctctgttcctcaactgggccaccttcactatttttaccattgctttggctgtgccaatgtttcagtctttttccggtgtccaatcgtacgctaatgatgagtgaatgaatgactattaataacccaattaatattctaattttatttcagaaatgcttcttcccttacgggcgaatcaatgaaaaaacattttacgaaggaatataacgcattggaccaatgcaccaaaacggaagttggccaaaggatcggctccttctcattgagcttccaaataatcggagaatgcgtcaaagggtgcaaaaatacataaattagtgaatttaattaattaaaacaattaattagcatgcttttttgttacccgggctctttggagcaaagcggctcacagtataattatgggatgacggtgggcatgcaatacaacgtgaaaaacagccaaatgtaaaagtttatcagataaaaccattttattgcttaaactttgtcagaattccgtcgcgaaggaatgcgaagaaaagcattttttattgtgctcgagtgaaaaaaagaggaaaggcggctttgcatggaaagcccagtttggcacggcatcagaataagcggcccatttgcggcatcggcgctagttgcagccatacagaagtagaagtcctagtctgttcgccggagatcacttcagaattagaatttcggtcgagcaaagccaatttaacattgacatccatggagcccgagttgccttttttgtgccaaaaatgcccacatctactggcaatgttttaggggtgagaaagagaaggggtgaatttaccgatttgagaggtccatgacaaaaaatttaaattgattttcgactttttattttgcctgattaagattgcgagagacttaaaagagaaaccaacggtcaatgtgaacagagcgaagacaaatcgaacagcaggaggggtccgtatcgttttggcgccgacgttttggcgccatgtagggaggtagaaatgatgaaatcgttgtaattttttgacgaagtctatcaaaattttttcaacaatatttcgatttaaacaaatctaagaaactgcaaaagattcaaattcatttcttattaattttaggtaaagataataatttaaaaattattatcacgaaaaatgcgtttccaccattaaactgggtcatctcttattaatttaaaaaaataaaagaaaaaataattaacaaaattcagattgatggcgatttaaaagcagaagagcgtggaactttcgtgacgatcgaaaatgaggcaaaatcattagagagactattgacatcactcatattttaa

SEQ ID NO: 51125 - DNA, 1707 bp, Heterodera glycines
atgcaatttttcattcgcttttcattagtctttgtttgtttttatggcaaatttgtgccgaacattggccaattgatttgcaaaaatgaagaaaaacaaaatttgatattagtaaaattatacaacgacgaattagccacaaatgacgacactggcgaattatgggaatttatatgcgaattggagcaacaaaatttagcaatggaaaaagcattcgaaacacaaaagcaaaatgggaaaatgtggcgaaaaagttcggaaacatttgatggagaagcggaattttttaggcacaaatttgaaattatcagacggaaagacaatgaattggccgaattattcacaaaattaaggagcacattttattcaacagttttaaagggtattaaacgactgactcccagacatttcatcaaaaataataaaatgaatggaaagaaatggacaattaggcaatggcattacgaaatagtgtccgtcactctgcaaatgtgtggtagcttgatgagctcgattttcgctgttttaatgtccattgtcattgtccatttttgcccaattcatttcactgacaaaacactgttagaaatgtgcaaaatttcaaaatgctccgccataattatctaataaataatgaatagcctaattcttagatgggtccatggcagaatgccttagaaatcaattaacccaatttgttttgatgctgacacaacgcttcaaaatctcaaaggaagaaataatgccaaaaaaagaggaaccgacaattgcgttgaaactgataaaggaatttgccgaattgtggagagagattaaagtaaaacaaaaatcaaaaagcgattacaaaggcactgaaaatggaaaaaataatgggcaaaatgagcgagaaaagtgttgggattcggatgaaaagcaacgaaaaatgttaaggcttgtttttacggctgttaacggagatggcaacataatggcattgaacggtgccacaaaaggtacatatttcccaaacacgaattaatatttcaaatttaaaatgatcagttaatggcggaggccgccgttcgcaaaagcgccgccgcaaaaagcgcgacttggtcctcctaattctgctaattgccttgctaatttcgctcttctttaccgtatattcgtattgtttacacagttccaacgacgattcgcttgagcaacagaacgcggacatggaaatgcttctcgttgttcgccaagcaaacgaaatttttgtcaaatttcgttacggcgacgatgaaacggataagaaaggcaacccgaaaagtgaccatatttacattgtagtggacggtaaaggtgaataacctgccaaattaattattaataagattatgtattgcccttttcccgaccctcaaaaaatgatgggattcggagtttttgagaaggcattatacagttaaatcttacttaaaattaagacatttttttgtgcaatttgattttcggcttttattctgagtttttggctaacggaccatctcgtataaaaacggttgttaatgtaaaacaaatgtcagaatcatttttacgcaaatttttattttataaatatattaaaatgaatattgataaggttaagattggggggtttcaaatttctgaagtgtatgtatgtacctgccgaaaatttggatttttgactgcatttcttcccttcaatttggcccagaa

SEQ ID NO: 51126 - DNA, 510 bp, Heterodera glycines
atgtttcaattcgatccgccactaattgtcccaccggaaaccgtcgaaagtgttgatgccatttttgaggcaatgctcactgggcattggcctcccgacagtcacacttatgccctccactcgtgcattgactttgcctaccaatttgtgtgccggttgaacaacggaatgtgcggcacatttgattatttttattcgtaaacttaaatgttaaattgttagatgtccggagaaggaccgttggccgcggccgttcgtcgaatttgaccagcgatgggtgcacagaatggcccatttgggccgtttgtccgtgtttgactttcgctatcgcatttccccacaaaattatgaactttcgcgcgacattttgcttcccattggcaacataattagcagcaaaaaacaatcgtagcaaagagaaaaggataaaacgaaaccaaagggaagaagagaaaatattttgatagaaatggcagaaaaaaaacattttatatttaattaattgaggaa

SEQ ID NO: 51127 - DNA, 468 bp, Heterodera glycines
atgaaatccttctttaatttcccatttgtcttttgtattcttttgctcattggctgcgttgacaaatgcgtcggaggagtcgcggcattgccgccaaaatatttgggcattaaaaaccatgacaaatgcttaaccgagtaaattaactctattttaaatgtttagaataaagttgctttttgaacaaatttttaaatttaagcgagccaataggctcttcgcgtcggctttgtttgccagcgcagaaaaaaatcgaatgccaagatgaaacgttgaaagcgcttaatgtacatttaatatttaataaaaattaatattatttaataaataaaatttaggatttggaagaaggccaacatccgccgacttgcgcatgaatccgaagacagaagcgaaagaagcaaatgaagggattgaagaatgacagggaaaagcctggctgaacaaaattttgtctacaaaaatgaa

SEQ ID NO: 51128 - DNA, 584 bp, Heterodera glycines
atggaaattgtttttttcttcatttcactggccaccattctgctaataggtgaattgcggatgctaaccaagctcaatttttgagtttacattcaatcgcttcgatttgcttaaatttcttctaaaacccattaaatcagtttaaaattttaaaattaaattataattttaataggcaaaacagctcgacttcccagcaataaaaagggaaatgatgcaaataaaagtgattttgcgagcacttctaactccgcagatcaaacacaaaataaacacagtaagacaaaagacaaaacaaattgaaaaatattaattgaatttagttaaaacgacggatgacgcatggaactttttgaaaattgtgaaggtgaaaagggttttgtgtaaaaactcataatttttaattttgtttaagcaaagatttacgaataatccgtcggtgttcagtgaatttttgagtgtcatgcgatccttcaaagacgaagtaaatccaaaagaattaatttttgccttgaactaaaattgcaatcacagaaagtggacagtgtcgaattacatcaacgagttgcgcaactcttcactaa

SEQ ID NO: 51129 - DNA, 1488 bp, Heterodera glycines
atgcaagaagccgaacagaaagcggacggtccagcgcaatttccggccgctgctccgaagccggtaacatttgacaataatggaatatggtctttacaataaaattcaaaaaaaaaaattttattttaaaaaattattttaattttgacaaatcacattagcatggaggcgtcaccacggaaaaggaagccgcagacttcgacgacacaaagagcgccggacaaatctcagaccggtaattaattaattaggggtcatatccaagggcgtatctagggggggggaaggcggagtttaaacggagatggagcagataagcccattcctggaaggcgttcgcatcattcgattacccgctgtcattcattaatttttttctctctcaattaatgcataatgggattaccaaataattttttttagcaaaataaaacaaaatcttattacgaactgaacgacttcgaatgtcttcatcagggggctcgtcaaatgagttcccctttggtacatcccaagccttcgggcaggaaacaaaaatgtttgagtggaaaggatgatgagtcctcgatttcggctattgataggaaactttggcaaggaaagaccacgataaaaatctctgatttagaaaaagctcaaaatgatatggggaaattagaagatggagtgaacagagcttttcgctacatgaatcgttccttgaaccaaaaagtcaattgggtgaaagatgtcgtgtccaatacaaatgccaattttgagacactgaaagtccaatacgagaccttaaccgaaagagtcgagatgttggaacaagacagtgatgggacgaattcaggtgggactgttagtatttctaatctgaatagagcgtcgcgtgtgccgtttgtgacgccaatgggcaatgcacagcccaaccaagttgtaccgaacccagtgccaattcatcaattatcaagcgaagacgaagatgacgggccgactctttttggcctgaacatgctctcgaacggacccacagtggggtcaggtttggaaatgttttgtgaggagtctgtttttgcatttgacgattgggctgaacgtttcaaggattacctgtccgtgtcaggcaaggcttacacagaacaagaaaaagtcacaagactcaaattagctctgagggacactcctcgggcactgtttaaggagttattgccagcacaaatggacactcttgactcagcattgagtgaacttcgacagaaattggactcccctcagcgtcgggaaattgcgaaacgaactttatcgctgtgcaaacaaagggaggatgagacagtggcgcaatttctcagacgcctgacgcctttggtggatgcgacaaattcgacattgaccggtgaaattcgaaaagagaaaatttgcgaagaatttttggatagattgaagccaaacattagctttcttatccgtctggtgggtctgtcacgagcaaaagacttggacttg

SEQ ID NO: 51130 - DNA, 130 bp, Heterodera glycines
atgccttccgctcgaacttttgttcgaaatcgtgccttttatccctgccgaaaaagccgtcccgaatgcgctctcttcctgttggctgctgcacaaacttttgctgccacgtgtcatcaaatggcaagag

SEQ ID NO: 51131 - DNA, 1599 bp, Heterodera glycines
  unsure (1)..(1599): unsure at all n locations
atgcgcggtgccgttgctctacccacccaacagccattgacattgactgtaagtgtgctggggttagggggaatttttaattttatgctttttcatgtttttttaaaacacaggtctcgaattcagtggacaacggcggcattggacagcacccgaatggtggtggcggcattgtgcagcatccgaatggtgccgtcggcattgtgcagcatccgaatggtgctgtttctggcgcaagtgtgccaatgtggagtttgaatagtgtaagtttttcgtggagtgacccagggggtagagcgtctaatcaaattcgggtggttgaggtggcattttttttacacttttgtgtcaatgtggagggggaggggcaaaaaaaaatttttgaaattaaaaatttttcttttaaaggcgcttccgcccagtgtgcgtgaagcggttgcacttgtgcatgcccggcagctgcagaagatggtcaacaaacacattcagcccgaatttgcgtctgttgtgccggcaattggtgagaatggtttctcaaacctgtggtggatttacttggagtggcaaccagatatggtgatgaagtaagtgtttttttaatttcatttttcagcattccattttcccgcttttcagccgcgtcgtgggccttgtcgtcttggccggcccgttcacaacccaaaccgacatcagcggctacgacgtgcgcatcatcttcgaccacaacgatttggagcacgaaatggcgatgcacggctggcaggagtgtgtgccgcgcatgagcaacatttgtgccggacaaatagtggaattcacacggctcaaagtgcgcgcccaaggtcacaatgcgaagggcagctttcccttcaccctgctctacaatgcggagtcgcggcaccgcattgttggacagagctcttcggcggtggccacttcaggtggaaaaagcattttaattttaaaaataataatttctccccatttttttttgaaaaaaacatttttgattttaaaaaatattaatttttccccatttttaagtgttcaatccgccgtcaacaaacacgccaataattgttgaagcaaatgacagcaacaatgccatttccattccaagcggaggcagcgggccgataagtcagcagggcggaaacggcgtgtttggcggtggcggcagcagtgtgatggcggcacctcgtcaaagtgatcagcagcaacgagccggcgtgcgtgcaaatggtacgtggaaagcggtccccaccccgcaaaaaaaaagatcatatgatcactccccaccccccgcttttagcaggaagcgaacagcatcgcctggtcatgcaaagcgacgacgatgatgacggcgaggagcagcaggatgaacaaagccgcgggagtggcggcgacggacgggcagcgaattttgcattgccctctgcgggcactgatgcgccgcgaaccgagaccggcgcttcgtcaacggtgagccggaagtgaagaaaaagaaagaaaagaaagacaaaaacaaaaagaaaaagtanagaaagaaaaaacgcgctcgcataccatcattatacgcacacatacacacacacaaataaa

SEQ ID NO: 51132 - DNA, 765 bp, Heterodera glycines
atgcatagttttcttcggtcacgcttctcaatgctgtccgacatacactgctttttgtgctcgacaatcggtacgctattattcataggacaattttttcacattgcttcttttctgcttgggtccgcatttgttgcagaaattattttggatactctcgatacataatgtgtaacttccagaaggggaagctccgacggattaccgattctgaggacagagagggggaaaaatgcaaatggttgtccgagtcactggccaaagtcactgcgcaatggctgagtgccatgctaccggcactttttggggacaaagtgatggacacgaaggctctccatttgctcatccgtcagaatgcgcacaacgtgggacgtttgttcggtgcatctgcgagacggcagagcgggcgcgatttggttcgttaaacggagagctaaaaattagatcattttacaccccatgcccctccaatcttcagcggcgttaccgaaacgactggttcggtcaaagatgcctaatctgtctgcaacctatgtttggcgatgtgcgtgtgctaggatgcggccatgcatttcacaatgcatgtattgaagaatggctagagggaggtaatcatggttgtgttgtgtgcagggctctcattgtataatgtcgttctttcaattaaaaaaaatattttgacgatttgtgctattttacatgaaccgataaaaattttgctcttcaattggcttttataacttttatgccattgttttcaataaa

SEQ ID NO: 51133 - DNA, 562 bp, Heterodera glycines
atgctttttctcctttttatatttgtgttcttaatcataaacaattcaactgacaaaacattgtcagttaatctgtgtaaaaaatgtcgaccaacttttgctgaaatatttggcgaagaatggcaaaatgaaataataattggaggagatgaaaatgaaaatgagactgatcaaaatacaaattttcatcaaaatgatcaaaatgaattaactgatcagacagatcaattggatgttcaacaaaaaatcgaaattattcacaaatttcacgcaattagagaaggaattaagaaaaagggaaaatattcggcaaaaatttggaataaaattgagcaaaaaattgcgaaaaaattgggaattaatcgaccaaaaatttacgaatggaaaaaagaatttggaatttattattataaaaagaaaaagagggaatttattgaccaaattgatgaaattaaaagaatgccaaaaaatggaagacagaagcaatttgcgaaagagttgggcattagcaaagaaacattaagaaaatggaaaaaggaatttggcattgaaatgagcaaaa

SEQ ID NO: 51134 - DNA, 340 bp, Heterodera glycines
atgggggaactttcatttcttaatgaagaaaataaagaaacttggaaaaagtttgtgaaactctcaagcaaggaattgatggaatttgagcaatcaatcaaaggtcattaattaattaattattagggctatgaatatgggtattgaaaattgtttaataatttaagcaacaattgttctattcttacaacatacaaagaccatcaaaaacagaaggcaaaagcgcatggacaataatcacccaccaaacactcccttggccaatgacgcaagaattcccattggcaatgcaaaaggcattcagtcggccaatgacgcaagaattcctatgggactctag

SEQ ID NO: 51135 - DNA, 515 bp, Heterodera glycines
atgggcgttagtcaacaaactattaaatggaataggtattttgacaaaaaattattcataacttttgccaaaatgaaccaaattttaaaagtttggtactttcgatagccctaagggttttctactacacaatttcaagcaaaaaaaaaattgttaaaatttcaaaaaagtcatgacctgagaaattcaaaaaaaatcaggtttttctaaatatttttgatcatagcttcattgaaacttaacgaaactttttaaattttgcaggataatagaaaagatttagatctatcgaatgatagcagtaaaatttggttgtttttgagtaaaattatagcaaaacgaaatttccatatgagatttcgtaccaatttccgtgctgacaatgagtcgaaccaaaaaaatatcaatgcgactaacctaaaagaagtatcaatgatagtaatatgtatttaaatttaattattatcgtaaaatttaaactcaataattttttcccaaacttttttgaaacttaa

SEQ ID NO: 51136 - DNA, 133 bp, Heterodera glycines
aaattagtcaaaatacatgccagattcgtgattagcgacctttaaaaacccggataacaaattatcatggttttttatcttaaaaaaattttgcaaaacaaaagggtccccccttttgaaaaaattttcaaaa

SEQ ID NO: 51137 - DNA, 1785 bp, Heterodera glycines
gaaggccttctttcgtcgaaattctcgccaacttcgtagactttcccggctttacgattgggaggtaagtaaaaaaaaaatgtttagaaggcggaaaatagccttactatttattcaaaataatcaaaatttgtagctaaaatccttactaattcgtttcataatccgctaaaagtgaagcgattttttttcttatgaattgggtgtgcgttgtatgcaccagggttggaattccgaatcccaaaattttttcggaaatctaattttagacgaaacgcttgccaatgccagagatgttgctgagttccgagtttcgacttttgaatattttttagggcttcgctcggattccgaacttacaacattttgggatctcagtatactgaactcggaattcagaattccaaaattttagggtctcagaattccattcatagccaatgggactcaaatttccgtatttttcacttgaaaaggttgacgaacgcggcgccttccgccccatcataccgccctcacaacaaaagcgtttttcacgtgacgtcaccgcatcggacagtccgacaacagcagtaacagcagagggacaacaacgatattgtgccaacgattcatatattttggaccggttaaaataaatttaaaaacattaataaatattttgcaaaaatttaaaattttatcattaaagaatcccaattaattttagcattctcgacgggtataacagacacaaaataccgggaggccgtgttaaagttatggtagaggtactgtattcgagaatttgttacagcatttcgctattattcacattaaaacattttcttgtaggtttgggtgcaagaaattacgacaatttcggacattacttcagatttccaggcaattttatttattttttctggctttaacttaggatttttttttactaattttagttggacatttacatcagcgaaatgtggaatgtaaaaaatattcaaaataaattaataaaaataaataaatatttttaaggaccaggctttggactattcatatttagagccatgcaaatacaagtaaatatattgtgaaattgaaaataaaattacattttttagcctctcattgaacagcattttattggagaaattatggactccaaattcagtaaaattgtcaaaaaattttatattaaattaaataaaataaaatatttattccagtgtttcatcaattcaaagacggctgacattcatcgctctccatttccaaacatttttctgctcatttatgccaatggatcaggtaaatcaaaatttattacggtttttcggttactgtatatcacttttttttagtatggactaactacagactaaagcttcagggaccctgtgaaatggacttgacacggtctaaatgaattttaaaatcggataaaaattcatatttcaaatttacggaaccatgactagggcgtggatttttgtgacaaaaaacccaaaatagttaactgaaaaagtggcaaaaaaatgccgttataacggcaaaaataatggcgaaaattttgcttgataatattcttttaaaaaggcctagaaattttcttaaaaaggctcaaaatgaatttatattttctaataaattttttttggagttttaatctaaaaggttctaggtttttatttttaggttttaaaaaataatattttcatatttttcagttttccatttgacaatgtcacttgttccctaacttttgagtctttcaagtgggttcaattttaaaacaataaa

SEQ ID NO: 51138 - DNA, 1375 bp, Heterodera glycines
atgctgaaggacaaaattgtggacaaagactcgcaataccttgtcaaaatgcagttaaattctgaagtatttccatttcttaaaaaaaaaattcgggtggcctagtggattacaccccagtcatgacacctttctgctcttccctccatctctcttacccttttcctcattccatgagccattgtgtcgctccttggcacattgagttcgaaatatgaggacaaattaatgtctttcgggggctctggacgttaccacttggtgcaatattgcagttgagtttatcagtccatggacatatgtgtcattacaaaattgtttttaaaggacgacgaaagaccaaccaaaaaatagccaatttaaaatatacccaaatacaaaattttatactttttaggaacgctggaccaaagcgatgaaatgtgtgttgttgaacatgaaacgtgtcattggcattctgaccacattgccgccgacgctgatggttaacccaacaactgctgctgctgcagcaaccgctggaagcaggacagcgaacacaaccgccataattggcaccgccattcccactcactcgccatcaacatcctcttcttcccgttcatcctgcactggcactgctccagttgtccattcatcgcaaactgttccagcagcaaaagatggttggtgagggcaaaaaaaaatttttttttaattttccatttactttactaataccagctccaagcagttctactggacaaagaaagcagaagtgagcaggcgactacaaccagaaaatgtttgacgagcgccatgacaaattttttttaaactaatttatttgtgtaataaagaattttttaatatactatatatatacacacatttattttttcattcgttttatgtcctatcaatattttttgagacaaactaaaaaaataatatcattttttgcgcacagttcagtgatttttctgatgaacgacgccaagaacaaagaagctgcttgtagcaaccagcggaagcgccgggaaaaatgtgacactggcaatgagtcgaagagagcaacgacgacatcatcttcaagcattacttgtacctgttctcagcgacagcgcactgaatgggcatggtgaaattttattttttggtaaataactgttcgaacttgggggatgaaataatttcaattttaatatcccatagagtataaaatttcatttttgttacagttcattttgttctgccactcaacggcatcctccttctacaggaggacgtcggcctctgttgcttccaccagtccaatggccaatggcaactgcggcaacaaaacggaaatatttacgtcgaccattcacactcaaaaccgccgttgttgatccaa

SEQ ID NO: 51139 - DNA, 286 bp, Heterodera glycines
atgtccaacaaattgaatctgccgttagcattttgcacattatttgtccatattttgctggatgtgccgtcgtcaagcgatgggatgattgccaacaccgttagaaaccctgcgtttagcaaattcgtcactcagataacccataaatcgactcaaacggctcaactggcacaaagagtggtagcccagaaagcaaccggcggaacaatccgaagaaacgtagccaatacccaaacgaaaaatgttggcaaaatgccaaaaacggcgacgcaagaaacgacaaacg

SEQ ID NO: 51140 - DNA, 137 bp, Heterodera glycines
atggaggagttcaaggaaggactgatcaacgccgcactggacattctgccggattttgcgtttgccgtgcccgtttctctgttcgttgccaatccgccggctgcaattctatgggccggatggttggcggttggaga

SEQ ID NO: 51141 - DNA, 1103 bp, Heterodera glycines
  unsure (1)..(1103): unsure at all n locations
cattgactgcaaaggtggaagatcaggaagatgatgtaaacgctacgacggcttcaaacagtacagaagaaacagcagtgactgcaaaggtggaagagcagaaagatgatgcaaatgcaacgaaggctacagcattgactgcaaaggtggaagaacaggaagatgatgtaaacgcaacgacggcttcaaacagtacagaagaaacagcagtgactgcaaagatggaagagcagaaagatgatgcaaatgcaacgacggcttcaagcagtacagaagaaacagcagttactgcaaaggtggaagaacaggaagatgatgcaaacgcaacgacggcatcaagcagtacagaagaaacggcagttactgcaaaggtggaagaacaggaagatgatgcaaacgcaacgacggcttcaagcagtacagaagaaacagcagtgactgcaaaggtggaagagcagaaagatgatgcaaatgcaacgacggcttcaagcagtacagaagaaacagcagttactgcaaaggtggaagaacaggaagatgatgtaaacgcaacgacggcttcaagcagtacagaagaaacagcagttactgcaaaggtggaagaacaggaagatgatgcaaacgcaacgacggcttcaagcagtacagaagaaacagcagtgactgcaaaggtggaagagcagaaagatgatgcaaatgcaacgaaggctacagcattgactgcaaaggtggaagaacaggaagatgatgtaaacgcaacgacggcttcaaacagtacagaagaaacagcagtgactgcaaagatggaagaacaggaagatgatgtaaacgcaacgacggcttcaagcagtacagaagaaacagcagtgactgcaaaggtggaagaacaggaagatgatgcaaacgcaacgacggcatcaagcagtacagaagaaacagcagttactgtaaaggtggaacagcaggaggacgatgtaaatgcaacgacggcttcaagcagtacagaagaaacagcagtgactgcaaaggtggaactgcaggaagatgatgcaaacgcaacgacggcatcaagcagtacagaagaaacagcangtactgtaaag

SEQ ID NO: 51142 - DNA, 1002 bp, Heterodera glycines
cagaagaaacagcaggtgactgcaaaggtggaactgcaggaagatgatgcaaacgcaacgacggcatcaagcagtacagaagaaacagcagttactgtaaaggtggaacagcaggaggacgatgcaaacgcaacggcggcatcaagcagtacagaagaaacagcagttactgtaaaggtggaactgcaggaagatgatgcgaacgcaacgacggcttcaagcagtacagaagaaacagcagtgactgcaaagattgaacatcaggaggacgatgcaaacgcaacggcggcatcaagcagtacagaagaaacagcagttactgtaaaggtggaactgcaggaagatgatgcaaacgcaacgacggcatcaagcagtacagaagaaacagcagttactgcaaaggtggaacagcatgaggacgatgcaaacgcaacgagggcttcaaacagtacagaagaaacagcagtgactgcaaaggtggaactgcaggaagatgatgcaaacgcaacgacggcatcaagcagtacagaagaaacagctgttactgcaaagatggaagaacaggaagatgatgtaaacgcaacgacggcttcaagcagtacagaagaaacagcagttactgcaaaggtggaagaacaggaagatgatgcaaacgcaacgacggcttcaagcagtacagaagaaacagcagtgactgtaaagttggaacagcaggaagatgatgcaaacgcaactacggcttcaagcagtacagaagaaacagcagtgacagcaaagatggaagaacaggaagatgatgcaaatgcaacgacggcttcaagcagtacagaagaaacagcagttactgtaaaggtggaacagcaggaggacgatgtaaatgcaacgacggcttcaagcagtacagaagaaacagcagtgactgcaaagattgaacatcaggaggacgatgcaaacgcaacggcggcatcaagcagtacagaagaaacagcagttactgtaaag

SEQ ID NO: 51143 - DNA, 598 bp, Heterodera glycines
atggaaattaggcggattatgcgttcgatttttgggctcgagacttacgatagcacaaaaagatttattgaccaatcgatattaggatggtaagtaataatattacataaaaaataagtaggaaaaacggtgaaaaaaaatcagaataaaacaaaaaaatcggtattttaattaattaaattacagtgttatatattaattatgcaaaaaaacaagtaaaaagggtaaaaatcggattaaaaaaatattataatattgaaattataaacattaaaacaaactaaactcatagtatacataaaaaaaacatcaaacacgccacaaaaacaacaattatattacaaatatacatgtatatataaaatccaaaaattgctatatatatacataatcttatacatataaaatggaaaaatattatattatttaattaattaaagaatatgtttgttttttatattttttcctatataaaattgcttgaaaaaattgcaaaaattcaatggttttatgcacccaccgtttgtcatcaagctagccttttgtaaattttcgcgcatcttcatatggtcatggttgagctcgttgaactagaaaa

SEQ ID NO: 51144 - DNA, 75 bp, Heterodera glycines
atggaattattagagcccagaaaagggccgggcttgtcagagttttcccgacattatgatcctgaatgcttcaac

SEQ ID NO: 51145 - DNA, 1157 bp, Heterodera glycines
aaatgtccggtcaaaggattcaacggcgaatgttttgagcgaaacggtggcaatgacactgaatatgaaaattggtagaaaaaggattaaaattaaaaaataatcataaaataccagggcattttcttaaatggcctcagtaatcggtcggtcggtccttcccgaaaatgcttttcgtcgtccatttgcgtccgcaggtgttatcagtacgcgtccacgtcgatgaactacgatcagatgaagccgagcctgattctggtggccagctcaacggccgatgtgatcgcagccgtccgctttgcccgttccaaacgcgtcaacgtcgcggtgcgctcgggcggccatcagttcagcggagcatcgtccgcgagcgggaaaaacatacaattggacgtcagccaagcgttcagagtgagtgcaaggaaaacgcagcgcatttaaacattgagctgatcagagcgccaaaggatcaaatgaaaaaaacgacacgacagcgatgctcctccggtggcaaaacataaaatggcacaaatccccttaaaaatggcacagaaccttctctaaaatgtggcaatgatatccctctaaaattatagtaaaatcgtaacttttcgtactgtaggaaattgattgagtctatttgggtgaccaaaacaaattgatagaaacttaactgctcaacagcatttgtgctcgcatcgactgatgtgaaacagagtgtaattagctgctaattactcagaatgtttctgccggcgattttgcggtgttagaaccgaactgtagcaatagtagcgtcgctgtccgtgttggcatcagtttcacactgctcgagttctttttgatgatggcggaaaagggactgttcgtacccggcggtttgtgcaggtaggaaaattggtaagcttcttctgccaacagaacaaagttaatcaatcggttaattatattttgcatgcaatgccaattttttgactaattagcagaattgactatttaagccaaacaatcaactctagtatatcccatttaatgcttatcccttacagtaatgtccatatcggcggacacatccaaaccggagggtacggcgtggcaatccgcgcgttcggactggaagcggaccatgtgcttgcatttgacatcattacggcaga

SEQ ID NO: 51146 - DNA, 587 bp, Heterodera glycines
atgcgtctttgggtcgcttcactttgcttttacgtttccattttcatattttgtgaaattttgcgcggatttgcatacagattcgagctgcacatacaaattggtggtgaacatcatcaactgattacatctttgatttatgaggtgggtaagttgaaattaaaactttttttttaaagcctttgttaaattgagaattggaaaagctcaatttttaaccgcttcaaacacttctgatcaacttctttcattctctagatcgatttgtctcattgagagatttgtcctgatcgggcctcaaagaaaaaatctcccttactttacaatagccgccgggatttcgcgcgattccctacccggaccgacattttaccaatttacgttttttctgactgcgctttaacttttaacacgttaaaatattggcattttattgagaaagtcaaatatgtaaaattattgcgtttgataggaaagtgagaagacacattaacagaggataatgataaataattatttttgattaataatattgaaaatttttaaatatttaagtgttatcaccatgtatggccccataaaatgga

SEQ ID NO: 51147 - DNA, 2154 bp, Heterodera glycines
atgtctgcgaaaatttataaaaccgacggattttcggggtgagaaaattttcaaaaaaaattgaaaaattttattttatgtatgtttttttttttagtttttacaacggactttccgcgtcaattatgcgacagctcacttacaccacaacacgatttgcggtgtacgaaactgtaattttttcatcaaaatttaaaaagttattaaaataatttttttttctcatttttaggtgaaaaagcaatcgtcaggcgacttgaattttggccaaaaaatgttgctggccggggttgcaggtgtttttttaagaattaaaataaattttgcactattagtgggcaaataaccttcattttcccctccccgaaaaaataaattacaaattttttaaaaattttgatgaaatatttttaaaaaattcaggcgcttgcggcggtgtggccggttccccagccgatttggtcaatgttcggatgcaaaatgacatcaaattgccaccggctgagcggcgcaactacaaaaatgcaattgatggattgtttcggatggccagggtccgaaatttaattgattaaaataattaattaatgaattaatttttttgatttaattttcaggaggaaggcgtctcaaaatggttcaatgggtgcaccatggcaacaggcagagcagtgctgatgaccattggacaactgtccttttatgatcaaatcaaacaggtggggaaaaaaattggaaataaaaattaaatatttttcctaaaaattgcaaaaaaatttttttttgtattttaccatgtataaaatgcaaaattaaaaaaaaataaagattaatttttattttttgtcatggcatggttgttaacatattttctgtagggaattttccgaaaatctcaaaatttcggacagggaataatcactattttcttcgctatatttttcaaaattaaattataaatgtttttcgtacatttaaattattttcacttacgcgtacagatgctaattgccgcaaatttggctcaagacaacatttacacacatttgttttcatcatttttggctgcttcaggcgcaaccgttttaacgcaaccaatggatgtgcgtttttcaatttttcaacccaatttgcaaatttgtgccgtagggggcaattagtccccatttataataattgaatcattaagaccattattaaaatgggctctcgcaatatgctaaaagcctcaaaatttgcatataattgacatagctatactatgcatgctttgccgtattcagcaaaaagtttttgagtcaaaattttattcgtaaattggtttttttgtttttgttttttgatcaaattgcctcattatgtcagacacaaaactttggcattgttttgtcccattcatcgaatttaatgggcaattattccgtgtgaaaacatattttttattattagaatcaagacccggattgttacaggtgctaaaaacgcgaatgatgaatgcaccgccgggacagttcaagggcctatgggactgttgtgtgtacacggccaagttgggcccgaccggctttttcaagggctttttccctgcatgggtgcgattggctccgcacaccattctggtgaggctagatttgttgtaaactgttaaattttacgaattttgggaatttcccaaattttaaatggtgatattcaatgaaaattaattttttttttttttgtttccccagaaaaatggttgcgttgcatttacaatgcacaaaatatgattatttttagcgaaaaaactgctaaatacaatttttcgaccaacagtgcctatatattgaaaactttaaaattgatatcgaaataccgttttcgaagccgaagagaaaaaaaagaccgaattcctcggaattaaaatatttcattattttaatgcggttggatgcttattggagtttcattggcatatggacgattttttatttaatcataagcaaatttttatttaaaaaaaaattaattattttttaaaattcttttcagctttttgtcttctttgaacagctacgaatgcgttgtggttatttgccagagaaaaaagtgatgcaaaaagaggcggacgatccgaagaacataacaacagaaaatttcagcaaagaaaaatga

SEQ ID NO: 51148 - DNA, 368 bp, Heterodera glycines
atggattttttaaaagcggatgaacgtcgtgtttcgcgctggtattttgggggcatcgccggctcaatggctgcttgtaaaaaaaaaaattaaaaattttaaaaaatcccaaaaatttccattttaaaggttttactcaccctcttgacctactcaaagtgcatcttcagacacaacaacagggcaaattgtctttgcccggaatgtctgcgaaaatttataaaaccgacggattttcggggtgagaaaattttcaaaaaaaaatttgaaaaattttattttatgtctgtttttttttttagtttttacaacggactttccgcgtcaattatgcgacagctcacttacaccacaacacgatttgcggt

SEQ ID NO: 51149 - DNA, 333 bp, Heterodera glycines
atggttgacgtgcgcaagaagctagagttggaggtcaaaattgaccctgccatttttgtcgtttgctccggcggtgcctttgacccaacaaaaacgacattaatccccgaacttgggcaattgaaactgaacactttggacgagccgtccacaaaagcatacgaacatgtcagggaattgtttggggcatcattcaatttaagaaaatgataatatttgcagataaccgatcagagattgcgttcattggtggccaaggcatacgacaatttccaactttgcctctccaatctccgacttgtcttttcgactcgacgacgtccaaattccgac

SEQ ID NO: 51150 - DNA, 127 bp, Heterodera glycines
atgaattctctcgttgaaattttatgcgattttaacgatagtgaacctcacgaattatcagaaattctacgacatcggaagaaagaaaaagtgaaacttttaagaagacacaccctaataacgcccg

SEQ ID NO: 51151 - DNA, 2769 bp, Heterodera glycines
atgcgctttgcgtttgccgtttctcgcccgggggttctgatcatcgtcacccttttggcattgtgttgtgccatcagtgaaggcggaaagccgcgctctaaatcaacccataaacccgatgtttcatcatcgtccaacaatataccgagtccgcaattcaaatggaataacaatgcgcctgttcttgctccgtggcgttccgctgcaaatcaacgcgtcagcgatcttcgtaccgttgagctgccattctatcaacatataaaagtgagtgcaattgaggagccctggggtaaccgaggattggcatataaaaaaggatttaaattaatttgtcatcgaatctctggccttaggatgaattctggcatttgttttcaaataaaattggatttaatttatttttaatgacgtatgtatatattttcgaggcgaaagctcatgattgtgattcctaggggataggtcttgtagacgtttcttaaatccgcaaagggatagtaaaacaaaaaatgtaaaacattattataaattttcatcgttggcatatttcatccattatgaccttttggattaagtcatccggctatcaatgaattaatttacaattttaaggttattgtgccaatgacgaaattgcccccgtatccagtgcccacttggacaggctttggacatttttcacatatatttgttgtgcccagagaagacttgataaatactgggcgagtttttcagatttttaaatattgcaatatcaaatgactaatttatttttatattttaaatggatgaacttatttcgccccatatattttcggtatttcaaaatgttcaattaacaaatattttttggaaaagaatggcgtgactttgtgtattcattcaattatggggaaaataatattttttttttaatttcagaaattgaattattttctctttaaattcggtttcccctcagttatgaagtccaactgcgcatgtttatgttggataccactgaggagcaacaggacgcttttccgccgcactcaattatgaatattgacgggtatcaagttaggctgccggtcagtgtccgcgtccgggtcattttgtataaattcacaacatgggcgtttcgtaaaataaataaaatcttaataaattttcttaaacacaaaattaaataatcttatatcatcgattgttcttagtttgctttaagaacctaaaaatttttagaaatttattcagttttcatgaagttgtgaccacgaatgctcaaaaaatgcaagaaatttagaaaaaaatgtaattttctgagatttttcatgctaataaagcaaaaaaattggcagttttacgaaactttgtaaaaaaaagctaatattttcttcaaatttaaaataatattaatatttttctagtttttaaaaaattagtcaaagttttttgaaacggtttaaaaacaaaaaaacttatttgacaccatattattgttttgaaaatgataaatatttaactgtatcaaacattcttcggcacatttttgcacaaatatgttttcataaaatttataatatacaattttataggtgctggttttagcctagtggataagaattaacaaaaatgttaaattgttgccaaaaatttgggcggaggggctattagtgccatcgaaaggcgcggcaagagaaatatgatacgttaataaaaacaattaagaaaagtgctccagatttttaaaaatcacatgtttttcgcgcttaaaaaataattacccaattaagaaatagtcaaattaactaattcagcaaatcaattcaaaaccggaaaagaagcaatgctcatttccggtggacatcacacgttacgtgcaccctcgggatagcgaaaacaatgagcaccgtttggaaattgaatgggacagcgacaaacgcgcatgggcatttacggtagtttaattgatgggaagaaagaagtgctgtatgagaccgaaaattttccgagaatcgagaccgtaaagccgcgacttgagaccgagaccaaaaaacccgagacttttctcgagtcaaggctcgagaccgataatgtgccatcatatcccaggccaccaaagatttgttccgtcaaaaaccttaaaatattagattttgagttttcctaggcggcgcctgtcggcaaaatcaagcatttatatgttttctttgatttttagtaaagagaattatattaccataattccgtgctaaatgacaaaaaatcaaaaatttcgatttgaaaaaattttgtttaaagttttacttaagatgttgagaaactgactaaatgtaaaaagtaaattgaaactataataaaacattgtttaaaatttaccaaaaatttaaaaaaattgtgtccatatttaaaaattgatagcctctcaaaattctctttttaacatttaaaatttggtaaacaaaaatatgctcaaataattctgcacttataatcttttgaactatttggttaaaaattaaaaaaagtgtttttctgaaaatttattaagtaattgagaacaattaacgggatggatgataattattcattttataaatacagattaatttggtgaagcgattggactcgaacaatctgttgagccgtattctcgacaacccaaacgctcgacgtccgctggaaagtactagacaggaaattgttaaattgaacaacccggtcgaagacggagagcaaatggaaatggacgctttgaagctctcacttgttgatccggtgtcttaa

SEQ ID NO: 51152 - DNA, 264 bp, Heterodera glycines
cagagagttgccaaagaattggaagaattcgcagggatttgtgagacaattgcagaaacaaaggagaaagggaagaggaaaagtgcaaaggcagaaaaggaagaggaggagagggcggaggaaaaagaggaggaggaaacgagagggacgaagaagcggaagaagaggggagaaacaaccgatgaaggggagggacagcagaaggggaggaatgggaagggccaaacgcggcggaataaaacgcaacgagggcctgacggatga

SEQ ID NO: 51153 - DNA, 1354 bp, Heterodera glycines
catttcgagaagaacttctttggtgtttctattggctcggtttgggcgttctctcctcaattggacttggcacgggtcttcacacttttctcctttatttggtcagtgtttcccgccgtttcctccattcttcgctttgtttttaagggaccgcacatcgcccgagtgactctcgccgccttcgagtgcaattcattggactttcccgaaccgccatatcccgatgagtcagtttcccttccatttgtcctttctccactaatttcactgattccgttcagtgtcacttgttccacagatgcgatgggtcattcttcgttggttacgctttggacaatcattgcgaaggtaaagcaaatcgttcgtaaaaacattcgttggcatttgcaggtgcgcttggagtcactcatgtggggcgcgggcaccgcactgggcgaattgccgccctttttcatggcgagagcggcgcgactgtcgggacacgagccggacagcgaggaatatcgagaattcatcgcaattgtcgaacgcgatgcgactaatcaaatggtggggatttgatttaaatatgcgatttttccggtactcaaacgttcgtaccctcagaatttgatggaacggataaaactttggatggaaagggccgtgacgcggatgggctttcctggcattttgttgttcgcttccatccccaatccgttcttcgacttggctggcatcacttgtggtcactttctcatccctttttggacatttttcggcgcgactttaatcggaaaggcactcgtaaaaatgcacatgcaggttggtcgatggtcgagttggtagtggtgaccaatttcgttttaatccactgatcagtcaattttttcaaataagtcactcccaaaaatgacaatttcgctttgctcattccactttttttgccctaatacaacattccactgtcagatgttgttcgttgtgctcaccttttctgaacatcacgttgagcatttggtctcgctgttgaacaaaatcccacggattggcactgttcttcaggcaccgctcaaagagttccttcaagcccaaaagatcagtctccaccgtcggcccggggacccaattccggaacaagcctcaagtctcctccaacaaggcgagtaatccaccttctttctcacctaaattctgctgttttcagtgatgtcctattttgtttctgcaatggtaaatagaaattccttcattttgtaggaattcaaatgttttttttcagattctttggttcgtttattccttgatcaattctttggctcagcaataccaaaggcgtatgtgggaaaaagaacggattgacaaaaagttgtga

SEQ ID NO: 51154 - DNA, 1065 bp, Heterodera glycines
  unsure (1)..(1065): unsure at all n locations
atgtttaaatttcttttttcacgtcctgaattgctcaaaaaaattgctggaggtgagaaatatttcgtaaatgctcattttattgaataaaaggcaaaaacaagccccaaaacaacgttttaaaaaatgtacttaattttgaccctaaaaacttattttttactactgatttacttatttcggaaaattttcgatgcgacctctgatttaagcataaaaaattaaaaagaaatgaaagggaaagagaaattaacaaaaatttgggaattaatcgtgacaaaatttacaaatggaagagggaattgaagaaggaaatattcaaatttttaatcattgtcccattttgtagaaggtacaattatcagattatcaaaggaacagaaaatagaaaaaattaaacaatttgaaaaagtgaaaaaagaatttacaagaacattcaatttgaaacccaatgggaaaattaatgaaaaaatagcggaaaaaatttgcgttaaatttaatacaatttgtgattggaagaaaaaatcaaaattgataacacgtaatttaattaattaaaccttttaaattgtaaaatttaatttaaaacttttctttttaggagaaagaaaagtttactcggatgctgagaaattggaatatgtgaaaagagatgaggagatgaaaagaagaaacccaatgataagtgatagaaaaattgccgaaaaattaagcattccaattgccaacttaatacgatggacgaagaaattgggcaccaaactgaaccgttagcatttcgatcatagtaattagggtttgcggattttcagtgatttattttatttattgtgtctttaattcggtgataatgcatgaaaaaagttttcatcctgaaactcttcattttaatcttcagtgcaacatttcggcatcgggattcatccctcatccaatgacatcaacatcccaataacagcaaatttagcttanatgctcctcgtaaatgagattttggatgtgaattttanaatcataaaaaatcttagaattggtcgatcatatggggtctttgcattatatgta

SEQ ID NO: 51155 - DNA, 1490 bp, Heterodera glycines
atgggtgctaaggagatggaccggaacccggacccggcctgggagatagcccttgaaaaactgatcaaaaagttgttcttgatcgaatcggtccgggtccggatcagcactttgggtcctccgaaaagtgtcaggtgggcctccggaaaatgccaaatcacttttcgtactttttggaccggttccggaggcccggaaaatcggcaaacaattttcccagactaattttgacccggggaatctaaactcgggctcggaattccggatttggaaagtctgaatccggactccggaacttttccgaatcttccggatttttagctgaggcgaaacttgtatagtgcatatccccccccccccgttttcatcaacccaatacttaagtataaaaaaagttatggttatttaaatccacaaaaccttaagtcggaatttttgtccagaacttttttgaaactcaattaaattttttggaattataatgataggtaaatagtttaaatagaggagttgaaattctaaaaaaaaattttatttaattctttctgaaaaaaagttataaagcattgaacaggctatgttttttgccacagtcatgcgaatataattataaacatttaaaattttcaagccataaaatgcaattgagccaaaattaatttattattcgatagcgctaagatttctctatttaccttaaaattttggaaaaatttcattgagtttcaaaaaagttaaagcctagaaattatgactcaagattttttaaaattttgacaccataactttttttataatttcatataaacattttttaaattaatattctgagagacaacacacttaaaactattgaggatatcaagaattactaatttggttgaaattgggccaagatacgaatttatatgtcttgcattttttatttcctacaacatggcagtatttaagaaacgatccagcacgatttatatgtgctaaaattctgaataagtatgtacttattgtcttcttttgaaattttcaaaaatttctacaactttatttgttttatgataaactgttatgaaacagaggcaaattttcaaaatctttcccgaactcgactacttaaaccctttatttttgtcataaaattggctaaaaattaaaaagtttgatcagctttgacaaaatccgtaacaaatcacattaagattaaaaaatattcctcagagacaccaattaggaccccgaccccccccccccgccctatattccaaaaaatttaaatgcgctgtaaaaaaatgcttaagcaaaaacaaacaaacaaacgtgttcatataatccaaaatcaatccatccatctcaaatcttactaatgatagccccttctcatgtccatgccaccttaaaccacccaaatcccacacccacccatcctaattcctttttctcttaaaaattaataattgcaggctgaaaatgtaatattgtacttttttaattga

SEQ ID NO: 51156 - DNA, 811 bp, Heterodera glycines
atgaaattgacaatattcgccattctgtttgtggcattgtttattgccatcgctgaagcaggtgagaaaaatgcaagattaaacaaataaatattgcttattagatggcaatgtccgggcaaaacgccatgaagaacgattgaagcgccaagacaaccgagctgatgaggagaaccgccaggtagacagtgctgatcgggagaagcgccaagacaaccgggctgatcgggagaagcgccaagacaaccgagctgatcgcgagaagcgccaagacaaccgggctgatcgggagaagcgccaagacaaccgagctgatcgcgagaagcgccaagacaaccgagctgatgaggagaaccgccaggtagacagtgctgatcgggagaagcgccaagacaaccgagctgatcgggagaagcgccaagacaaccgggctgatcgggagaagcgccaagacaaccgggctgatcgggagaagcgccaagacaaccgggctgatcgggagaagcgccaagacaaccgagctgatcgcgagaagcgccaagacaaccgagctgatcgcgagaagcgccaagacaaccgagctgatcgggagaagcgccaagacaaccgggctgatcgggagaagcgccaagacaaccgagctgatcgtaagaagcgccaagacaaccgagctgatcgcgagaagcgccaagacaaccgagctgatgaggagaaccgccaggtagacagtgctgatcgggagaagcgccaagacaaccgggctgatcgggagaagcgccaagacaaccgagctgatgaggagaaccgccag

SEQ ID NO: 51157 - DNA, 457 bp, Heterodera glycines
ctcggttgtcttggcgcttcttacgatcagctcggttgtcttggcgcttctcccgatcagcccggttgtcttggcgcttctcccgatcagctcggttgtcttggcgcttctcgcgatcagctcggttgtcttggcgcttctcgcgatcagctcggttgtcttggcgcttctcccgatcagcccggttgtcttggcgcttctcccgatcagcccggttgtcttggcgcttctcccgatcagcccggttgtcttggcgcttctcccgatcagctcggttgtcttggcgcttctcccgatcagcactgtctacctggcggttctcctcatcagctcggttgtcttggcgcttctcgcgatcagctcggttgtcttggcgcttctcccgatcagcccggttgtcttggcgcttctcgcgatcagctcggttgtcttggcgcttctcccgatcagcccggtt

SEQ ID NO: 51158 - DNA, 658 bp, Heterodera glycines
atgggtgaagtatttggtaattaataaattaattcattaattaattatggaatcaatgaattaaaatttgaagtaaatattattaaattgggggcacaatctaggaaattggtctaattaacaaaagctttttatttttaggaaaaaagcgattttctgaattagagaaacgaaaaatagtgagacattttatggaaatgaaagcgaacaattggacaaaaatggacaataaaacgaggagtgagaaggagaaagaagtcactatgacctttgaagtgagccgaacgacgattgccaaatggaagtgccaattgagaaagagagggggtaagaaagtgccaaaaaagaaatcaaaaactgaaaaagcattcaacagatgatcaatggtcggaagaggaagcaaatgagcacacatcggacgaaggcaccgaaaatttggacggagaagaggatggacagcaaccaatggcacatgaggacaatgccaatgaaaatgatagtgaaaatgccaattacagtgaaaatgataatgaaaatgccaattccagtgaaaatgatagtgaaaatgccaatggccgtaaaaacgatagtgaaaatgccaattacagtgaaaatgatagtgaaaatgacactaaaattggagtcaaagaatctttgg

SEQ ID NO: 51159 - DNA, 764 bp, Heterodera glycines
atgaccgatcagcaacaaccaaagaaaaaaatgtaataattattaaaataatttacctttatttttaaaaataataaaatatttaggcccattgagctttgccaagaagtagtacaaatgtgcgatcataaaggccctaccgcatttgtaaaaattgccaagataaatttccaattttggaaactcgtcaacgaccatttgcggaataaaaaatggcttcttgattatttggagattgatgaaaaacaaatgaatggaaggacggaaatggttatttatgacggaaccggaaaaatattgccaattccgcaaaatccattgcccaacaaaattagcggcttccaaacgatttggatcacgtaaattaaccgattatagtaaatattatttttttttgttaactttctagttacctggatgcaaatgtgatcgcttttctccacctttttcaacatcttttcacttcgtgtgaaattactttgaccattgaaatgaccaatggtcaatttttgttcagtttggcccaaaatatttggccactgatcaaaaacaacgttaaacgcttttcaatgccgaccaactttgaacattttcggcatcacttcccttcaattctcagcagcgaccaatggccatctctccaattcgtttattgtgaagatgttttgcccgatttcccagccgatgatagtgccaacgcgtcggatggacaagttctgaccaattggctgttttcggcacattcttgtgatttgccaccgaag

SEQ ID NO: 51160 - DNA, 567 bp, Heterodera glycines
atgtgcgatggaagaggaggacgaattggacatttacttgcgcacttcgttcactcaagaacagactcagtcagtggcaaagtgccgatggattaattaccttcccccccccactttagggacattctcgaattttggtcatccatcggcgaagcacaggtaagacagatgaaaggacatcatacacatttaggcataatgactaacttcgctgcttttcagttcccccgattggctcgcttggctcgtttcattttggcttcttccggcgcgccgtgcccaattcccttgcagcagccgtccatctgcaaattgggaccgtatgaaattggcaccaggcttaacttgaggtgttttgtttgtttttttttgccaaaaatctctcccaaaatatatttttaggccagaagtgctgaattcattggcccatgtgccccaccaatcccaacaagttcagcagcagcagcaacaccaacagtcggcctctcccatggagtgaagcgactgaaccgtcaaaccgagcggagaacggcgccaagcataatcccgaagtccctctccgtgtga

SEQ ID NO: 51161 - DNA, 789 bp, Heterodera glycines
atgcctaccgtaacgattaaattcgggcgaattgtgcataagatagaaggacagactcagttgtttgtcgcccatttctggcctccccattttgcctctgattacaacggtgtccccggcgttcagtgcattttcaaattttttggaccaactttggcgttttgatttgacagcttcaggcttaaagtaaaaacaaattgaagtcgaagaaataaaatcaattatgtttgatttttaagaattttagaaaattcgaaatgaattaaaatatattttaaaaatttcaaaaagtccctaatttgtcgattcatttttaatttttcagcaaattccaaccctttgaagtcgaagaagaaaaaatcatttaagagttttgaaattttagaaattaaaaaattcgaaatgaattaaaatatattttaaaaaatttcaaaaagtccctaatttgtcgattcatttttaatttttcagcaaattccaaccctttgaagtcgaagaagaaaaaatcatttaagagttttgaaattttagaaattaaaaaattcgaaatgaatcaaaatatattttaaaaaattccaaaaagtgcctaatttgtaaattcatttttaaattttttcagcaaattccaaccctttccttcacttggggctcttcaatactgcttgggtagacatcgcccgcaatctgagcaagtttaaattatttacatttattaaaattcgaattatatttaataattattagggcttccttttttacgtaagaaaaatcgctaaatatgtaaataaa

SEQ ID NO: 51162 - DNA, 660 bp, Heterodera glycines
atgagtttgtttaatccaaacgaaccgttcgaaatgcgaattgaaacggtacaggaggagggtgaaggtaaggcaaagcaaaggattcgaaaaatcggcataaatccacaattattagccaattttagtccaaattataatcatttatatgttgaaattttggataaaactgataaacaacataaaatgatgaagcaaaatcacattttaatgttctggattttgacaccaaaaatatgctttatccgaattatgtttaattgaaataagtaattttctaaattccttttcattttacccgattgaattaagcgatttttcgaatacaatgcaaatttagtttttcttttttttgagcggatttcatctcacattgaatttattgtctttggcagagtttgggcagctcaacatcactattagcactccaaatggaattcgtcaaacaatctatcgcctcgtgtcaatgacctttcgggacattaactttattaatgtcaattattcctactaattatgactaattaattaaattaattatttttcctttttcagattgtcggttctcttgaactatttgaggccccgtttgttgttgccccagaggtagaaaattcatttgattttgagaatttttcaaaatttaatgtttaggatgga

SEQ ID NO: 51163 - DNA, 560 bp, Heterodera glycines
atgcacttggaaagtgagttggtacgatcatagccctgttttatacaaatatcttgcagttttgccaattatttctaaaaatttccttgaaaatttcaaaaaatcgaatgaaaatttaatcaaaaatggtgcgcatatataaaagtgccgtcattatgcccaatcattccattctctctctgttcatttgtgatgtcctttcttttcgaagaattcaatgcgtggctgttcgtgcagtttcaaatcgccttcgatcttaaattattttcaatttttttcgaaaatttcaaattttcatccacccgaatgtattggattgcccacatgggcattgtttcgatgccgaacatgaatttgccgaagccctccaaatggaacatgggccgtcttcgcattatgattttcagatggaaattttgtccttcggtcagcgccgatttcaaatgatgctcttcgacttcttcattctttaaaaatttgttaattgactaatttataaggttgaaatgaattgttcttcaaatggtgctataaggttactcaaaaaccatcaaaataaa

SEQ ID NO: 51164 - DNA, 234 bp, Heterodera glycines
attcccgcggcaattccgttggccatcggcggtttcgctgtcccatttttggtcacattgtcttcaattctaaccttacttttgccattttgacttggtttctgatcggctattcctttttaaatattattgtttaatgagattaatttcactaattgctcaaagaagaaattaggataaaaataaataggaattatttaacccataaaagttatttataaatgctaatattaa

SEQ ID NO: 51165 - DNA, 1457 bp, Heterodera glycines
atgtccttcttcatcctgactgtccgtggaggcgctgtgcgcggagggcgcggggcgttcattttcattggtgctcttgcagtggcagccgtcctgcagggggcaaatgctgaccagcaggctgccgacagcatacaaattaatgtaggtatattcaaaaatctaattctgtttttattgtattttttgcttttttcaaccactttttacttttatttttttgcctttcatactaggggtgggacggcggcgttttttccgcggttcgcgaccgcggcaatttgaatccgcgactgtgggattttttttttttgcgcggcgtgccgcggatattctgtgacaaatttttgtttgaagcgattgtcttttttgaatattcaaaataaaatacatttttttttgaaaatttggattatttttcacaaaaaattcgtttcaaaattccaatttttcccctccagagctgacaaaacctttaatttttctttaaattttttgattttttggcacaaaattttattttttttcacttttgtaaaatttttccatctttacttaccagtttaaaagtgcctttttctttaggttataaagcatattaaagagggagcccggaaatgcatagagcatcaccgaacgacaacaaccaccacaacgccgccgcaagccgagggcgagttttggcactttttagcaactataaatatcatcccaaattattacttttgcaatttttatggcattgattacttttgacatttttttgttgtcatcatttttttcaatgaaaaaacctttttctggaaattaaattaaatcaaaagaataatttaattcaatgaattaattaatattttttcaattaatatgcattgatttgcggatataagatgtttcttgttgttattagtgcatttttttctttcacattgttcgtgctatttattatcttggagacataagtgccacaatttcaattaggattgagctcgggctccaggctctccgccctattgtgcctctccccgatccccgaatctggcctctcaaacgtcctgagatttcttccccgaggggtcggggcttaaccccaattttaagcaaattcatcaaatgggccgttttttgcggtcctttggcacataaattggaatcaagagtaaattactcaattacgaaccttgtttaaagattaactcatttttccttgatttattttgttacattgcttacacatgcaaatgattgattattctatggcatttttccactttccttaggtaccacgacccggaaaatgagccgtgcgggacgaaagcgattggatttgatgcggaagcaatcgaacgattggaggcggaacagctgaaggaggcgctaatggccgaagcggaacaatttgggaacaaagacaacaaacaaaacgccaatcagatggaaatttgaatggaaattga

SEQ ID NO: 51166 - DNA, 594 bp, Heterodera glycines
atggcaaaagtaaggttagaattgaagacaatgtgaccaaaaatgggacagcgaaaccgccgatggccaacggaattgccgcgggaatctgaaatttttggcataaatttaaagaaattcacagcaataaaaagttcacacttttgataaattggcataatgttcgacaatcatttaataatttgggtttttaatatatcttctaatattttgaaaaagtctgcatctgtattttttttactacataggttcaatgtcagcaaaacgaaaatttagaattaaatgtgccacaaatcacaaaatgcttattgctaaaaaactgctcaaattgatcatggacaatcaaaaatataacatttgaacaatttaagagtgttttgaatgaattttgtaaaaatgcggctttttgacctaaaatgaggcttttgaaaattttaatctgggagccctgattaaaatgcttaacgattgaaaaatcccgggtcatatttcagcattttaatttgttatctcgggagtttggacccgagcggagcaaattgggcttatggcatgagtcctgaaattcaattccaagtgccgaaccaccaggaa

SEQ ID NO: 51167 - DNA, 1480 bp, Heterodera glycines
atggcttttgtgccgtttaggcccctaattgttcatccgtcgtccgcccttcggtcgctttgcttgttgttggacaacccattgcgcagcggtaccgtcaactcatggtcaaacgacgccgtttgtgccgcgacttcgtcgtctgtgcccaatgtgacggcaccgttcggctgcgtttgaattggcaaagtttggcatcgctttcgcgcaaatcgcagccattggcaaagtgtgcgcattgcgaagagatcatttgctgtcggtgcgcacaaaggcagcatttgccgctcagttgcgaagagcgcgaactttacgagctcattctgcgatcacacggtgaataaaaatggaatataaacaaattaagggatttttcgattaaaaaaaatattatttaaattaattccgaattttcaccgtattttcacacgtgctgagtcgatccacaaaaaaactcagtgattgataaaataaaaaaaagtaattataaaatcggtgtcaatgaatttaattataattaaatgtaattataaaatcggtgtcaatgatgctgttaatttttgttttcattttcctcccatagatgacaaaagatatttgtgcaaaaaattttgaacgaaaatggcgaattttatattttctaatttaatttataaaattaatcgtataattaaattcattgacaccgatttgtataattaaatttaattaggggtcgacctagcaccttttcacattccccaggccactccctccaatctctgctcctttcccccggcttaaatcgcatcgcccgcggcgttcgctgcgacaattgcaacaatttggtggagaagaacaccggctgtgaccacattgtttgcgtttgtggctacgaattttgttggcgctgtggcggcgattggaaaaggcacaaaaattgcgtgggccaaggacgaattgtgagtgaatggcacaatgaaacatggcatttttgaatctttatttaatacattttgttagaacgtgccactgtttgatctcgtctttgtaaatgggcaaaacggaagaaaattggcaaaatctccggagaaattcttcgccgaatgtgccgagttcagagcactccgtcagcccaatgggcgcaaatttttcaaactgatggaccaaatatttggaaacgatcgcccgaggggacgccaatgggcggagaaatacattcaggcgagaaatattaattggccaattaggcaattaattagaacattttaaggtgtcagaatttgttgaactttgtttggcgaagcgacagataagcggcaaaaagtcggacgatttcagcgcggcgacagaccgactccgattcactttccgcacaattccattcattgccaaaatggacaataaaatgacactaaagacgatcagcagggatatggtggaacaaaattacgagcaaatggtggcgatcagcaagcacattatccaaatgatcagatga

SEQ ID NO: 51168 - DNA, 788 bp, Heterodera glycines
atggcccacttggagctcaaacattcaacgcctgggttcagagtcaagcaaccctggcttcatacccatttagagtttgagaataggttaaggacatttcgtccccaagtcctctaatcattcgctttaccgagtataactgcttaacgagctccagctatcctgggggaaacttcggagggaaccagctactagatggttcgattagtctttcgcccctatacccaagtcagacgatcgatttgcacgtcagaatcgcttcggacttccaccagagtttcctctggcttcatcctgctcaggaatagttcaccatctttcgggtctcagcgcatacgctctgtctccgccccatcgcatgcgatcgagacgggactatgttgcgccccaacaccgcagtgccagggatcacacatcagctccgtaagaagccttcactttcattgcgcctttgggttttgaacacccaatgacttgcgcatacgctaaactccttggtccgtgtttcaagacgggtcgaacagatgaccggcttttacaccgagaacgcacaactgagagcccgagctggaccgaactggtgtgctggtacgtgtcgcacgcgaccgccaccgacccccagctcgagtcaacacggacccgaaaccattgcacaattcacccagagtaaacagcactcccccggatccgggtaccagaccccgaaaggctggcctcaagaccgagctcacgcagctactccgagcatctcagcgcactccgcctgcaaatgccccattcgccactga

SEQ ID NO: 51169 - DNA, 236 bp, Heterodera glycines
cagggtcgttaccataaaatgcactgcttgtgcgttgcttcgtgggatcatgtacttgtacgtgttcttacgttacttgctcagctcggctgtggggttttggtgtgctggcgcgaacttgtggttctaattcgcgttttacggaccgtaactcaagcgcaccaatgctttgcatgctgtggcggagtgcctggattactggcattcctgctttgatttttcgacctgaactcaga

SEQ ID NO: 51170 - DNA, 792 bp, Heterodera glycines
atgattgtttttcaaattttgtgttttaaagttttatttgtttatttaatttatcgactatatttttttgcatttttgaataagcaatttgtgccaaacttcgaagaactgaagcgagcggttggccaattgcacggttcagatcgacgtgcgtgtcttgctataaatttagttatacgcaaattttttaaaattcactcttctgtaataataccctattatattgtattcttttaaattataaaataattttcactgcgtttgtgcattttttaatttttttcattcttgatattactatcgcattgttacgcttttccaactcatttaggtttgacgcttcaaatgttttttgaatatacatttttaaattttttgatgtattgaatccatttacttaaactagaagtatgtttttttaatatcacaaatcaaaattatattaatataaccttttctatgttttcgtatattgctttggatttagttttatatttttatgcttaaaatttttcttaattttatcgataaatttgtaaataattcattgccaaattttctagttaaaagcatataagaagtttaataaatttattcaagtaatttattagtttaatttaatttcagaaaattctggagtcaatgatttgtcgacaatgtatgtgatatgaattaaccaatattgttgcataattgtgcttagccgcatatggatccaaaattatattcagcgcgagttcatctgaagcctaaatatgactaattgattcaaaatttttaacaaataataaa

SEQ ID NO: 51171 - DNA, 491 bp, Heterodera glycines
acaaatccttttccaacaagcgatgaatctcagcgcaagttaaaaccaccacagaatggcaatgtgcacagctcgcaaaacaaagcaatacccgagataaaattgactggatttgtcggatttgattcgctgccttaccaattggtcagaaagtgccaagaaagcgggtacatttaactagcatttttcgctattttatttgtttttgtggccccttgcctctccagattccaattcaaccttttgtgtgtcggtgagacaggaatgggcaagactacacttctcgaatccctcttcaacatgaaaatggagtttgagcaatgcaaccgcgaactaaagacagtcgaactccgcgaaaagactttcggtattcagctttaaagactaacaaacacaacattttttaaagatgtacaggaaggggctgtaaaggtaaaacttcgggtggtggagactgctggctttggcgatcagttggacaaggaaaagag

SEQ ID NO: 51172 - DNA, 772 bp, Heterodera glycines
atggttggattccatatcaatgcactcgagcgcctgatgaacgacatgatccaggcccccagtgcaagagcgctgagacttatcacgactgagtgtgagaatggcccgcacacaccgcgaaaaattttgcgtgtatgtttcgccagtttaatctcagacttggtagactagaactacgattttcacttttcctgagcttttttacattcttttcccgcctgactacatatcattattttttaatgttttggtatatatattttagtggattaatttgattgccgatcaaaattgtaagctccctactgtgaatgaagcaaagacctacgcgagggcactcgaggtcacaacccaaatcaaaaaattggcgcaaagacaaaatcgtatcacaaattcgtctttttatgccatgtggcagtccggtaagatatccaaatattaaaaaacaaacgaaaatctatgcttattatcttaaattatacaattttaaaaaattcatgggatgacagaattgctcgtcaatctgatgaaactaccgtatgcaacggggaacgagcatctcggctacattgaaaacggtgggtttatatcctacccaagacctgacctttatcacttaatttcagcattgttgaaaaagcagatcaatttcgagagtttaaaaacacctcatgaaatttcacagcgcatggtaagctttttcatagaaaatcgtttcgattcctaccacgcggatgtgcatcgcaatgcaagtgctgattatttcgagtaa

SEQ ID NO: 51173 - DNA, 926 bp, Heterodera glycines
atgttttccgtgccgatgccgtcttgtctgttaccgtcaccttcttcaacgtctctgactcccgtccaaacacccgttctctcgccaattgtaaatgattcacgtttttcttatcacgtgccgatgccgttctccccattttcaccgcctccgactccaactttttttcaaacagccgttcccgtcacggatgacactttgctccgtctggccaattttgtgcgttccaccaacagtgacactcaacaacaacaacagttagtccgacaacaacaaatggctgggattgagagcaaagacgacggttaagaaaaagcaatattcttcattcatcaatgtttaatttttagacgcccgccgcatttctgcagcgaatattgggacaatggcaagggtggcgatgctcgaattagtcagaggtattttcaaaaatattttaaccatgccaatagaactgtcataagctatcagtttttcataccaattcttccactttatttatatttgccgaattactgactttcagcccaagtacgttcgccaattgtggactttctttgtatggtgctgtctgacttcaaccaatttggtcacttctgttctttcatcgatagtcgtgaatttaaaattcttgtaagtaaaaaacgaattcaattttataatttcaattttgacagaatacaaaagcgtttactgagcttctcaatcttcgctctaaacagaagccggtgagtaccattatagaaaatacgacaaaaaaaaagttattttaaaattgaattattccccttttttgacagaagtcgtatttgcaagtggcgcgtgcccttaagggttacgagggtcgattggtggatggccatgttatgttgcgaaaagtcaaggacaaaaggaaccagtttaagttcttcccggatttgccataa

SEQ ID NO: 51174 - DNA, 235 bp, Heterodera glycines
atggatattgcgaaccataaatggggtagggaggaaacggcggcatggcacagagaaatgatggataggtaagaaattgagatttagccaaagataggcaggtagatcgctccattttctgcaattttaatatacggcgaaagaagtgaggagagaaaatccccaaaattcaacattttcagaaaattatggtggggaaatctttcattgctgtgacgaatgttgaaaattttaa

SEQ ID NO: 51175 - DNA, 432 bp, Heterodera glycines
aacgaaattcgtttaaaccgtcggttgaacaaaacggcaccgagtcagctgcttgagtttattattgcattcaccaacttcagctatggcataaaactgaatggcaaatttttactgagcagtaatatcagtgacggcgaagaggaatttttcccacaaaaatggtgggaaaaattgcgatttgaccaaatgacgtcatttgaggttcgaaaatcagttgacaaagggctaaaagtcttgagatatcgaaaatgaattgagaatattttccaaaaaaagtgagaaatattggcgaagaatagtgggagaaaaaagatttttacttcaaaggcttatagaacctcaggggttttcaaaaacggaaggagagtcaaattaacagaggaattaatgagttttccttttaaaaaatattttaagaaaattaataaa

SEQ ID NO: 51176 - DNA, 804 bp, Heterodera glycines
atgccttctaaacaacaaaatttgagaaagaagatgcaagatgtgtatcggcgacaggcagagcgatctgtcagtcgggataactcacccgtctcagacgggagtgcagatgggaatggagaggcatcggcgtatctccggggcaccagcaccccaagcttaagtgctttgcaaataagcacgccggcttcttccattggaagtaaaaagaggggaagacccttgagagccggagcgaagccaatcttggctacccaagaaagggtgtctctcattgacacacctcgaactgcggtcactcaaagtgaccagggttcgccgtgcaaaaaaaggggaaaggtcgccgagtgtggccaacccatgtttgcaaatgaagctattgctttgacgcctgtttcgactctaagtcgtggagggcgaccagttaagcaactgggagggcatgccggtaaaggaagaggcaaaaccaacgagtctatgagcaaatgctctgaaattgaccaaagtgtggaaaacgctctaagtccggcaccctcgcacattgtgcctgaaaagataaacttcagcacagtgcaaattaatttcgctacatcgcgaaattttgcctgtaaaatttggaaatgggcagcaatcggcctttacgaacgtgatggcgaaacaccgattgccccaagctctggcccaagatacattgagacctgttggaatgatatgacccagtttctcaatgacggctttgctgccacatacttggcatacttggcaaccatatcacaacgaaaagtggtcgttgttgacccaatg

SEQ ID NO: 51177 - DNA, 78 bp, Heterodera glycines
acttcacttttgaaaagtctgatcaatcagcacgacccaaagccaagcacttcctcgtccgatggccaagtgacttaa

SEQ ID NO: 51178 - DNA, 664 bp, Heterodera glycines
atgcgcacccgtccgatctggcaagttaagcaacgattgctgactagccaaaaggttcggtgccgtgatgaaacgaaccagcactgcttaccccgcggcacccggcacggtcccccgaaggaatggatttaattaaattctctccttcggggatttttttccattaggtcgtccgttagcgttcgattgctctagtcaatttttcaaaatttttgttgaaatatttgtcgtgctctgaagggcgtgggagggggggggggggcgaaggccccaccacgaggccgcgaagaggccgagtgagtaccttcggtgcaggaaaattattaaattttaaaattttttaattgctttttaaatatgccaaaaaatgtaggcttaacttttttagtgaaaattcgatcactcatattttttgctaattgagcagaagcgtaccaaactttgcagggatactccccggtaaaggactaacttacactgaaatgagcgccgagctagctggctcaaaaaaatttttcgaaaatctgagtctttcgtttttatttatttgcaaaattaattcataaatattttttcagaaagggttctgaaacgcaccaaattttatttacatgttagtttaggcactctgatgctttttctatcaataatggaggtgaataaa

SEQ ID NO: 51179 - DNA, 1213 bp, Heterodera glycines
ttcgccaaagaaaaagcgtgacattgagaagaagcagcggaacagcactcagtcgggagaggaggaagagatgacgacgccgaaaacgtcaagagtgccaatgaaagcatcagcgataacagaacgagcacggaaggcgaacaaaaacggcaacaacgacaaattctcgtcaacaatcagcaacggcagcaccagttcggcagcttcgcgcggtgtttcgtcttcgtccactcagtgcgtgggccgcgcccagttttacgcaaattttaatttctatttttttttgttggattgggttcggaaaatcgattggaaaacaaaaatgagggtttttaataggcagaaggaatcgggatgcttttggattgatttggcatattcctgatttttaagcttgaatttaagtggatgattcggaatggcaaatcgtttaggtccctttcaagttattgtaaaataattgtcaaaatgtttggtcttggatgggaatcgaacccacgcccccaatcccatttacatttttggcttttaaaccatcggtcagctttttccagaacaacccaatcatcgtcgtcggcttcgtcgttgttaaatattgcaccggacattcttcgccaacaactcccagcaaaacccattggtaccgatgcaccgacaacatttccccttcttaccactctatcatcattaccagcagcagaagctgcaactgcatcatcctccgctttcaatttgcacggcggcgttcgtccggaatggtttgaccgattgttcgcttccaccacccatggagcagcagcaacagtggcacaaagaggtgcaggagggacgacagtaacggaattgtcaagcagtacccagcaacactaccaacagaagcagcaacaaccaaaacatcgaaaaagatggccggaaactgcggatgaagaggaggaatttggcacgacatttgtctgggagcagctgtacgcgaccaagatgttccagtttgagcaggacaaagcagaagaaggcgtggatgagtatggcggagtagcacagcatctgagagaagaagcgatcagaattggggacaaaggcaatcacttgctgaagacactgagcaatggaagtgatgaggcgacggcggcggatgccaacagctgtgtcggcgacgatgagtcgaacgcggcgcccgagtgggctgaccagggcatagccgactttgcaacag

SEQ ID NO: 51180 - DNA, 112 bp, Heterodera glycines
tcagacaggaaatagcacaaggtgggggacagtctcagaaggcaacagttttgggatgattagcagtgggggactcattggattattcgggattgcggcttgcttggagtcg

SEQ ID NO: 51181 - DNA, 49 bp, Heterodera glycines
ggaagctattcccgaaggattcggtctccccataaatctgggcgcatcg

SEQ ID NO: 51182 - DNA, 1414 bp, Heterodera glycines
atgaagaaaatgtataataaagcaaaagaaaatgcgacaaaaatggaacaaaatgaaatggagcagaaaatatttctgactggcaatggacagttatttggcatggatatggcacaaacatcatcatcattatcatcatcatcgaaatcggcatcaaaaaatgccgatgctaacaaaaattatggcgagaaaaaggacgaactcattttgcatttgctaatctacgaagtggaaagcgtggtgaaattaatataataagaataattctaaatttgcaaaataagaccatttaaaatggacgaaaaatctcgagattgtgactattttcgtgcaaaaaataaagtaaataaaatttcgaaaatattgaacccaaggtaaaaaatacttgaggcaatttcgatagttttaaatgtttttattttataaattcggatccaaagaacacaaatttttcacgctggaaaaataatttatttctgtaaaatttaaatcttggaataattgaagtaataaaattggctgataaattcattgaaacatagattgaagatgaagcattcctcatgtttgtgaaagggcaatccaattttatgtatgtgttagagtatgcctttgatacggtaactcgacacaatctgaggcaaactgtagatgaaacaaacaaaagattttacacacaaaaatatgtaaagcaccttggcattttgcatttgatgcgaagggattggcattgtgccgaaaatggtgccaaattcaaaccagaaagcagcagcgacaaaaacgcgcaggaaattgaacggtaacaagggcataaacgaatattatggtcatttttgggttaggaattccgtgatttttatagcaatttgatggcagaaaatcttagcaaccaatcttttgccctgggcacaacttttagcagcttcaaatattagcctttgctaatgatcaattaacccaattacagtaatgactcagcattggtacagtatgagcaaaacgtggaatgcaaaaaatttcgctcatatttggacatggtttatgagtttttgttccgagtgcataatggagttgcttcggctgtgaagccaatttttgaaatgagcggcacaattcttacgctaattgatgtcattagtgcactgggcaaaatttcaaatttaaattttggatttgaattagaaaattttgtcgatgttcaaaaactgaaattgctaaattggaacgaattgttgaaatacagaaaaactgccggtaattaaaataaatttagctctttaatctcattaaaaattatttggaaaattaataaaattaaatttagccaaacctaaatttcaaactgaagaactatttatacaagtgtcgagcaaaaaaccggacaaccagaaattaagtgatgaagtttatgaag

SEQ ID NO: 51183 - DNA, 535 bp, Heterodera glycines
atggccgcatcggcactttacattcccgtgttcaagcgatgctcaaatttatcaaagtaaaaatatattttaaaaacaattgtttattattttaattttttaagaaaattgaatggtgatggagaagcaaaagcagaagcatcatctcaaaattcaacccaaatttatgcgtacatttttgccttagtccaatcggcgtcgacattggggtaattatttatttgtaatttaaattttaaataattaagtaattccgattgaaaattggtttttaatttaacagaaaactcactttatttttttaactccattttcaaacattttcagctccttttttggctcaacaattggtggctatggcgccgatgcgtttggattcccatggatttgtgcttttgttgcgttcgcgcattttctcttcataattttggaacaaatccgcaggatattgtccaaatatttataattaatatgattttgtttgtaattgatttgatgaactcagcccattcttttttgattctcatttttttaa

SEQ ID NO: 51184 - DNA, 385 bp, Heterodera glycines
atggtttaccaaatgtacttggcatccaagtacgaatccgagccctggctttaaaccctcaataaagtccgaaaatatgtatatattcaatatttgcttaaataaactaaaaatacactaaattactaaaaaatggtttaaagccaaaaaatgcaaaatattatcaaattcgagcttcaacaattgcaaatcaaacacatctcaagattttttggtaattatctcattctgttttcgtattgccactttcggcatacaatttgtgacatgaagtgccatgccatcgtcggatgagggcgtattgtgataaaatacggggaaaagagaattgagtaaaataataatataaaatgaaaatatgtgtcaaaaaaatataacaaaatca

SEQ ID NO: 51185 - DNA, 1431 bp, Heterodera glycines
  unsure (1)..(1431): unsure at all n locations
tcagtaacaggtaaagaatagtttacaaagaccgtttttttgtttcatcgcaatttcagatggataacaagtggcgaatacatccanaatgaagcggagggcggggagacggggcaaagacgagnaagggactggtcattctgatggtggaccagcagatgagcgcggagacggccatgcaaataataaaagtgccacttttatttttggttgttttcgaaatcacgcattttggcactttttagggcacgagcgatccactgaactcccaattccgactcacttacaatatggtgcttaatctgttgcgagtgccggacatcaatccgcagtttatgctcggcaattccttctatcagtggcagaattattcccgccttccggaccttctgcagagttgaaaagccattcttaattgttgatttctcgaattcttcagaacttaacaccaaaagacaacttttcctaagtgcgcatgtcgaccatttgtcggaattggaaggacttttcagattggagaagcaaattgagcagcagagaaatgccatcaaagcattggtactgaagccggcaaaagttatccgcttctttcagccaggccgaatgctcaaagtgacttttttgaacaccatgcttaacgctaaaactaaacgaaatgcattctttagctcaaatgcttcgacaaggacttcggctggggcgtgctgttgaggtacaccaaaaagccgaacccactgaatccgttgtctcctgaaatgctatatttcctcgacgtggctgtgttcgtctcgcgcgaaagtgagaactgcgcgcaaaatctatgtgcggtgaaacctccgccgcccggggagaatggcgtggtggtggtgctgcccttcgctttcgactgtatccaagcagtgagcacaattcggctaaaaattcctcaagagctgaagagcaaggaggcattccaagcagtggccaagaccattctggtgaattattttgttatttttgaacattgtcttttttcggaaagagcagcctcagacaggtcagtcccaccgttgggactgaacttcgtaaaggtatgcaaaagtgaatatgaattgaactgatgacatcgtttgtttttgttggctgatgtctctacacttttcatgacaaatttcagtgacataaattcgaaatattccatcagttttgatgtctagctattttccccgtaggaaacgaaaaaacgcttcgaccaactcattcccgaattggatcccatcgagcacatgaacaggtccgacccgcagctgaaaaagtctttggaagagctaaaaaggtgcgaagagcggttcacggaacatccgctaaaaggccgnncgcgncttcgatgnnatttgggaagcatctattatggggcaaaaactggaggacgaatacaaacaagccaagaag

SEQ ID NO: 51186 - DNA, 2007 bp, Heterodera glycines
  unsure (1)..(2007): unsure at all n locations
atgagctccacggaagagaaagtgcgtttggctcaggcaaaagcaaccaaaagtacataatttaaatatacttaactttgaatccttctcctccttctctgtaaaaggaatctatttaaatttaatttttcaaaatttttatattaacataaaaaaaaatttaaaatcaattgaaaattgtatttttttttattttgggaaatcatcactaaaatttatgttttttttaaattttaaatgcttaaatttcagctaaaaaattgtctgaccacgaaaagaagagaattacgaaacaatttttcaacttaaaagaacatttggaaaatgaaaaaatgccaacgaaaatgttagagaaaaaaattgccaacacttttggcattcatgagcgaacagtttatgattggaagaaaaagtttggaattaatgcaagtaaattgtaatagaataaatttaaatagattaagacatatttacgctttattaatatcattgttttaagaaactaaaatcaaaagatattctaaagaacaaaaattcgaaattgtacagcaatttgaccaaatgaaaagccaaatgaaaggcaaatccatcgcaaaaacggcttatgaaatggaccaacaaattgctaaggaattgggggtcagccgttcagtgatatgccaatggaaaaaggactttggcatgacaagtaaattcaataagaattttcataaaatttctgactatttttttattttttggttttttaattttcgaaaagttaatttttcaagtgaaaatttaaaattttgtaggtcaatttttattctgccatttaaaataattatttttttgatgacatatttacccaatacaattttatttcgttgaaaattttgtttctctttttattaaaagtaatatttttatttcttgctgcattagtttttattattttttcaatttgaaatttttgtaaaagtgatttttaagaaataaaatatataaattgagacttttttaaagaaattcaatataatcacatttcttactcagattaattggtaaaaataaattattaaaaaattggttttttcagttattttgaaaaattattttttcagatagcaatcattgtcatgacgattcagagaaaataaaaattgtcaaaaaatatttcaaaatgataaagctgaatcctcatctttctaaaaattcctttgctgagcaatttaatattagtcaccgaacacttaataattggatcagcaaatttgcgatgaaaaatgtaaataataacaaaagtaaaataaatttaaatttttgatttaagcaacaaaatggaattctcttctgctgaaatgatcgatcgtttaaaaattgtttgaattattaattgctattttagttgccgctaagaaaaaaactaaagtttagaaataagttttttagtttattgaaaaattgtaaataatttatttatttattttttcttataaaagtttaatatatttaaataattttcatattgtattctttgctaagaatcagtgttataaatttttttatcccaatgttaataaaacctttaagattttgaatgtaaaatacttatataattcttccctccctggtgattttgtttttctcttaattacaattaaattaagacttaaaaaatatttaatgtggccaatgaaaaaagttaattaattaaagtgggtttgttttacttctaaacaaaaataataatcataatttaaaacttttgttcagctgttgttgcggaaatcgcatagttcggcgccgtttgttataaattatgtcattatcaaccaaactaaaaaatttttgttcatttgatagctcttaaggttgattggccacttgtgaaactgtaattttttatacgaaaaatatgaaaaagtggataatttcaccatntaaaatcgaaaaattttgattttgtaagaactttagaaaaaaatttattcataaaaaattaattttattttggcatataataaa

SEQ ID NO: 51187 - DNA, 3953 bp, Heterodera glycines
caaaggcgaactgaagtgaagctgagcaaaagcatcaacaaatttgatttgctaattccgagacggaatagcaatttccaaaatcgtcgaaaaggagagaaagctaattccgagttggaatagttgttcacccaggtggtggcactctcaattactggtgttaatccgggaaggataacaattgcaatcacttatcgaggccaaacagagcaagaggaaaatttgttggaaagcaaggctgaaagctgagtggcattgttaatccgattggataacattgcctcatcgattttgattgttaatccgggacggataacaatttactctcactgttaattcgagttgaatagcagttgagcagcaccaattttcattgttaatccggtacggataacaattgaatcactgtaaatccaagtcggattacagttgatcagcatcttgaatttgatccgagtgggacaaattaagaaaagtccaactatggcagcggtaataaaggctggaaaaggccccggaccgtttttgccagagatgtgctgggcgacatggtgggaacgtttcgaattcttcatccagcttaaaggcgtgaccgatgtcgcaacaaagcgtctgctcctgttcatcgaaatgggacaggtgtacgaagagcttcggcgaatggcacagcctgaggatgtccgaaccatggaccttgccgaaattgaacaactgatggtggaacgatttggcgaagcaaaatcgattgccgcgtcaggcatgaattgttttcagccaagcagcagacagggcaatcgataagggactattcggtgctattgcgaagtttgatagcaaaggcagaatggagccgcgacagcattgacatgtgtctatgcgcattgtttatcaatggcatctctaatgatgcaattcgggttgaattgatcaaaaagggcgaaggacctaaaattcaaggacgcagtcgaatcagccgttttgttggagcagtcaatttggatgcccaagcaattggctcaaattcaatgccggaggtcgcaaaagttggcactcagcaaagaggaccaagaacgccgacgaaaagcacgagaggttgttttcggtgcggaaaaccggggcattttgcaaatgtgtgcccgaatcagaattcgacatgcagaaaatgcgggaaaattgggcattgggctgttggttgcaaaatcaaaaacagagacggaaatgcgaattttggtcaacaatttgatcaaaagccaaagaccaacggacgaccaatcaagaagattgaatgttcaaatgtcagcgtcattcacgaaatcaagggaatttctgccgatcctggtttcattcaactcaacattcacaatggaaagttggagtttgagttggacagcggtgcggacgtcacagtgattgacgagatcgactggaaacacattggaagtcaaaattggaaccatcccaaggattggttgcctatggcgggaaatccattgcgggcattttaggaaaggcaaaagtgaaactgacgcacgaaggaagaacgattgagtccaatattcatgtcataagtggtaagcacaaaaatttgtgcggccgcgatttgatcatgggactgaaaatcgatctgaaccgagctttcggaattccgacaattcgtgccgttgaaaacaaaaaggaattggaagcatgtttggcccatgaagttgaaaaagttttggaccaatggcaggcggagaaaatcatcgagccagtggcaaccagtgaatgggccactccgctggtcattatgccaaaggcaaatggcaagctgcggttgtgctttgactataaagtcacggtaaatccttggttggatgtacaccaataccctctcccacgccccgaggagctattcagtatcttgaatggtggcgaaaaatttacgaaaatcgatttgaaagatgcatatctgcaacttatgcttgacgaaaaagccaaaaattgtcttacaatttgcacgcacaaaggaacttcgctcgattgccattcggagttgcttcggcacccgcaatttttcagcaagtaatggaagaagttctgcagggcattgatggcgtggcagtttatctggatgatattctgatcacagcagccactgatcagcaacacgtcaaaagaatcgaccaggttcttaaacggctgtctgagaaaggacttcgagtcaagcgtgaaaaatgtgaatttctcaaatcagagatcgaatatttgggacacattgtggacaaaaatggtttacatgcgtcacctggcaaaattgaggcaattttgaaaatgccggagccgaaaaatctaaagaattgcagtcatttctgggaatggtgaactactatggaaaatttgtgccatccctggcaacgctttcagaaccgctcaatgaattgaggcgaaatgatgccaaatggacatggacaaaaagccaacaaaaggcattcgataggatcaaaaatttttcacaaagatgaaaaaagaaaagttggtgtgattgcgtatgcctcccgaacgctaaattcttcggagcgcaattactcgcagattgaaaaagaagcgagggcaatcattttcggagtcgacaaattcaagcagtacttgtacggtcgaaagttcgtacttcaaaccgaccacgagccactaaaagagatttttgggccaaaaggagagctcccgattgtggcggcaaaacgacttcatcgatggtcactgacattgatgaacttcgactttgaagttgtgtactgctctacaaagaatttggcaatgcagacggtctgtcgcgattgccgtgtccggaagagacaaccatcgactgtgttggactcgaagttcagcaagttcaggccgaaaatatttcatgcttgccggtcacagtcagtgccatcgcaaagaagtcaaaaaggatgaaattcttcgaaaagtgaaagaattcatcgaaaaaggatggccacaaaaagtggaagaaggactaaaaagttttcggtgctaggtcgatccacaaaaaagctcagtgtgggcgttccacaaaaagctcagtgtgggcgttccacaaaaaaagctcagtgtgggcgttccacaaaaagctcagtgtgggcgttccacaaaaaatgctcagtgtgggcgttccacaaaaagctcagtgattgataaaataaaataataaatttaaaataataaatttaattattgtattggtaacatccacgttgaaatcaataaccatcaatacatataattttgggctaccactgaaaatgtaaaattaatacaataaatttttatatgtttaataaaattataatttagaaaatgaataagacttttatttttatttttttgttatttcgatttgagtattcgacctctaccaattccggttttgaagaatttataaaaaatcacaaagctatagaacttgtcaaaagctatcaaaataaagaaattaaaacattaaaaaaactccatgaacaaatgcaactaaaaggtattgacttaagtttttgtaccttaagacgctacgtgtcaagactaactattgtttctgcgcatacaaataaaaatgatgcttcaaactcgaatgcttcaagccatgaaatgccaaaacatgaacttagatttgaaaagtgcttttcaaaaactttaagaaaaaatgtttttataattggaaatgaatctgcttggagaaaatatttattcaaaattgatttccaaaatggcgaaacattataccttattgataaagtgataattttctttgactcctttttaatatttaacaaattataaattcccgaaatagaaaattaactgataacaaaaaactttatctcaattttattgtcttgctgaaggactaacaagaactaaaaataaacccattgaaattttttaatttatcttttttcacagcaaaaatataaaaa

SEQ ID NO: 51188 - DNA, 2973 bp, Heterodera glycines
cctgcgaatgtttttcacaattcgaccaagtacctgaatttgccaggacaacaatcgaaaatgcacaatgagaaaacaagaggtgttacctgggatcagaaattttacacaaatatgaaaaaagagaagatgtagtgcttgcttatgcctccagaacgctaaaatcttcagagtgcaataactcgcagattgaaacacaagagaaggcaatgattttcggagtcgacaaattcaagcagtacttgtactgtcgaaagctcgtacatcataccgaccacgagccactaaaaaagatttttgggccaaaaggagagctcccgattgtggcggcaaaacgacttcatcgatggtcactgacattgatgaacttcgactttgaagttgtgtactgctctacaaagaatttggcaatgcagacggtctgtcgcgattgccgtgtccggaagagacaaccatcgactgtgttggactggaagttcagcaagttcaggccgaaaatatttcatgcttgccggtcacagtcagtcccatcgcaaaagaagtcaaaaaggatgaaattcttcgaaaagtgaaagaattcatcgaaaaaggatggccacaaaaagtcgaagaaggactaaagagttttcatgtcatccgaaatgagttcgccttaatggaagggtgcatcatgtttggaaatcggacaattattccgtcaaaatttcgcacaaaaatgttggaaattttgcacgcgacccacccggggatggtccgaatgaaggccctggcacgtcagaagatgtggtggccaggaatcgacaatgaaatcgaaataatccgaaaaagatgcaaaatttgccaagaagaggcgccggatgagcggaaagtgccattgcatccgtgggaatcaccagaaagactgtggcaacgaatacacatcgatttctgcggaccattttggggatcaatgtgctgatcagcatgtatgccaaaagtaaatggcctgaagtggtcagaatgcgaacaacaacggcattggccacgaatgaggcgctaaggattgtcttcacagcgcatggacttcccgagcaaattgtatccgataacggaccgcaatttagttcaaaagcattcggtgattattgccaatcacggggaattgttcacacattgatcgcgccatataatccaaaatcgaatggagccgctgagagatttgttcaaactttcaagcagggaatgaacaagctccaaaaggaggggatgaagcaagaaattgcattgtctcaatttctcctgaaataccgtgtcacaccgcacgcagcaacggaattggcgccttcggaaatcctcttcggccgcaggcttcgaactttgttggattttgtaaaaccaaccgcggtgaatgattttgaagaggccaaagtgccaaaagagtcatatgcggaacgaatgaaaaggaatttcgatcgcggggccaattcaagaaaaaatttcgaggtaaaccaacgagtttacgcgagaaattatccggacggatcaaaatggatcccaggacaaatcacccgaaaaattggaacggctatgttcctcgttcggacggcgagaggaatgtggaaaagacatttcgatcagttaaaagagaatttgactgatcagaattcggacaattcgagttcagaaagtgaggacaattcggactcagaggatgaagtgccgatcgatctgatggacgacgaacatctgccagcaccgccggaggaacagcatcaactggagcagccagaacagcaggctaatgctgaacctcgtcgttcaacgcggaagcgcaagaagccgaagatcttcgatccctcggactgatcacggcttcaagaaggagggacgaatgtggtgtagtgaccaatcaataagtggagtgaactttgttcactcctttcccttaggaacatttcatccccacatataagcgctgtcttccctccctccctcgttcattctggcatttattcctcccattgcaattcccttcgccttgaccattttattattatatttgtgcttcaaataaatatttgttttattcatatctgttgttctcggacacaacagattttggcgcagtcagcagagcaaaggcgaactgaagtgaagctgagcaaaagcatcaacaaatttgatttgctaattccgagacggaatagcaatttccaaaatcgtcgaaaaggagagaaagctaattccgagttggaatagttgttcacccaggtggtggcactctcaattactggtgttaatccgggaaggataacaattgcaatcacttatcgaggccaaacagagcaagaggaaaatttgttgaaaagcaaggctgaaagctgagtggcattgttaatccgattggataacatgcctcatcgattttgatgttaatccgggacggataacaatttactctcactgttaattcgagttgaatagcaatttgtgcttcaaataaatatttgttttattcatatctattgttctcggacacaacacatttcatttaaaaatcagttaaatattgatatatttatccaagcatatgaattaatatgatcaatagaataaaaatatttcattcaataagtaaccgcccaagaaatcactcacaatccaaaaataatagagaaggcttatatatattggaatttgcttctaggctttattcatttagacatacatacatttagcagtttgccaataatttttgaattctaaataaatctaataaaaaatagaaattcatttacattttttagcaattttaaaaatttcattaatggagaaattggcaccgcaaaattattgtctagccgattcaacagcatcatctttggcaaaagctgcccaaatggaattggacttcatccaaagcgttttgttgggcccacagcgaggaaatttgacggcaattgaatgtttattggcacaaaactttagcaaaca

SEQ ID NO: 51189 - DNA, 615 bp, Heterodera glycines
atgtccgtccgcaaatgtccgtccgcaaatgtccgtccgcaaatgtccgtccgcaaatgtccgtccgcaaatgtccgtccgcaaatgtccgtccgcaaatgtccgtccgcaaatgtccgtccgcaaatgtccgtccgcaaatgtccgtccgcaaatgtccgtccacaaatgtccgtccgcaaatgtccgtccgcaaatgtccgtccgcaaatgtccgtccgcaaatgtccgtccgcaaatgtccgtccgcaaatgtccgtccgcaaatgtcccactgcgccgattagcatattcatttacgcttaaagttcacttgtttaaataacttgtagcctttactaatttaaattacatgatgttaatgcttaattattctcacaaaattttgagcaatgcccttcttattggaatgttgccattttgaccggcccgtgccactgaaactattgccgattataccacgtttgctatttttacaattatttatcaagaattgaaaatacataaagatttcttatgtttaatttaaagcattatactaaaaataatttgtgaattaattatccataatattgagctaaattgatatactatccactaattgtagtaatcaaa

SEQ ID NO: 51190 - DNA, 814 bp, Heterodera glycines
atgccaattgatcaatttgaattgatgaacgaacaaaccaatgagcagttgacactgttgagcaatgatgaatcagctaattgtaatcattgggtgatgaagcgatgccaaattgggcagtcggcgacggcacaatgggaggacagaaatttgaatgatttgatgaacaatgtcaacgttgagccttatcatgacattccgagtgaggaaaacatcttttgctggtacttgtcaagtttacgggatacatttcaaaagcattttaaagaaaaatgaaaataaatttcaaggggttttcgaggtcgctgatgacgaatacagcatccatctcaaccaattccgtactcctttagctcattttgaatcatatatgtgaaattctaaaatttttacagatgctaccctcatgggcataaatatgcctatgagtgtacccttggcacaggaagctgtcaaattcgttgtaaaattagtacatttataggcatctggaaatgtatgtgaaatgtgccccgtaaactagacacgtacccttttttcttcggttggtgtcatttaatttaaaatttcgctttaatttagggcatctccgcccgagagccaacagattgtttacagacgacatcgatacgagttgtgccttccttttgtacgagttgtcaccagacaccctttccccccttcagggtttcactgcagtctaagcggcttccggcagtaaaagtggatgaattgtcgagaaatggctgaattactcgttgcgagagactcaaagtgctgctactcatttttatttgttgattctttcgctcga

SEQ ID NO: 51191 - DNA, 928 bp, Heterodera glycines
atgttccgtcggctatcaccgggagaatacggtaagctaaacggtatattgaatacggtagtcagggggattttcagtaaaaaattaggattattcattaactaaaaaccatcgctaattggtccatcagcagctgaacttccgcgtgtccgtttattcgcttcgctgccccgtccaattgcctccccagcaattcgccgtcaaaaattgtgtcgccactttggtcaatcaaaaatatttgtaaccgcttatggatgaataattaattgtttaggagaatttgcaattttcgtgtgaatattctgtgggcattgagcacattggggaggacaatgggaaaatgtttgaatcggtgacgaatttttaaaaaacaattaaataaatatttaaacttaaaattcaaataattcgaataaatcactaattgaattcaatttttcagctgactttctccactttgtcttgtgaacaaactccgtcaaatgttctgctcaaatgcgcaaatggcgccaattcaaatggggcgccagaggcacaacgattggaagttgagcataaataattattatgtacaaatcattcaaaatattaatttttttatttttagcccattttcttatgcaagaaaaacgcgagtcgacgacagcaaaaataacgacagaactgacaaatttaaagacaaaaatggaggacgaagaatggctgccgatcgaagagatggaggaggaaaatgacaaagttggggaggaagtaattaaggactaattagagaaaatggatatttaaaaaattaattgaattaattgaacaatttaagaatgacaaagtcgagcgaagaaatgaggagaaatcacagacaaaacaaacgagtgagcaagaacaatttagaaatacttactgcctgtagtggtgttaatgtattggtata

SEQ ID NO: 51192 - DNA, 912 bp, Heterodera glycines
atggtcaattttctattttccgggccctcaaatttattttttcataaaaaattggcttaaaagcttaaaatttaaacaaattatcgcatacaatcactttcaattgcttatttaaagctgtttagcagagcctggacgggaccggaccccgccgggattttgcccggtgatttttgggcaaaccaaaaaacgggggtcccgggggtcccgcccgggtcatttttcaagtcccggtcccggccatttaaaaattccaggctctactgtttagtccacctgggattgaaaaaatgtgttttaacccggttttggacatattgtaggtgctgtggggtaatcccatcatctcatgaaactcttctaaaaaaataatatttttttaaataaaaaatttcaaaaattgctgcttgggcctgcaattgcgggttgccggattttttaaagggccacaattgcggattgcgagaatcaaaatccgattgcgctaaacacttctgcgggctccactctctatggttaataattttatttgaaataaaacaaacgtttagaagagtgtgtatttaaggatcaatttaattaaattttaacagtgacctatcaccgggaggacagtgtacccgccgattaaatccctcattgtctactaacaaattaggacttatttccagtcttttttttcaaaattttgaggctctatttattttgaaaattgaaatattatttaaaattcctttattatgagaatttataaatgtgtcagtgaaccctgtgctgataaaaaggggaacaaaattgagaatgaatgcttcagcaacagagcagcagtgataaggccacaagaaacaatcaattttgataaaacagagtaattaataatcacagcaaacggaattttaattggaaaataaa

SEQ ID NO: 51193 - DNA, 379 bp, Heterodera glycines
atgaacaattcaactttcgcttcaaaaaatgataagttaaaaaacaatcattcaaataatgcatcttcaaatccaaaaataagcacaaaacaagcaagtaagtaatgctgaaataggcaaaaatcttgagaaagtccagtctttttttgctgacgaaattaattttaacagaaaaagaagaatttacttaatatgtgccatattttggacccctaaaatttaagtgacatcaaattatacaaaagcgtctcaaatttttcttaaaaaatcaaaatcatcggattgtcaagcccatgatgatgctccatcttcaaacgacgaaagcatgaacaatattgaacaaattgaaagttagttacctatttgatgggattagaaa

SEQ ID NO: 51194 - DNA, 205 bp, Heterodera glycines
atgcccctaattatttatttttctgttcttttttattgtgtttttcttattttcaaaattgacccacaaggattgaattggttacagctttacaacttactggcagcaattccaatgtttttaccattagcattaaatccaatcgtaccaatttgcacaatcaattattatcgtctcaatttcatttcttacgtaaagcgttttg

SEQ ID NO: 51195 - DNA, 663 bp, Heterodera glycines
atggttgtgcacggattggtgaccataaaaggggtggaaaatcgaatttggaatttgttggcattaactttctggatgtttcttgtctacgtgtccatgtttggctatgtgtcacaatttattttccgctattttgtcattgttcggtacgctaattaattattgaattaatcaaaataattaattaatcaaaataattttccaagtttaagtgacaaaaacatttcgtccctcaaatattttttgctgctttttctgatgcttttgttcccatttgcttattgcgttaatgtcttcatttgctttttccctccttctgatcacgcaattttggacgataaatacgtcgcggcaattctcggcattaatctcgacgatcaaattattttggctggatatacatttaatgtaaatttaaattaataaattaaaaaaattgtttctaatttaggatgtccgtgtgactattggttactgttacattatcatagtatgcacttttgcttatctcataatgtttgtgctggcatttcgtatcaaacaattcttggaaaagaaatcgaaatcgtaaattaattttaatttttttaaatttaaatttttgcgttttaaagcgtttcaacttcttctgaaataaccaaaaaaatgattgaaatgaataaa

SEQ ID NO: 51196 - DNA, 285 bp, Heterodera glycines
atggccataactatagtgagtttaatcgataatttgtttgtttggtcggcattcggatttggcattttgttgaatggcattttgatccatttgattgttcgacacacaccagtgcaaatgcgcatttacagcaaagtgcatttgaaatttgaaatttttataatttaaaaacaaatcgcattaattaattatatgattatttgatataaattacagatattagtccaaacatgcgtgacagacattttaatgcttacaatgactcttcttttcaatccggtttaa

SEQ ID NO: 51197 - DNA, 582 bp, Heterodera glycines
atgaataaggcgacggcgggctgccagatctgcgggccatatcgtaccgtcgtcttctgccaacgtcgatttgtgtacacgcaagtgaataaacaagtggtgacagagaacccactgaaggcatttgtggattggctcgtctttcaacttccaaagaaatacgacacatatgcctattcacattttggtggacgtttcgatatggtgcttgtcttccgcgagctcttccggattggctttaacccaaacatattaagaaaaggaaacaagctttatgagatgaaggtgcaccagaagaaaacgagtaaccccaacataatttttcgcgactcttataatttgatgccttgctcattaaaagtttgataaatggtacgccgagcaccgctacgaaccatttctttgaatgaatcgctaccaagctattgtaccaacaacgttgaaattttaatggcagctctggtggcatttcgacgcgaattcttcgaagtgtcacgaagaatgaaggaaatgtcgcgaaatgtgcagcatcagatgaaatcatgatggtatcgacgtgctgagagagtgtatgacaataaa

SEQ ID NO: 51198 - DNA, 1140 bp, Heterodera glycines
  unsure (1)..(1140): unsure at all n locations
cccctgtacttgactgtcaaggtgttcaacaacagttgtctcaacaggaagagagaattttgacagacaaatcaaaaaaatggaagcaattacaatcaaaaagatatgcagaaaaacgaaaatttggctttgtcgattcacaaaaggaggaaatgccgccaggtttttttacatgggtttgaatttaatgtatcaacggaaggtatttagtgagattcctctaagaatgggttggggtatgtaatgtacttttccccgggtatgcaaaccttaatcgaatagccaatctttggtttcttggactggaggttggctaatgttaaaactattcacattcagaacatgtccgcaaaatcattcgcgatcacggggacatgacctcaaggaagtaccgtcacgacaaacgagtttatttgggtgcactgaaatacatgccacacgcggtcataaaactgcttgagaacatgccgatgccttgggagcagatcagagatgtcaaagtgctttaccacatcaccggcgccataacatttgtaaacgaagtgccgcgagtgattgagccggtgttcattgcccaatggggcacaatgtggatcatgatgcggcgcgagaagcgcgaccgtcgccattttaaggcattgttttttatttgtttattttttgtattcgaaattcccgttttaagagaatgcgtttccctccatttgatgacgaagaacctccgctggattatgccgataacattttggatgtcgaaccgcttgaaccgattcaaatggaactcaatgacgaggaggaaaatctcgtgaaggaatggttttacgattacaagccgttagcgaagacgcggtaacattttgggttacgactttaaattctttttcgaaatttcttcctcagctgtaaaagtgtcatttacaaagcaatttgtacttttcacttttaaggttcgtcaatggtgaatcgtacaaacaatggtcgttcagcatcccgattatgtcgactctttaccgattggccaaccaacttttgacggatctgcttgacgaaaattacttttacttgttcgacctcaagtccttcttcacagcaaaagcattgaatgtggccattccaggaggacccanatttgaccattaa

SEQ ID NO: 51199 - DNA, 814 bp, Heterodera glycines; identical to SEQ ID NO: 20647

SEQ ID NO: 51200 - DNA, 475 bp, Heterodera glycines
atggtcgaacaattgcaaagttttgctggtgaaaatgaggcggatgtgcactttttggttgggcaagaagaagaagaaaaagaggcaaaaagaaaacattttaaatttaaatgtttttaattttgaaaaaatttgagtatttcgaaatgacaaaaaataaaataattaaaataaaaattattaaaaaaatttcactttaactgtttctttttgcgtaatttatgtatagttatataaaattgaaataaattacgaaatgacaaaacaatatttacaaatattattaaataaaatatatttattttttgtcactttttaatttttaagctcatttcggcacacaaattgattctgagctcatcgtccgaagtgttcgacgcaatgtttcgatttgatgcacaaaatgcaaagaatggaaaaagtaaaaagacaaaaaatgaattatcaaaataaaaattataaaaaaaccaataaa

SEQ ID NO: 51201 - DNA, 822 bp, Heterodera glycines
  unsure (1)..(822): unsure at all n locations
atggcgaaagatttacatggaaatttgatcagtgaccaatgttagaggaatggcatcttaaaaaaattgatgcacattacgaatttgatatgatcatcagatacatagtaaaaatttataacgaaattcgaatagttaatgataagaattgtaatttgattttaaaaaacaaacacttcgacattgnatacagtatctctgccgcacaattaattacagtatgcctgtgtctgttcgtctaccgtatatgggtgcgtctccggggaattgtgaaggnngccatgcccaaaactttattactttgtgtgccccccccccctttcccactcaattcctcttccctgtcagcagcagtgttgtgcaattccgcagaagatggatgctggggacggacgaaaacgccgtctttcttcccaccatatcgttacgttaattaacgtaattgggcgagtggggtggatggtgggataatgatgatgatgatgatgatgaggatggcgattaagatgattattgggtgcatttattaccccctattacccaccaattctccctagaagtaactccttttattggtgccgctttttgtctcttacgccgtgtcggcaaaattggaggcccccggggggttcattcatcggcaaaagtgggggaaagcaatttttgaaaaagttgaatacgaatgggaaacagagtggtgaatttttgaaaattcaaaggaagtggaaaatttcaattttatcggttgacgaccccttacttttgttttttctttttctttttgaattccgaagcccagaaattttttaaatttttaataaa

SEQ ID NO: 51202 - DNA, 694 bp, Heterodera glycines
atgtgtcctcccatgattatgattgatcacaatgatgttaaacgcattgttagtggtgatcaacaattggccagatcaccaccatcctccgccccgtccgtcccattcattttgttccactaattgcccaattatccactcaaattggtttgatgatcggtggtgcttattgctcaactgggcgcccccgaggggatgtggccaagtgccgacaaatggccaaatggctcccgctgcctgccaatgaatgcttgcttgcccccgggaccattttgtgtaaaagcaaatgttttcttttcggttttggcccccctccccccgttttggcccctcgggcgatgcgccttttgtttcgttgccgacaaatcgaatcgacacaacaaaaagcttggccgccgctgccgccaccgccgcagggaacgcaaaagccccattaaaaggtcatcaatctctaatggggggggaagggagtcaattgacttttggggaccgtccccggcagcacagcagtcaatcaatccatccaaattttccagcacaccgcaaagatggggacaaagtgtgaggaggagaggagagaatgtgtaaggcaaatggcgcacacacagtttgtggccaagaaaaaacaaaagctaaatggcgaaaagcactaattaattaattagtctaaaggaatggcacttgaaagattaaa

SEQ ID NO: 51203 - DNA, 913 bp, Heterodera glycines
atgtccctctcctccaaggtccatttgggagtgggggtgggcatgaggtcatcatatatcatccaaaatgtgcaacaatttttatgggagcagggtgactcactcatcgagattacgtgtcaagagtctcgacaccggaaaattctttcattttgtggcacggggcccccagagggctttttaattatctgttttggtgttaaggtcaggaaaaaagtagagtcttgtgatttatgatttattatgatgatgatgatgaatcgaaagtaatggtatttgactttaaaaaatcacactaattttaatgtcatattaattagagaccgacgggatttggacgggatctcgacctcgtgatccctctcgaccgttttttatatttaatttaatttcattaaaatctttttaaataaatcttttttaaatttaaattggcactatgtgttcgcctgaggacaattaaaaacaattaatatttgtcgccttttttgcagaaccgccgtgccaaagcaaagcgccaagaagaagcgacgcacgaaaaagtgttctttgcgcaggcaaacgcggcactcgtgctcgctgcgagtgttgcccgagcgactgaagcgggtggcgtcgctacgacgatgggagacccagcgacaatggcaaatggtacggtagtgacaaaatgccaaacaatgacgaccacgtggtgaatggcacggacggatgagtacgggaacggaaatgaaatgccgttttgcttttaatgatttgatagcaattatagttttgataattttgataggcatgacaatgctgaacaaatacgggttttcttattccgatactcgagactggacaagttttaatcattgctcagtgagctaattgctcttgaatatgatcccgaaactcaaaaccgattaaa

SEQ ID NO: 51204 - DNA, 732 bp, Heterodera glycines
atgttcaatgttcaatctctgctagcggaaaacggcacgaaatgtaaaagtggcacgaaaagtgaaaatggcggcgaactcgaaaaggtacaaagcaaaattacgtttaatttgttttttatttcgaaaattttatacggggaaagtcaaaaaaccaatttaaataaattttaaatttccgttataaataaataaattaattaactttaattggagactaatcccattatactgaattaagaattaattttaaaaactaatttggcctaattagataatatacccattcagaaacatgaagcaatttccatcgacaatttggcacttaaaacaacaacagcttcaacaactccccttcttgaccaccataaacaccacaatcattcgctgctactgctccaaaagcctggcacaaccacctccactaattgccccgcgccgctaccggcggcaccctttgatcttccttcaacaaccacctgctgcccagccaccgctgtatttcccatgtttgtgccctccggcggtgccaacaacattttcccgcccgtcgctggtggtggcattgtgccgccgggcagcagaaatgccgactttctgccgccccaaatgaatcatcatcatcatgcggcggttgccgcggccgcgtttatgcccgggtcaccaatggccgccgcagcaatgttgtggcttcatcagcagatcaaccagcagcaacatcagcaggggtag

SEQ ID NO: 51205 - DNA, 541 bp, Heterodera glycines
  unsure (1)..(541): unsure at all n locations
atgataaaattcgtaaaaatatgggttgaaaaatatctttgggagggatcacccttaaaaaaatgtaaaactttaaatattattattttagtttttagatttttggatttttaataagtttattcaactactattctttaggagacttatgaattttagaaattgaataattcataatttcacatatttaatatcaagtatatttaaaacacaagctttaatacttgaattttctttttcttggctaaaaattcattttaaaaatttaaatttaaattttattttttattggctaaaatctttgggcaaaaaatattccgctaaattcaattttcccacttttcaccccatatcaatcagtggaaggaagcaatgtgtctcaaattatgcttttggtgcccaaatcatcatcatcatcattccctgggggcttcgaaatacgcaaaacatttcgccaaaaccaatttgggcgcaaaaatcgctgcttcnaatttttatttgtacgacgaaaatgccttcgaaagtgttttctagtaataaa

SEQ ID NO: 51206 - DNA, 495 bp, Heterodera glycines
atgcccccgggggctgtccaattgttcacaaatggaacaaaaagaaatgatgatgaaatgtgccatcaaaatgccatcttttatgggaggcaattccgaaaaatttattgcttatccgccatcttaggtgatgagaaagtttctatttttttcgtaagaaattattatttcggatgagaaattaaaatttatacacgattatttttcgtattttttgtgaatttataaattaaattttaggaatttttttgtaatatttttccacaaaaacagtgcagcaaaatgtttaacggcaacgagaaaaatacgctaaactttgccaggtctccgttcatacgaattttttaggatcattttttaattattcccggaatttcgaggtccgattcaagaaattttgggcctcggaaccagcttggttcgggctctactaaattaaaaacgtttttttttatagcattaaattatttttcttaatttgatagattaaaacaa

SEQ ID NO: 51207 - DNA, 1070 bp, Heterodera glycines
  unsure (1)..(1070): unsure at all n locations
atggcaagggttgaggacgaggcggaagtgggacgacggacaaacacacgttgtgcttgtccaatgtgggacggattggatgccaagccgattcggtggtcggaccgattgtcggaaaagggcgtcgaagatggatctaagacacggccatcatttgcagaaaccgaaaaagcattagacgaaaccgattccaaagacgcgaatgttcaagctcttccgttcccccggtttaagcccatctatccgacacgttgacggggaatgaccaccggcagaattggcactttcaccggagaccatttggaagagcattggcccagcgcaagtctaaagggtggcaatggacgaagggactgacaaaagcacctggggttgttggattttgatggttatgtgcttaattcccactgaactgctcgaattacacaatgtgatggtgtggaagtaactgaaaagagacggacttcgcctttttcgtccctttgcacattttttacctttgcccggtgaatacgcaaagttccgcgatggaatcattcggattttcgctcaaagtcggcgaccgctgcaaggagctttcgatacgaagcgatggcangcgggggaaggactctgacggagaattggcgatggtttctgttcggctcttcgaaggtattcggtgaaggaaatttgcacaagtttttgcatccgagcacttcgcaagcgtagccaatgattttcaaagttccggttgacctgcaaaaagtcgacgattttaccgaacgtttttcaacattttcagacacctcggaacccccagaagtttcacttcactttgggtgggaccaatgcacgggccaaaacacgagggaaggctgagacggatcggaatgtgctcgaagtggcacccctcggtgatcagagtcaaattgttgacgattaaatcgacgggcaatggattttgcactttcactgaaacttcggaggcacaatcgaccacccaacagagttcatctgagaaaaatggaaataaggcgaaaacggggaaaaaagcacttgcctttctttgccctttcttgaaatggcga

SEQ ID NO: 51208 - DNA, 1587 bp, Heterodera glycines
  unsure (1)..(1587): unsure at all n locations
atggctgcaaaccgtgcccatgccgtactcttcccgtttcattatgcacaaaaagccacaaaaaagtgagaaaaaaagacacaaagtgtgatnttatatgggacaagacagacagacaaaaggatggataatgtacgttgtacgggtggtgatggccaaatttcaatcaagtaaaagtgccaaaaattactttcncatcatgaaggggagataaattataattttttatgaaattattgtacatgttttggtgcccttttgatggcatcactataaatgagaaaaaataactttcaaaaaccccgtattttttatccagagtcattattgattataatatttttcgaacactatatatatatatatatatattatgaacagggaaaccgaaacaaattaaaatttgaagaaaaaaacataattctttctttttggcatgtaaatatttttgtttaacgtgaaataattagcttttgttacaaatttaaaataatttttttggcgttaaaatggtaaattaagagaaataacccacaaaaaacattatcaaaaagcaggaaagaaagtaaaaaaacttgtttaaggataatttgtgctaaatttagtgggcttatcataaaattggcccacaaaatcaattcattatgcttatacaatatgaagcggcaacggatggaaagtcaggccaacattgaagcgcatttcaagttcattcgaaacgccctcagtgaagtgctcgcgaatggccgctttctgaatcaattttcaaaaattttatttaaattcgttattaatatattatttataaggtttcgtttttaggcacaaaaaatcgcaaaatatgcattaaatggcacaataatcctcaaataggaacacaaatatgtaggcaaaaaaaaattgtttgcattaacgctttttatgaagtaaaacacgtaaatactaaaatttttcaattgtaaatgatattattaaataatttaaaaaataggcattataaaagtcatgatagaccagggttcggatctattctgatttatcagaaatcttctgatttggaggtagtgaccaaaacaaaaaaaatttccgccggcccttttccctcgcccatttcccaaaagttttggaaaaatgcgccgcaaaaaaaaattcttaaaaatctgaatttttgatcccgaatggcagatcagaatctcaattaaaaaaacttttgtacttcatttggggaataaaaaccccaaagaaatatataaaattgatggaaatataataaatgttgtggatacaattagggatttaggcataaatattgataataaattgcaattttccaatcatgtcacacaaataataaagaatgcatatttacgtatgcgttctttatttcgggttattaaatcaaaatcttctaggatttggattattttgtacaaaacttatgttagaccgttattggaatatgctcctgaggtttggaatccatctcttctaaaaaatattaaaaaattgaaaaatgtcaaaaatatttcaccaaaagagttctttttaaatgcagccttccacccattccataccaacaaagattag

SEQ ID NO: 51209 - DNA, 705 bp, Heterodera glycines
atggcacatttggggaaaatccaaattttcaccaaagtaattggttttatttttttgtggaaataattttttaaatttaaggctcagccattgtctccagctgatttggacggactggagacggcaagttcagttcaagttatttctcgaccaacaatcaatggtgcaaacacttctttcaaaaaagacaaaggcccatttgctgcttcaacatttgttccatttgcgcgccaacaccgatttttggggcttttggatgagcagggtgggaccatatcatttttgggagtccaattttgaatgttgtgatttttcaggagacgaggcactgcattccgtgttgcggcgacttgaacaactttggaagacgatgccggacgatgaacaaatgcgacaacagctggaacatcattttgtctcgaattggctgctggacaccgggagatttgacgaattgaagctgtgggttgagagaagggcattaaaaaatgttgtccaactaattaagcgggaggaggaacagcgggagcaagcggaggaagacaaaatgaatgaagaaagtgatcaagatgccgacatcgatatcgttgactgatcgaggattgatggtttttattttcattacaagcggcagataaagtttttaaaaatttgaaacaattttaaaattattttggtcacttttccttttatttattcattaaa

SEQ ID NO: 51210 - DNA, 159 bp, Heterodera glycines
tttttaatttttaaaatttttttgaatttttaaaatttcccggttggttccggttcccggtccagaagaaaaatcgaggtcccggtcccgacttctcaggtcccggcaagtcctggtcccggttttgcccaaaattcccggtcccgcttcactccagta

SEQ ID NO: 51211 - DNA, 981 bp, Heterodera glycines
cgattatataaagacgaaattgatccagacaatcctccgcaacagcaaatagtgcagagaattgatgctaaagctggaaaaaaaggtgaagattaagggagcggacctactcttagcacaaacaatcaaattttccatttaaataattgacacaaaaaaataataaatttggaatataattttcaaaaaaaaataaataaatgaaaaacttaaattttgatcaagaaaaaataaacaaattttagtttttcaaaaaaatcttgcattctcaactgaattaggcacgtaattttaagcatacagtgacaaaaattaatgaataaaaacaagttctttgggttttcgagatcgcaaataacaaattagttaattctgaaccccggactcgaatttgaacaaaaaagtcgaaattagaaattttcgaatttgcatttttgattcaaaacggcttaaatgatttcttattgcaggattgatggctttcaattttttccttatatttaaaacaattttgaactagaaatgctaaactcgaaatttttgggctttcgactttttgttcgaatacgggttataaataataaatattttggccattttttaggcaataaaaatcgtaccgatgtgaattatcactgtgacgtgcattaccatggcacatacaaattcacatatttgaccaactttttcgcgcgttggcaaaccggtgccaaaattgaccgtattgatttgtttatgggcaaggcatatttgaattatttcctttggcacgatgccaacaacgaaacatgggaaagtgatgaggacgatgtgttaaagctattcagatttcagctgccaaaaatggccaaaaagttgaacacccgttcacagtttgccatgaccgtactgccagggcttcatgaattttgttgcccaacagatttggccaatgacgacgatttggaaaattgcattggacatgaagtggccaacaccaag

SEQ ID NO: 51212 - DNA, 616 bp, Heterodera glycines
atgttgtacaaagtgggtgctgaatcttggcacttttgagcacccattttcagacaggacaatttaaaaaaataacccgtcggtcttggtgactctttttcagcttgtcagatagtcccaactttgctctacaaaaccataatttgttttgtacctttatccttttcttggccaagaaatcagtggttgaatttgtccacttttttaagtagacccatcagtttatttgagtctaactatcttgaatttaatcgatagatcatttttaaaatctcaaaaatggcagaatatgatcgggaatgatggtgcatattttgattaattttgagttattatttgattttttataaatttttgaatgaaatttttggtcggggtgacagaacttatacaacaccccaatatttctctaataaacaaaaaaattaaaacaatctcttaaatttcaaaaaagttatgtttcattcgtttttttattgttcattcatatcatatttaaattaaattattataaaaaaattattatttttttattatttttatcttttttttcagaataaaccttttttcttattttatttattagctcaattttagacttttgctcgcaaataaa

SEQ ID NO: 51213 - DNA, 2454 bp, Heterodera glycines
atgtctgctctttcctataggacagaaattgatcggctgtcacttgcggttaacggtgcaaaaaattccgattagcatagcataagaagggtgacagaacttatacaacaccccaatataagagctatcttatggtaccaatgcaaagttcccagtattttttttcaaaataagacaaaatggctcaaaaaccaagattcgaacccaaaaaataagattttttctaaaactaatatcagggggggtccggcggtgccgatatgcgccgccggggaattttcttttttaatttgaagcaatttgttaacagattttgaccaaaaattatcaaaattttgtgattttttagctaaaaaattcagaaaatcgtaaaattgtgactgttctttaaggaattttgggcaattacagtatttgttaacagattttcaccaaaaaataaaaaattttacgattttgagccattttttaagaaaaaaaagttttgtggggccgggggccgcggtgccgataggcgccgccgggaaaaattttttcaaaattagtaattttggtagaatttatatcagcgaattaaatcattaagcacaaaaatttgaaaagtttggggaagcctgaaaataaagggcaaatcttagaaaaaaggtatagccaaaagtacaaaaggtaccaagttttcacacatttttggtcataaacttttttttaaacctaatgaaattttttgaaatttaccagactaatagaggacacttgttaatatatacgttatattaagatccctttatttagactgttctaataatggtccgttaagttaatgaaaaaacgacgtctagagaatttatatttcgccgagatcatgttctccgttctatgcgacaaacgggaggagacctcagtgttccggagattgacgatgagcataagtgtgatgaaatgaatgctgtgacacggaaacatccatctccacgagatcctgcctccttctcctctaaagtcgcagcgtgcctaccagtttccgcgggctaagtcaggggcttcacgaacttcatccgcgcaacgttttgctggaccatcagaacggactgctgccggacgaccggttgtccatcatgtgcgaagtttccgtcctcggttcagactgtccgctttgccaccgtcagccttaaattttcattttcagacagcacagcgccgtccgttggtcagccgatcacaatggcgacaagaagtgcgagtgcagccgcttacccggtggccacgcctcaactgatcgtgggcacggcgggtgccggcggtggtggcaaaatgccgaacgccgccgtaaccgcgaaacaaatacagcagcaacggcactggcaaagacagcagcaagagcagatgcaggtgagggggtcaattcgagggcgaaacaacgggggggaagggcgacgacctgctccgctaaaattttgttcaataaactatgtttttagaatttgacttttttagagatttttcccagtttggagaatgttgtttttaagcaattgtttttactagcacttgttttggaaggggaatcgaacttttcccgagtgagagtgtgtgtgcgtgtcctaatgtttttccgtttgcagcaccaccatcctccgggcaacatgctgtcaacgacgcttcaccaacagcagcaacagttcagtgccggaagtgacggaggcccattcataagaccatcacaccaacagcaacacacgccatggtgccgcatgctgtcgctgcaattggccagcagtactgcggcgccaacgcggggttcgaatacccgccaatgatggcatatacgcgtcaaaataattcaactacaattttcccatggacaaatgtgctgaaatttttaccaagcattaaattgtgaaaataaattgaagtattgaaaaatccattaaattaaatttaaataaaattaaatatttgaagtaattcttattgactatcagaaaaggaagtcaatacctttaccaaagtattctaaaaagtacattataccaagggaaaatggaaaaaattgatcattttttgggtcgtcggtttttaagcttaatttcatccgcggacatcgtagagccctatcaaccaaaggttcttttgaagcaaattttctgctctttctgtcagtcaaaaagttttccacgaaaaaacttttccgaccctcctaggaattttttcgacaccaacccctgcgtttacggcattttaacagtgaaaatgtcaatgtaattgaattttgttagatttatcgtgttataggatgtcttttcatgatgttcattgctttattgctctttctttttccaaaaatcttttttcattaaaaaataatgtaaaattttttattttcattattttcaatacctaaaaactttacggtgaagcacaaataatcagcttgcgaaatttatgaattaacaa

SEQ ID NO: 51214 - DNA, 3280 bp, Heterodera glycines
atgtatgtgaagaaggtgtcattaatggacggattagcgctggacattgagcgaaagcttgagataaagcctgcacgttatgcaggaaggaaaactatgatgaaatcgatgttcatcagtcaggatcggttcgagtttaccgccaatctgttcatggaccaaattacccgtcgcatcacaatggggcttgtttcaaatgccgactactcgggcacaatcacgcggagcccgttcaattttcaactgtttaatgtgcgggaaattgcgatcatcgccaacggccgttcctacccccaggccccttacgatttggactacccgcatggtattttaccactctttgtgaaaggcatagggaatgattgattattttattataccacggcgcacgttgcgcgcgctgttggtgcctgccgcatatatacagcgagctcacgcgggaaaggctcacttttttcgcaaaaataaattaaatatattaataaataataataatgtcgttggaagaccacaattattgcggcgagttgggcggtaacgaaacgcccacaaagagaagaaggagaaatgacgatgatgatggggagggagaaccgaaatttcaaaaaaactgcattcgcacactgagcgccgacaaacagtacaaccaaaaattcaaaatgcagagcgtaaagtcgacttttgtcatcgaaaatttgcccgccaaccctgagtcaatgctgcgcacattgttcgctcactgcatgtcaaccgccttggacgagtcccagcagaacggaatcacaccggatcaattgggcgctacaatctcttcagatctgctaaatccgagcatatggattcctatacgccgcatttccgacaacaccgccgactcaatcatgaaccgcttccttgaggtggcacagtcaaaatcgcgggagggctctctgtggggctcgccgttcactgtgaccatcacaacgcttgatgttgcgcagctacctcagcggcaacaggtgcgtggcagtgggaaaaggaccgtagattcagtgcaacatgtcgtcaaagaaagtgctcttctgcgaatcaacaacatcgatgatgcttattgtcttttttacgctttggaggcaagcaggaagtaccacatcaaagagatgagccgaagaaatttctgttattatattaaccatccgaacgagcgacgactggaagacgtgtttggactgatgagcagcgtaaacattcgcacagatttgagagaatatgatgcggttgtctatgtgccgattgtcgtggactattggaatcggaaatacgcaacaacaaaccagcgatttaaggtgttcatttttggcgtcacaggcagctatcgaccaaaatttcaatatgggccggacaattacaacatcgaaatgccgctctaccatcacaacggccaattcgacggaattcgatgtggggtgggcaaagcggtatttgggcgtgactactactgcttttcgtgtgagtgcccctacgataatgctaatggtcacacgctacaatgtaaagcaaagtgcataaattgtggccgcataggagtggggcgaccgtgccgagcggatgacaacaacgacagttattacagagaatgcacagcatgtggcaaggatttcatgagccaagactgcttcagtcatcatttgtcgagcaatgtgtgtcaacagttcaagaaatgcaaacagtgcggagttgtgtggaatgtcagacaaaaccgacgaaaaggacgcagcggtcacgtttgcggtgagaaattctgctacacttgcaaatgttaccataaaccggagcggggctgcttcatacagcagttgaaggcgcgccgccccaaaaagtacagactgatcgccttcgactgtgaaacaacacagaacacgcgaattgagggcgaccgcagacttcattctgtcaacttcatctcatgctatgtcgtctgcaccaactgtataaatgaaaatttgtggcgaaattctctacaagcgccatgctgcatttgtgggcggcagcgcaccgtcacattctcccaccgtgcctatgaacgcacccaaaccgatgcccaattcatcactccgtgtccaatggcggcctttgctcaatggctgctcagcgaattcgatccgcgctatcccacaatgctcttcgcccatttcgggggtcgctttgacaacattatgctgtttcggcagttcttcctcaacgggttttgtccacagatgatccgtcggggtaacaaattatacgaaatgaaaattgcgaggggcgaaaaaaacccggaaatcatcgtaagagacagctggaaccttatgccggtgccgctcggcgctctgcccggagcgtttggactcaatgtgcaggataaggagttcttcctcatttggcgaatgttgagacgaattatgggcacattctgcagtcgctaccgccaaaagctgactacttatacggtggaatgacgcccgaccggcagcgcagattttaccagtgctacgcggaacaccgccatcagcagttcgacctgtgtgaacagctcgcagcctactgcatcaacgacacgcacatactaattgaggcgttggtcgcatttcgaacggagttcttgacgattattgacccacttgagcgacatggatgcttggatgacgacaacgacgacgaagaggaggaggaggtggaggaagaagacaaagacaatgcatttgaagtgatcggcgatggcattgacataacgtgggagccgatgaccatcgccagtgcctcaatgagacattttcgactcaatcacctgaagcgagaacagctcgccattgtgcccgagtgcggctacgacacgacaaacacgcaaagccttgtagcgctcaaattcatggactggtacgccaaaaagaacggggtgagcatccagacggcacactcgcccgacggagagaaaaaaattggccagtacactgtggacggatacatcgcggcgaccgacaccgtgattgaggtcaacggctgccactggcatgcacacgaccatccacgtcaccgttttcagccccaaacagtgatggcgaatgggaaaacggcgcagcggatacgggaggacgatgcgcgacggctggccttcatcacatctcaggtgcaacaagtgctcgtattttgggagtgtgaaatcaacgctgagaagcgctacaacgacgaaatgaaacgctcctttgcgcagtacaaggacagcggccctatccatttgaaggactgctaccatggaggacgt

SEQ ID NO: 51215 - DNA, 626 bp, Heterodera glycines
atggacgagaattttcatcatcggcaattaattccctcaaaatatttacccacccacccattctcccgtcgatttttgcataccccccacccattctcctgtcgattatcagcaaaccaaaatcgggcagctttgtttccgatggaattgtggaacatgtgagatcggtaaaaaaaccaaataataagtaactgaattttgtaaatgatagggtggaaggcgacctctacagaaccaataacagtgttgaagcttggcacagaaatctgaacgcgttattccgttcaccatcgccacgtctaagcatttttcttcggaaagttcggcaagaagaaagccattggcgtcagcaagttaaagactttgcaaacaacccagcaaatggaatacgtggcaagggaatgaaacgcaagcaaaattatgtggaccaagacatgaatcttaatgagttatacgtcacgcgaaacaatcgccatcctctgcaatatttgcgcgcaatttccaaccgaatggcagaacctctttaggacaaaaatcaatgatttttcatgtttatagtttttaaaacgtaactaagaacctctttaggaataataattgatttatttttcatttttaaaattaaa

SEQ ID NO: 51216 - DNA, 533 bp, Heterodera glycines
gtataaaaggcgacggttttcttcacttttcaccagtgccagccagccttcaactcaacgcaacatcaacaccagtgcgcgccaagctcgtctacacatttcgtcgcgacaactcatcacttcatcatgagcgacatgagcgcctacatgggatccggccccgccgagcctgcaccgtcgtccggcgccgcggaagcctctccatcgtcaggagtcgcgagcgcctacatgggagcctcgcccgcgtacgagccaccagcggttggtttaagggggacacgggagcaaaagcatcactaatcttttgtttttgcagcaggagaagtccccggatcagagcgcctacatgtgagaagatgcaacaacgaccggcggatggatggacgaaacctgaagagcgagcgacctgtcagaagatgcaaagctaaagaagatgtcccataatcgtgatctgtatttattgatgtattgtacatttgtatgcatatatcatttgctgtgtattatcactttatttccatctgtgttccgaa

SEQ ID NO: 51217 - DNA, 592 bp, Heterodera glycines
acgcgtcccatcgatttttattcattttttctttgtttcagcttgaaatgttaaataaaaaaattataaaaacaaagtacattatcaacggagttgaaaacaaaataattcatcaaaatccgttgactgataaacgagtctgaaggtgtataggacaaaataccatcggtggtcgaatgctaaatcgtccatacgaatgggtctttggcatgattcaaaagggtctaataaggtccggtttttccctgtgcccgatcggtctgcagacactcttctgcccattatcgctgaaaatattgaggtgggaagcacgatagtatcggatgggtgggcggcatacggagggattaataacatgcagcagcaatacaaccacgaatggataaatcatcaaatttacttcgtagatcccgccaaccctcaaatacatacacagggaattgaggctacctggagggctttaaagcaaagccttaaacatttacatgggactacacccgaacttttacctacttatttgtttcagtacgcatttcgtcgttatcacgaaaacaaaaaaatatttcagcatattttggaagaaatgcgccat

SEQ ID NO: 51218 - DNA, 712 bp, Heterodera glycines
atgccatttcgacagggaatgatgctcgaatgccgaggggttcattcaattcccctgcccgtttgtctaaaaaaaaattcaagaaaatatatttgaaaactgctagattctccccgtattgtttcccccgaattttttaaataaaatttcaagaaaacaattttcaggtgattttttaaggagaatttttgaaaaaaatggttggaaattccaaaaaaaaaatttttcttggaattttctttgaaaacccatggagtactgataagggggggggggtgggagaaaccaaggtcccttgtttgtcacttcctgttggatttaccaaataatttgggaataattgtccgcccccccccctcccatttttctaagaaattttaagaaaacattttagaaatcttccaaaattttttataaattttattaaaattattgccccgcaattttgcacatttaaccagcagcgcaatgagtcggatgaagccgaattggacgcgcaactgaagcgggcggcgcttgcacacgccgaacatttggagcgagtgatcaggacacagaagcaaatccacgacatggagactcagcagattgtgcaggtggtggtggtgaaggagtagtgcgaaaaagtgttgcaaattttggtctcaaaaattttcggaaaaagtgccaaaatttggtgcaacatttttctaatatgcgctatggaaataaa

SEQ ID NO: 51219 - DNA, 388 bp, Heterodera glycines
atgtttagtattttttttattgtcatatatttttcatttatctgaaatgataaatttcacatcctcatagctgaaaacccaggtaaatttttgcaatttttagagaataaggatttcttgagatccggtggtggcgccggcaccccgggaaaatattatgttgtggattttgttgttttacaatattttccaattgttactaaggagtcgaacttgaacttacgtttgtaggaaatgtcatgaatattttctatttagctttttttttacaaaaaaagtaggcgaaaaattaacgtgtaacgcttgtgcgcaaaggttggaggcacaaatgtggacttacaattagtaaaaatctagaaaccctaaaaaatttaataatataaataaa

SEQ ID NO: 51220 - DNA, 399 bp, Heterodera glycines
atgagccaaaaccgtgacgaaaactcgcagccacctgtactcgatggaccgtacccgctggcacaagagcgcaatgagtttgtggaagatgaagcaccggtgctgcttgagatgttggatcgtctgtcacaaggagtgggttttgttttgaattatttaaattttttaatttttccattttggcttatgctaattgttgattttgtttagggaatttgccaagccatgggcgtgttttcgtttgtacttgccgactgtttggccacatttcatacatttgccatactgttcgactgtgagacacctgtgccatttgacgagcagcacaagcgatacgtgttcgaacacagggacaaaccgcggctaatctacgtttcggaagatggtagcgctatacag

SEQ ID NO: 51221 - DNA, 1075 bp, Heterodera glycines
atgggaggggtgcatggccaactgagcgccagccatttgagcgccgccaagtgagcgcgggctatctgagcgccagacttttcagtactgaagccaaaacctattgcgcgagtttttcttgcaaacccaaacctattgcgcgacttttttcttgcaaacccaaacctattgcagggggggtgcgcgacttttttgactgcgcgactttatgcaacttattttaattaaatttatttaattttaaattattttaaacgtcttaaaggtcaaagacgttgaatttaaattcatttaaaattctccaaaaattccccgcaccaagcggatccgaaccccagggggggcggccagactgacgcactaaccactcggccacattggcaatggatgataaacattaatttgctctcataaagggaaaatttgacgtcaccagcgggggcagggggggcgagagcgagcagcgagagaggggaggggggtcaaataaacaaatcaattattgaattcagggttttctcttttaaaagcaaaaagaaatgggggaccgtataataaaatataatttaaaaattaaaataattaaaaggttaattaattaattattattcctaaaataaattttttattacttctaaaataatataaatatttttcagtgaattaacaaatacatttaagtttaattattgatttgtctgttaattttttatctcctcaaaaataattacagcaccctttcaggtgttgggcgtttgtttatttgaccaataatttttaatttcacatctttacgttgcccctccctcacacctgctcatttgtgtaatttgacaacgcttcttttatcttttcgttaaaaattaaaaagattgtctggaatttgtcttgcgccacaccgctgtgccattcatttatgtaatttgacaccagtctgataataatttcgccaaaatttatttattatttgtccatttattacgaattattttgcatctatcactccaaattttgttaaaaaaattttttttattgtcccaatttttaccattttgtgttttttcaacaaaataaa

SEQ ID NO: 51222 - DNA, 514 bp, Heterodera glycines
atgagagccctctggcgtttggcgcgggccttccccggcacactcatccgctgcatttgcttctacgccgcccaagccctggagatcgaacggttggtggcccaacaagaaatcccggacattttagtgacgacagcggacgcgacacagggccacgagtcgtcacttgccgtcgtcgtcacaacatgctccgtcttcgacagtggagccgactctcagcctttctgggctgatgccgcacgggtggacgtcgccatctcccgcgccagccatggaatgatcatcatcggcgatttgctgctgctcaaccggacggagacgtggcggcgctacctggaccaagcgacgactgagacaacagtggtcggtccggagtacttcgacttcgagcagttcaacaaccccgacaactactacgacaaggacggacagctgatctcagccaacggcggtgcggtacggtcagagcttttctacagcaagtacggtaaaaatgtgtggtacaacaactccg

SEQ ID NO: 51223 - DNA, 327 bp, Heterodera glycines
ccaatttggagtgtttttgctcatgaaatttggcccattttcgcgccaaacattcaccatttgtccttttccgatggccaacatttggacaatttgcgtcgctacacttcgctggcaattctcaccgatctcaaccaattgaattcaattgactccgataatttgttgcccgcggtgattgctgatgatgggccaaatgtaactggtggccaagcgttagcaaaatggttgcaaatgccgagaagcgatggccagccaaagcaattgatttgctgtgttgatacgtcagaagcaattgaatgtgtcgatagtttcaaagaggcatga

SEQ ID NO: 51224 - DNA, 399 bp, Heterodera glycines
atggcttcgaatggcaaggcaacggaagcgtcgtcagaagaagtgcgttgttcgtcgggtgctgccgccgcgtccaccgcttcgtttgtgccgtcgtcggattcgccgcacaatcagccggggtcgcatgccatcgactggaagacgtacgccgctttgttatcctcaccatcgggcgccgatttgatggcggcgatgttttcttccgctgctgcgcttggaccgacgaaagcacacggagaggaggaggaggaagagagcgaaagaggggagggacaagagaatgttggagaggaagagatgacgaggaagggacggacgacgaaacgagctgtgaaagacgaagagacggaagaagcggagggagaagagcgggagggaaagcggatggaactctaa

SEQ ID NO: 51225 - DNA, 925 bp, Heterodera glycines
ttggctgaagactttgccaaactttgcattagcaattaccccatcaaaccaatcgccaacgaattgacgtcaggtaaaagtgccaaatattctctaaaactcgaagaattacattggaagtgaatacgaaaatgaccattttaatgagactttgattttgattttcattgccacaatttgtcaggtgaaaatggtggtgagagcggcgctaagccatacaacaaggaagaactggaaacaattgggtgagaaattggaccaacattttttttgaattaatttgattcatatttttagacgttttctcaccgacattttggctttccaacaggcggatgagagtccccacacgccgcctgctcatcttaatctgccaactatggctgtcctgaaaaaacaaattggcgacggcgtcagcgcggggttcaaccgcttctctttggtgagcagaaagggtggcctcacttctcgaaacaaaaagtgccgacgagaaaatttatttgggtgttaataaaaacaagtccaaaagttttctggatcacgaatccttcatccaacacgaccaattcttattttggacccgaatttgaataaaaagtccaaaactcaacgagttaataatttctggtctaaaatgggggatagcaccacttactattaccgtttggcaaattaattaagaacaaaaatttggttttgggcgggttaagttaatttgcattcggttggtcgaaaaaatgggaaacagcgcatcctttggtcaattgtcggctttgtcggttccattttttgatttttcaggtcacgcacggttttggcggctatgcttttgccggagtgatcaacgttctgatcgaaatggtcaaagaatgtgagcaacgattgtcgtctacgacagaaggatgagaaaatgccgaagaataaa

SEQ ID NO: 51226 - DNA, 740 bp, Heterodera glycines
ttctaccattcttcacttgctatcactgtttcagataaacgagatgcaaaaagaacagaataaagaattgacggaagagaacaaacgattgaaggccattattgaagagctgaaggctggaaaagtgatccatttcaactcagtttgatgaactcactgatttcacctttttacagcaaaaggcgctcatcactgaccagtcccaatcatcgtcaaccgcctctgccaagtcaccatcaaagccattcaaagatcacctgcgcaaaacaggcagcaacagcgtcgatctgcgtaaaagcattgaagtttgttgatttatgcctaacaaaaattcaaaaattagccgcgttcttttcatgtttttgacggcaaagtttttttctttgaaaattttatttaaaatgtaaaaaattttttgggaaacgacaaggggcaaagaacatgcccgaaaggcgtcaggtcatctaactctgtgacaatggttaaaatgccatgtaaattgggcggcatggcttcaaaaaagcaaccaccatttttgacgggctaccaaattttaaaaattaaccaaccaaactgattttatcacctaatctccacaattaatttctcctgaatttgctacagaagtccgggattgaaattcaaacaggacaacggcaacacagcgaggacacctgcttcaccttcctgctagaggctgaagccgtcaaggcgagttacggagaatgtctgagcaatgg

SEQ ID NO: 51227 - DNA, 1754 bp, Heterodera glycines
tgctgggccaaggatgatgcgggtgccttatctgtcgggcggcggcggaggcattggcggacagagacgttcaacaggcggaggcacagattattggcacaagaaaggcggcggcggtagtcaatcgggcggaggacgcgaagacgacagggaccgacgtccgggtccgggcggcagcagttattaccaccaacagagaaacaatgaccgatggaagcggaatcagcacccaaacgcaccgccgccgctgagtgttgcacagcgacgggcccggggtccgttgcccgactgggacgaggtgactgggactttgtccgtgcatcaatcaattcattatgtatcggaacacctcatgtcaggtgcaagaagtcgcggaagacagcttcgactacatggaaataatggagagccaatattcgtaagaatgcgtgtcattgggctatggtaacgaatctgtccctcattctttttttggctaatcacattcggaggttttgaggatgctgttcacgaatctgaactcggacttgcccaattccgaccactgacccgaactcgaacaaaaagttgaaactttttttccaaaatatgcgttaaaataaatcaaattcaattgcgcatttttcaattaacaatttaagcactgatttgttgtaaaagcttttacacatggaaaagcatctttagaaaaaaattcgattttctgtatcggaatcgagtaagtcgcagtgcagatttgtaatcagctactaaaactgtttttgagcctaaaaagtaaaaattagggactcaattctttaccattgtctgtcgttgaaattaatcctaaaaatgacatcaaattcagtcagtactacgccctttccgccgttcccccctttgacccgtcgcttggcgtcattgcttcagccgccgcacatccctcggcggcacccatcgttccgtctgttgccgtcaccgctgcgcatgctgccaacgtggtcagtgcgtcggtcgtcccgcccgcctcccttctgtcccccaccggtctcatctccttcccactgtctgctcccactgcgctttccccgggcgccgtcgtcgtggccaccactgaccaatttccgcccacttcggccgccgctcagttcactcccgtcgttctgactgctcaatttccgtccaatgcgctgttcgccacgcgtccgacgaccaccgccccattcattgacgaacagaagctgaaggacttagtgcgctcgcaaatgtttgtgcatgcatctagctagccccaggcccgtaacccggaaaaatggactagtggagtgttttttgaaaatccaaattcaaaattgctaaaaacggtctgaaccgatgtataaaagccgaaatggataggaaaaatagcctgaataagggcaagcgcgcccccattgctatttttcctatccatttctagcttttaaacatcgattcaaataatttgctaatcaaaatttaccatgttttaacccacattggttacgggcctgaacccagcgcattcttgatccatgcacattaaagtgttctttctttccagtgagtactacttctccgctgacaacctccagaaggacttcttcctgcgccggaaaatggacatcgacggctttttgccgctcggtttggttgccagcttcccgcgcgttcgttcactgacgctcgaccagaatttcattgtctccagtttgtgtgacagtgacaaagtggagctgaacgaggaccaccaaaag

SEQ ID NO: 51228 - DNA, 772 bp, Heterodera glycines
accacttattccgttataattagtgctgaacaatcatttaaagaccaaactcaagaaacgattacaaatggagcgttaattgcattttacgtagcattggccataagtttcttcgaaataattgtaattttattaaataataaaaataattttgttttaaaaattaatttaaggctttttctgttatgagcacgttgaatttaaaattgttcacttcaaaattagaaactcagaataatgtgcacaatttaagtgaacgatatcaggtgaagcaaaaatggaaaaattaattaataatttaatatattttaaattaatttcagttggccgaaaacattcgcacggggcgacaacttgggcccacttttttgctgcatttcctaaataattgtgttgtaattatcccatctgtgcttggcttttaccaaattatcacccatccaaaattattggaaatgatttgggtgatttattttctgtttttgtccattagcaatttgatgatcgaattcacgacaatcaggcaaatttaatgaaaaaataataaaatttgtattttaataaattgaaattttagtcgccatccgattttgcaaagggatgccctgcgaattttgtccaaatttttcaaggcattttccatgaaaattccacttgtccaacgcattggtgacacagaaggccaaaagatcggacgaattgacgggaaaaggatgcaggaaaagaaaatgaatgaaatggacaattattttgaaatgttgacgaagcaatg

SEQ ID NO: 51229 - DNA, 595 bp, Heterodera glycines
atggaaggaattgcgggaaaaggggaaggtaatgagaagagcagtaggaaagggaggggacggcattgggacggaaaatgccttttttggttccgctaaaaaatgctaaatgatcagatctcaaatataattcggggaatacaattctcattaatatgagtaattttagtgttgcataagtaggtaaattaatgggaatagagaatgaaatctattttttgtttgtgaaagatacgaaaaaaaaggaaaaacgatgatatagatattggctctctacagcccccccccctagctgtgcccttgtcaggagtcctgaaaaacaggatttaaaaccctgaaacccggtctgggtccacagttagttacaaagaagagatactgtacttatttacaatttgcattatatatatatatatatatatatatatatatatttaaatttaagccagaatccgatgagcaaaaagccatcaaagaattgcacgaatttataaaaacaaagtttgaagctctccaaagacacagacaacaggaatctaacgcaatcaaacataattttattggaacggactatcaaaacgtattgaaaatttaa

SEQ ID NO: 51230 - DNA, 489 bp, Heterodera glycines
atgtgggattgcggattgggatcccgcaaaatcccacaatttccaaaatgtgggattgcggattgggatcccgcaaaatcccacaatttccaaaatgtgggattgcggattgagatcccgcaaaatcccgcgcgggatcccgtcccgcaccgggctataccaatttggtatcatgtgagtgtttttcatgtttaagatctatgattatgaaattgcaaaatgttagaattagaataattgaattttttttctattaatcgctttttaaatacatgcatataaattcgataaattgattgaaacatataataataataatattaataataataattgcgcaaaatttagataaacatattttattttgaccgaaatagccggaagtgtttgccaacacttatttgcctaccggacatttgcggacagacatttgcggacggacatttgcggacggacattcacgaacaatttcgggaaaaaataaaataa

SEQ ID NO: 51231 - DNA, 1136 bp, Heterodera glycines
atgcccgtcctacaaagcgacagggccaaatggcggtacccgggtagcatgcgtgtgctgcctgggtatcggccacaggccggcggagtgctggattttggaagcttggggttcttaatttttttttgtaaaatattttttttctctttgcagtggaatgggccgctgccttcctacagctggagggccagtacatggagcacttcaagcgtgttgcggacagaaaaagcaaaaactgcttcatctgcctgcaggatggccaccccaagggccgctgctcaaacaccaaattggtggccgaatttggaaagttcaaggtttttttttcaaataattttaaataaaataacattattttttttgtagtcgcttaaccacacagtgcagcgccactccgacccaaaaggtcgctggaccgacatggtcaccaccagtgaccagggcagctgcatatcgcatacccagcgcaaatttggtaagcatttcggtataaagagcttaacccttttacccacctatcggtacatttacatgggtacccccgtaaatgtaccgatgggtggggaaaaggggtgaaaactgaaatattaaaacttttttccagttcgcccaaatttgcggatggtctttacagacttcatgttgaacaactgtgaccgggccgctgctgtgcagcgacgctgggacgaactggcagatgtggcccagcgagtgcactccggtgttcagaatgttatttacacggagaaaccgaagaaggaggtaaaatgcttttcaaatttattcacaaaatttaaaaaaaaaaacttttttttttgttaagccaccggttgccggctacgacttcgtgccggcaacaaaggcgcaggaaatgtacaagcgccatggccttgcacaggcactgctttgcatgtacgttttgccatttttttcaattttttttatgattttcaatacaaaatgtacatttacaggggtaccaatgtaaatgtatataatgttcataactttagtggccgaaaaattccactgctctaccagtgcgacgaggcgactggcattgcggcattgcacctgacccaccgccccgtcctccacggccccctggtgcccactggggagccgccgctctcgac

SEQ ID NO: 51232 - DNA, 1991 bp, Heterodera glycines
atgttctttggttctttgatgcggaagagcaaaagatcaacccacggtgggactcgaacccacgaccccagctttccgtgctgtgctctaaccaactgagctacgcaggcatcctctccattgctctcttctctctcctatcttaggaggagaatcactctcttaatctccttcactgccgtcttggcacaaggggagagagtgaccgcatttatcacatccccggcctttgagaagaccggtccccggtctctttgatgagaaagctccagtctttggatggacaacttctctcagagtggggagggggagctgtcggcttgacacaaactccacaccgaatgtgattccatgacaggagcgccaagtgatgttctttggttctttgatgcggaagagcaaaagatcaacccacggtgggactcgaacccacgaccccagctttccgtgctgtgctctaaccaactgagctacgcaggcatcctctccattgctctcttctctctcctatcttaggaggagaatcactctcttaatctccttcactgccgtcttggcacaaggggagagagtgaccgcatttatcacatttattaataataatatttgttttccagatcaaaatgcctatgtccatctactatatgaatgtcgttcacgacatcatagcgtcctagcttgcactcaatgaggacgaaaaaatcgaattcgacgccaagaagaaccacttcaagcgcaaacttgggccgctgagttatggcaaccggatcccgaaggccgaaaaggcccactacaccccggaacagcgcaggaggccgaccgctggttgtccaaccacgcttggctgcccccagcgcccttcaagggcatcctcttcccggccaagagtaagtgctttaaaatttttagtctgggactggaaaaaggctttaagactgtaatttctgtacatttatatgggtacccatttaaatgtacattaagtattgtttttatgtaatgtttgatttttagtctggaactggaaaaagggggcagctgcgtatgctgcgcactggcgagatgagttcattgggtccgataacccggacgtcagggcagctgcaaaggccgctgccgagggcaactttgtcagactcggcaccaacgagtacgtgcgactggacgtgcgcgatctcacgcagttgaacatcgacgatgcgctgggaaacaatgtttgtttgttttcctttcggtctataagaaaatgctttttaagtgtgtgttttgcagatacgtaactatatactataggcacatttatgcgggtacccgcataaatatacctatagtatatagttacgcattttttatattgacaggaagacgtggcggacgtggatttggtaaagccgctgaccgctccgaccttgaagaacgtcaacgccgacacgcgccatgagatcatgggcacgatcgtcaagcgcagccttcgcgcaaaagccatcattgggctgctgcagcgaaaggtaatcggacttgaatttagctttgatctgactttaatttctcattgtcttccaacaggtggtgttgaccaggcatgcactcgaccgcaccaaagccaagtttcgaaagcgcaaaagggagctgaaacgtgaggtcaacactgccattggcaccatccgcgctgccgaagacgacctttttcagcaagtgcaacagctcaaagagatcgctcctaaggctaagctgaagaagctcggtctcgcggacattggcccggagctcagcagcgaaagcgaaggggacgaggaggaagaggatgcggctcacaacaccgagcagcagcagcaggacgatgccaacgacgtcccagacgacctgaccatggacgaaagggccgatgctgctcgccgccgtgaagttctcgactttgagacaccagtctacgctcgggaactgcgggttttttttttggaatgttcttagacccttgtaattatctataa

SEQ ID NO: 51233 - DNA, 651 bp, Heterodera glycines
atgataaatttgataattgtccaatttgtctcaattttcatttccgtcccatcacttttcttgtatgcattggaatgttggtttatttttgaaggacgcaaccagaagtttgaaggcagtttctacaaaattttcttgctctccgccatcatgtaaaataaatttaaattgcatttacaaaaattaatttgccgaaaaagcggcaaactgagagagtataaaattgtttaaaattaatctttctaaattttctcgcataactttttttatttatgaaaagacaaatcgcattttagttaaaaaaatttggtcggaatgaaatatttttcaaaaaatttaaaaaataatttttaataattttgaattgaatttacccaaattttaaatttttgaaaatattaaaaattgtatttaaattttagaatattttcatcaacctccccaacgtattggtcacaatccgtgccgtggcaattacggcactttttgacactttggcatcaatgcctggttggctggcacgtctcattttcgcctcgactttttacaatgtgcttgtggaaaattgcttgacatttcttcttttggcccatcggctgtcagcaattgtcaaaccgttgacatatgaaaaggtcacacatattaattaaa

SEQ ID NO: 51234 - DNA, 1102 bp, Heterodera glycines
atgactaggaagtgttgtgtgacagacgtgcctcccacaaatgaaccattggggttgtccgactccgggtcgccgtccgcgagcgacagcagctactcctcaccaagtgagtttaatgcggggcgggaattttggcgccacaaaaaatttttttttaaggtagtacgacagcggacgtgagttgaatgggggtggggaatggcacaatttcaattgtataatcctaatgaaattgaattttcagattccgaagagagtgcctcggggacgaagaagaaaccaactcgcaagagcgctgctgctggacgttccacgaaacagacgaagtcaggcccaaagagtcgtcactcgcccgccggtcgtggaggaggacgtccccagacgccgcgcatgaagaaacaaccgctgaagaagaagccgccgagtcgcactcctggtcgacgtgtgaagaaaccgtcaacgaagaagtcgcctgctccccgccgtgcaaacacctccaccaagaagcgcggacgtcctgccaagaaagcggaacaagccaaaccatcggacagcggaacagccgccgacagtggccgcgacgacagcggacgtgagttgaatgggggtggggaatggcacaatttcaattgtataatcctaatgaaattgaattttcagattccgaagagtgcctcggggacgaagaagaaaccaactcgcaagagcgctgctgctggacgttccacgaaacagaaggcatcgcgcggaggacgtgcgggcaacaaaaaggcgcaggaagaacgctctgaatcgtcaactgaatcgggctctgatcgcgaggaggatgaagaatgaatgagccagccggagaagaatgctgcttcacgagaccaccgcgataataacactaacccccatttaaaaaaagagaaattgtatctctatgtatgtatgtatatattgtatgtccatatccctgtggcattatcttgctgaatgtaattctcccacaaatggttgttgttctatttaaatatgccatatatatgtgtatttttaataattgtaatatgtttgccctgtttatgcatgttttatggtcatttattctcattgctga

SEQ ID NO: 51235 - DNA, 76 bp, Heterodera glycines
aattactggagttagcatcatagcagtgcttttccttgtctttttgatgccctcgcaaaatctggttcgcttctga

SEQ ID NO: 51236 - DNA, 700 bp, Heterodera glycines
gttttcggggcagtccccccgaaccgatgcgcccagatttatggggagaccgaatccttcgggaatagcttccctatagcctgtactttaattctgcgttggatttttgctccccataattgtttgagtaccccaaacggacacttgaaaaaatcgatttttttgttttcggggcagtccccccgaaccgatgcgcccagatttatggggaggccgaatccttcgggaatagcttccctatagcctgtactttaattctgctttggatttttgctccccataattgtttgagtaccccaaacggacacttgaaaaaatcgatttttttgttttcggggcagtccccccgaaccgatgcgcccagatttatggggagaccgaatccttcgggaatagcttccctatagcctgtactttaattctgcgttggatttttgctccccataattgtttgagtaccccaaacggacacttgaaaaaatcgattttttgttttcggggcattccccccgaaccgatgcgcccagatttatggggagaccgaatccctcgggaatagcttccctatagcctgtactttaattctgcgttggatttttgctccccataaatgtttgagtaccccaaacggacacttgaaaaaatcgatttttttgtttcataaatatttttttcagaaagtgctctaaagtgcaccaaa

SEQ ID NO: 51237 - DNA, 419 bp, Heterodera glycines
ggttcgatgaaactttttaaaatataagcctaaactttttggcctgtttaaaaaggaattaaaaatttttaaaatatttattcatctccctttttgatagtgaaagcatcagagagccttatttaacttttaattaacatttggtgcgtttcagagcacgttctaaaaaatatttatgaattaattttgcaaaataataaataattaatgaaaaagtcagaatttcgaaaaattttaaaaacaacaagcgttggcattttttcaggttaagttagtcctttacaatggagaaggcctgcaaaatttggagagattatatcgattttagtgcgctaggttcgatgaaactttttaaaatataagcctaaactttttggcctgtttaaaaaggaattaaaaatttttaaaatatttattca

SEQ ID NO: 51238 - DNA, 782 bp, Heterodera glycines
atgccggcgggaccggaaggggcggaggccagcgccaaaccaacgggacagagcgcagcacctggtggaacttcagcagctggtggaacttccgcggtgggacagcagccagccgaagcctccaagaaatcattggctccagcggggaccgcatcggcgggtgagaggagagggacgggcgggcggggaagcgtttttggttcaccctaacattttcctcattttcagtgccctcagcgtatgcggcgcccggcacggggacggctatgagcacgacatcgcagaagtcagccgccggaggagccatgtcgcagaagtcagcagcgcctgctggaggagcctcggcactgagcaccgcgtcgcagaagtcagccgccggaggagccatgtcgcagaagtcagcagcgcctgctggaggagcctcggcactgagcaccgcgtcgcagaagtcagccgccggaggagccatgtcgcagaagtcagcagcgcctgctggaggagcctcggcactgagcaccgcgtcgcagaagtcggcagctggaggagccgcgtcgcagaaggcctgaacaaccaccggacagcacaagaacaagacgctctacaacccgcttcaatgatgttcatcaacagtgatcagaaatgattttaaatgatcccatattgttcccccatatatgcctaatgtgctctattgcctgtgatcacttgtcattgtgttgtgtgattaagaatgggggtatgagtgaaaaatttgttatgaaaattagagtcaaaggaaaaaa

SEQ ID NO: 51239 - DNA, 1794 bp, Heterodera glycines
  unsure (1)..(1794): unsure at all n locations
atgaactcatcaatttacattccaaatgatgtgctttttgatgtgttcaaattgtgtgatcgttttagtatcaatgaacgctttgaatttgtcaatggtaatgataatgattcaattaattagtctcttatttgttagctcattggagtgcttttgttgccgcaaatgaagccaatcattttccaaaatttaaaatgggcaaattgtggatttgcccgttgttctgttcacttcaatattcactcagggcacatgaagaaacaaccaatggagaagtaattaattttaatataccctaatgaataattaaggttgtttaattcttaattatttgtgtttagatttttgcgaattgcacagacaaatgcttgtcattttactcaaattttataagcgatgaatggccggcacagcgaataccattttgcatttacattcaagttataatttccaataatttttaattaattaatattaattttatagcgatttgctaatgatggcacaactttgaaaaaaattacactgaataattgcgtgtggaaggcaagttaattaattaattagttgttttttaattagcaaaacaaacattttccgattgaacggccgcaaagtgcgcatttcttttggcatttcaaggacctgtgctttggcaaaatgacaattgacattttcaatgacaaagcattgactttgtttttaattgattgcccaatattcaaggcaatttaaatgataaattaaaaataaatatttaaattaattaagccccacgccgaacacttcaaaattcgcacttccaccgaaccatgggcatttaagcgagtggttgagctgatgaagcaaaaaatcactttagaaattgacaaaaattatttaattgaaatgcgacaaaatgggcaccaatttgaaaaattgtatgaaattgacaattcagtgattgaattcattctgacgggacgacaattttgttcaaaaattgttgttgaggcacatcaattcgcattactttttgaagtgagtggtaaaaaatggaaaataaattattgaggaatgagacgaataattaccaaaagtcgactcttttccaaaaaaatttctaattactgtntaatagtttttatttgattttattttatttttgtaaataaggttgacttttaattaaaaacatttgtaaaatgctttgatctaaaattgactaaggttttaataaaaccgataatgttatttaaatgtttaccaagacttgagactctctcgaggcttaagcctcactaaataatttgctaattttgggagatttatttttcaaagattttcaaaaattttcagctaattgagaaatacaaaagcgcatcaatctttttgcatcatgcaattccaattgtccgcttatttgtgccttctttcgcttggcattgtcggcaatttgttgagggcacactttgtcaggtggaggaaacggtctacgtcagttgggctcgcacggttgggcgccagcatgtttttccactataactttctacaacttttttctttgtcatccaaatcttgatatcattctaaagcttaatgtatttaaaaactttttctaagctattgctttgcgattagacaaataccaaaaaaagttatacatgaaaattgcgaaaaactcgaaattttgaagttttttcttaataaaaatttttccaggcttaaaaatctcttctctttttgtaagactaatagagcatgttaaatagctttcgaatgataccaagattgttggattagataacaaataaa

SEQ ID NO: 51240 - DNA, 88 bp, Heterodera glycines
gtagtcattttcaagttttgttattttttcgttgaaaacacactgataaatatgttatggtgttaattttaatcatttttcgaaaaaa

SEQ ID NO: 51241 - DNA, 796 bp, Heterodera glycines
tttagggcttttaattgctaaaatgtgtaaaaaaagttttaataaattgctaaattcacaaaaatgttccttggctcttttcatccgccatttttttcgtttcccaacaaaattttgtcaaaaaatttctgaccaattcatgcaaaatgccatcactgctgaagcactgtcatcattggcatcgccggtgcattgttttagcactccgatggcattgacattcattgaccatttgaggaatgaaaagcagcaaaagtaatagaataaattaacaaaataaaagtttatatgattaaagtaattaagactaattaggactgattggcacttttcccttttcagcattgttttcgtcgatgcattcacttggcttcggtggcattttcaatgcgaccgtccctatgagctttcttttacgtcttctattaattcctccgatggaattgtaattaattatttttatttattttttctatttttaaaatttcccctcagattgatcagttctctcgcatttgctttgtccgtccttttccttttgctttgctaaattttcgatttgcaattctttcgccctttactgcttttaatctgtttggaatctcaacaattggaaatgaattcacaaatgtttttctcgttgtcagttttatttattattttatttctttttaatttctttttttagaatgcaatttgcgttgagtcatcgcctaaatttgcgccctcttttcatgtcaaattaattgaccaacacattaactcatttccttttgagtgtccattggagcctgaa

SEQ ID NO: 51242 - DNA, 48 bp, Heterodera glycines
atggaaaatgtacaacaattaaacaattttcttggagcaagataccag

SEQ ID NO: 51243 - DNA, 775 bp, Heterodera glycines
atgttcccttgtaagtaaaaatcgtaattacgctcaaaaagcttctcaaacaattttagcgcttccaattccttctacaatcgcctttatacatcccattatgagcgctaaaattatcagagtgccgaaaatcgcatgtgatctaagcctagcaaaaaatggtgtaagtaaaaatcgtaattacgctcaaaaagcttctcaaacaattttagcgcttccaattccttctacaatcgcctttatacatcccattatgaacgctaaaattatcagagtgccgaaaatcgcatgtgatctaagcctagcaaaaaatggtgtaagtaaaaatcgtaattacgctcaaaaagctcctcaaacaattttagcgcttccaattccttctacaatcgcctttatacatcccattatgaacgctaaaattatcagagtgccgaaaatcgcatgtgatctaagcctagcaaaaaatggtgtaagtaaaaatcgtaattacgctcaaaaagctcctcaaacaattttagcgcttccaattccttctacaatcgcctttatacatcccattatgagcgctaaaattatcagagtgccgaaaatcgcatgtgatctaagcctagcaaaaaatggtgtaagtaaaaatcgtaattacgctcaaaaagctcctcaaacaattttagcgcttccaattccttctacaatcgcctttatacatcccattatgaacgctaaaattatcagagtgccgaaaatcgcatgtgatctaagcctagcaaaaaatggt

SEQ ID NO: 51244 - DNA, 457 bp, Heterodera glycines
atgaaaaaggacaacaaacgtgaaacttttggaggacatgagtcgaacagagagcgcaatccacatggccgagtagtaagtgatcatctgcgcaacgcgagctcgccgttccgtgatcaccatctccacgttgggctgtgtcctgttgcttacctggtgggaaaattaaaaatggaggcatttaagacagcaattaaggcattaattgccgtttccagccctggcatgccatgcctaccgtgatggacataagttgtggcaccgtgttcatcagctctttgatggtgtgcgcgagacggagacggacgagcagccgactgcgcagcgcaattgcggtcaaattgatggtgaacgaagaattgagcagaggagagttacaactgtgcacttaaaaaattggcaaataacggaccaaggggttcatactgttgaaaatttggtaagcaatgaattaata

SEQ ID NO: 51245 - DNA, 2458 bp, Heterodera glycines
atgcagagaaaattatttaattcaattgttcttcatgacaattcaattcatatggtgaaaactttaaatttacttttttcccaaattgactcgataaacaattttcgttgttttggggagggcaatctgacgattggtactccaatttactgtcgagaacatgactgttttaaaaataattcattcaaacaaatatatggaacaaaattttgcttttacgatccatacgaaaagatttaccttgtgaaatctgacgaagaattaattcaaatcaaagcatggggaactattgaaaaagttttttacttgccaaataatttaaatcaatcatttattgaaaatagacggaataaaagagaagaaaactcttcaatcaatgaagaagcaaccattgagtgtttaaaaggaggcattattattaaagcaataaatgatatacaagaattacaaatttccattgaaaattatacaattataaaaaagaacccccaaaaagaggaaataatttatttacccccaaaacttacatcctttgaatataaacctgtaattaaatttataagtaacccagataaatcaaatgagaaacaaatcacatgtcaatcatctcccgtatgcgaattaattaactgtcgattttgtatggaatatcttaaaagcccacaatgtgtagaccagattcactgggcattaatgcttgtaattataatgataattttatatgttatttcattaagcctccaaattattcgaatactcacacgttttatccattggattttacaatttatttttaattgttttaaaagaaaacccaaagtaaatcgaattagaatttcaagaccaaagttaaaaagaccattgatttatttaatcacttccagtttaattttattcaaaatgatttttgcttgtgatgaagtgacaaatttagtcgctggaacaaatgactgtgctgtaactcaagaaggaaaaattgaatgttcttatgaccaaacaacccaactctctattacacctgaacacctaacctgcctaaaactcgacaatacaaaaactaacaccactatggaaacactacaaattacaatagaaactttaacaataatttgcaccgaaaaatctgattattttacgagaggttacgaattatcttcgacatcacaaaaaagatgctcaggcgctgggaaatgtaccggccaaacttgtcaatcagtaaaaatgtcagaccggaatcccgaagtgaatgatcacgctaataatcaaccaggttattcatactgtgtaccatcgtgcggaggatggcattgtcaatgtttcctcgcaactgatggatgtctattttacagaacttatgccgaatcagttggtgacgaaattttcgaagttgttaactgtccatcttggaccattcaagcgagaattaaattgtctatcaatccagaattaacctattctgttaacttgaaacccggaattttaacacacattggtgacgagtctaatagttctatatctgtcacactgacttcgacttcaattccaccgacgccgttatttggttcgacatttattatagttcgcgaagaattaaaagcagcaatagttgcgaacgaaaatttactcaaaaatatattacggtgtaaaaacaaagaagaagcgcaaagttttagttgcacttttccaccagaagcatgtcaatgccacggaggtgattccgttgtacattgtgaatgcgaaaaaagtccacttaccgaaatatttgctaggcaagagaaccttttacccattaaaacacagggaagttacgtatacttcgattcccaaattaaagctaaaatacagcaaacaacttctcttcaaatgcaagtcacacttaaaggacataaggttaaagctatttatgataaaaatatttgtaatattgttacaatatcattggaaggatgttattcctgtactagtggtgctaattggactctatcatgcaaaacaaattttggtaccgcattagccaatgtggaatgtccaagtcaaaaggtccaagtgaattgtgataaagaaggaaaagaacaacaaatccaacttgcatataataagcaaaatattacagaaaattgtgaagttatatgtcccgatggcaagtctgaaattactttaaaagctaatttggaatacatatcacaacaagatactaaaattattcccgctaacaatactaatgaaaaccccatcatcggaacttccttggaccaagtaattgatataataaattttgtttacactcttattaaaactaattttttcaccatatttattattatcatattcatacttattctattttttctaattccatgtctactacctattatatatagaattatgtgtgcttgccttcctcgttcgcgtgggagtgtcgcgacagcgcgaaatcctaaaataaagaagggaaaaa

SEQ ID NO: 51246 - DNA, 650 bp, Heterodera glycines
caatacgatggacgtgctcagaacggtgcgcgaggagggcatcagacagcccattacggtgatgtaccaacgcgcggtgcgtttttgaaaagaaatttagaaatgtcaaaggcaattagagcaaatgagagaattcccctgccattaattaattaattaaggattacatgttaaatatcgttggtggccaagatgaagcagagccaaactacgaaattaaacaggcaaagaaggaaataataaaatttttaatgaataattcatagttggaagtgaactgcggttcggttgccggcacaagtttggaccgacggacagctcagcttaaccatgtgatgctgcaaagggccggttttcagccggcccccgaagatttgcctgaaaattggccagacaaagcgcaaatcgaatcaatcaaaatggcatggtgagaaagtgaatataaaaaattatatttgaaattgaatcaaattaattattttccatttgtatagggaagcctataacaaatccgatgcaattgtggtgattttgatcaacgaaatctcggagactattttcgatgcaaatttcttcgagactgagttggaccgactctcaaatggacgcattaaagtcgaacggattacattgaatgattgtgtacacag

SEQ ID NO: 51247 - DNA, 448 bp, Heterodera glycines
atggttcatccaaacactagaccgaaaattaacgaaatggtcagcgagttggccgtgtacggagttctcattggcaacatgaccactggagcggtgagtttattcggaaaaagagtgcttaatccattaaagtgtccgaggcttttaattattattagtaaaatgattatttattcaatcaaataaaagtgccgttgttttgcaggtgtcgcacaatgtgcagcagggccacctgctgaagaccaaattggccactgccaacgaaggcggcatttccacggggtcggcggtgcacgactctccaattctgttctgagcaatggcaaattgaagaagaaaaacaaacatttgcgattttcgaattacatatatagaataggctattattttgtttggttttcaatgaatttatccatttgcattttgctatattttgggaaaaagtgaa

SEQ ID NO: 51248 - DNA, 221 bp, Heterodera glycines
atgcccaaggcactaattaatcaactagtgagagactaatgagaaagaaaaagggcaatttgatgattttagggggagggagaggggcatggattgggaaaagattgacggagagattataatgaaaaaatgaattttacagcataatggtgaaatggaagaaaaacaaacgcccaagagaaaagcgacgtgggaaaagggcaattaaataggaaaataaa

SEQ ID NO: 51249 - DNA, 1166 bp, Heterodera glycines
atgcgccgtcgtccgtttctttcgcttttcattttattcctttctctgcgctttacgccaattttggcacacactgacaatgaaaatgccgaagaagcagagaacagcaacaaagttgagcccgaaaggccaaaaagtgacgtagaaggggaaatatccaaagacccctcaggcggtaaatttaaatcaaaattatttatttatttgaaaatgattaaattggtaggttttggcactgacattgagtgggtgccgtgggatcaagcagtttcggtggcgcttgacttgaatcggccaatttttctgctcattcacaaaacgtggtgcggtgcatgcgatggtaaaaattataattaaactttgccctaaaaccaattttaatttactgtttcaataaaaagttggcacttttctctgccaatccaacaaattgatcaaattgatcactttgcgaatggtcctttgatcactgatcatttattattttatttaaaattcgcgtcacttcactctgatcattaaaatgccgaaaagcgaaacgattgtttggttttgttcagcgctcaaaaagagttttgccacctctccaaaacggaaggaactgttggagctgagcaagcagttcgtgatggtgaacacggaggacgaggaggagccggaggaggaggagtacgcgccggacggacggtacatcccgagactgttcattctgagtgagtggaaaatgtgccgttgctgaaccactggcggttgattagggcactttgtcggtttcgggactcgaaaagaaacggcactctcgagacaaaaaaagagctaatgcaagctcaactaatcaattttttttttatttagcccctctccaattgattttaattttaattaaaattatattgaatttagataaacatggcaaacgccttccggtggataataagaagaactatccgagtaacgtggcctacttcccgcagggtaattattttgttagtctaaacatttgtaagcattcgactaattaagtgccggatgtgatcagagcgatgaaagagggcacggaagagtttgagaaggagcagaaggggacagagagaacggaagagggagagagtgtggagggaaaagagaaaagggagaaggaggaggagggaaaaaagaaaaagaaa

SEQ ID NO: 51250 - DNA, 578 bp, Heterodera glycines
atgaaccgacggtaaaagaattttaatagtcacacaaattcatcatttatttaactaaactgtttttccataatttcagttggatttgcaacgacgtttggatggacattttcccctcttttgaccgtcctcaactcggcctcaaattggcacttctttcgccacgttttgatgcgcttgtggacaaacatttcaatggcaaaagcgaattgacaatttggagaccaatcgaaattagcaaggacattggaacaaaaccgaaactttatgtacaaattggtgacaaatttgtggaatttccattgcccgaccgtccgttgcccagcaaaattcgctttgattctattcagattgagtacttaaaaagcagagctatgacaataaaagcatttatttcattttcagttacattgatcactccgtcatcgcttttcttcgttcaaatcatcaaattttcgacaaaagaggcatcaatttatatttgtggcttccttcacataccacgaatggccaaccaatttgggacatttttgttcgtgaaatttggcccatttttgcgccaaacattggtcatttga

SEQ ID NO: 51251 - DNA, 3489 bp, Heterodera glycines
atggaatggcccgcgttttggcagagttttgagagtgccgtcgaccgtgccgcccttgagcccgtcgacaagctcaactatctccacggttgcttacgcggaaaggctgctcgtgccgtaaccgcctaccgtggaggggacaattatgcccatgccgttgccgcactcaggcgactcttcggagatccacggaaaattgccgaagcacttcagtccgaactgatcaatctccggcctgtggacgatagcgttggatcactgcaacacttcctcgagactttggagcgtgtgtgccgccaacttttgaacctcaacatgccggatgacagcccattcatgtaccaaatcatccgcagcaaattgccgtcgactgttctgtccgaactcatcaaaatggaacgtgcagcaggcattccatggggtactcctcagctcagagctggacttgccgaagttctcggagtcagagaagaggtcgaacgatgcctgcgcgaagccaatgccgacagacaaacacgatttcggcacgaagcaaggccaaatcgacctcagcgaccagaacggcatgaaaatgcgcgagttttttccgtcgctcagtccgtcagaaattctgatgacaagcgagttccgtcctgcctgttctgccctggccggcattgggcctcggagtgtaacaaagtgacagatgcagagactcgaaaacgttgccttttgcagcagaaccggtgcctcaattgcctacggaagggtcaccaattaagggagtgccggtcaaagcaagtatgccgagtgtgcaaagaacggcatcattctgcaatctgccctagtgccaaagggacatcttctgcccgttcaaagcaacagaagccctcgcccaggaacaaacagagtttcggaaacgagcgcaactcaaggccattggtgtcatccgcggttgccaatgaggctgactcaatcactgagccgaaaactgttaacacaatcatggcaattgtctccccatccgttcctcatctcgtcatgctcatggccctccgagctcctgtgttctcagaatccgcaccgaacaagcgccgtgacgcactcttcttctttgaccctggtgcgcaagtcactatggtcaagacgccactgataaggcaactgagccttccgaaactacaagacgatcagctagaggtgaatcctttccacacgcggcaacccatcaagatgaaagcgccgcaacacgttttgtgcgtccaacgagaggacggcggatacgaaactctggttgcccatcggacggactggatagtgccatcagtgcgccgtgccacattcctccagggaatgttagtgcctgtggatgaagaaccggacattctcgttggaatggcagacttttggaagtttttcaacggtgtccaacgagtctctccgcaacttttcaaagtcaaaacttcgatcggttccactgtctgcggacgcgatgaaattccatcccgcccaactgccgaccatccactgtccgttatgcccgtcactgtccatgttcctgccaatgaagacgagatgcccaatacggctgtcagcggaattcagagaaacgaatccatctctgatcttgactcgctacgacaattctgggaccttcaaaacattggcatcagagatgatccactcgaaaacgatgacgagacggcacaacaaatcttcgaccagacgactacgcgcctggcaaacggaagatacagcgtgggatggccatggaagaattttccgccggacctgccctcaaattttgccatggcccatcgccgattgtcttcaattctcaaccgtcttcaacattttcccgaacttcttgccaagtacgaagccacaatccaggaacagcttcgactggggctcatcgaaccagccgttcgtactcgaggactcgagcatttcctgccgcatcattgtgttgtcacacacaaattccgtcaagtccttgacgcttctgcccatccaaaggggcaaaactctctgaacaagtgcatgttcagagggcccgtaattatgccggaactcgctgggattctcatgcgcttccgcttggctggcattgcgctgtggggtgacttggaaaaggccttcaattcactcagcttgctggagcgcgaccgcgaattctgcaaagtgctctgggttaacgacgtccgtaaaccaccgttgccggataacgtggtcatctaccgatggtcaagggtgccattcggagtcattgcctcgccctttttgctggcagccaccatccagaagcacctgaagcaggacgggtccccattggccattgaaatggctgaaaatgcctacgtcgacaacctgctcatgcaatgcacttcaccctcagaagcgctgaacaaatacatgagcagcaagactctgttccgcgcctgtcaaatgaacattcgcgaattcatctgtaactcagacgaagtcatgtgccgaattccgaaggaagaccaactcgtgaaagaagtgcccaaagtgctcggccttcactgggagttgaggccggacaagctttacatcgactttccgcccatggacaccgaaagtcgttgcgttactcgtcgaactgttctccaacagctcgcctccgtttttgaccctctcggactagtgtgcccggcacttcacgatgccaaaatgtttttccaatcactttgggaaaccaagcttgactgggatgatcctctttcgactgacaaagtgcaagaatggaacacaattgccacgacttggaaccagcaaaaggtccgtgtcccgcgccgagtcatcccgttggaagtggcctctcatcagctacatgcctttgtcgatgcaagcaaagatgcctacggagcatgcatcttcattcgggcacaacatgaaatcacaatcacggcccatctcatttttgccaagagccgagtgaagccaaaggggtcaaatctcactattccgcgcatggagctcatgggaatgctgattggcattcggatgcttcaatttgcagagaaacagctcggacttgccgttcgccacaaattcatttggtgtgactccaaaccagtccttggttgggtgtcgtcttccgagcagcaacctcgttttgtggagaatcggctaaaggagatccgtgccgtcgaccaagtttgctttcgctacatatcgacagagcaaaacccagccgatgtcgcctcacgcggatgtactgtgcttgaactcacctcccatccactctggtggaacggcccaagttggcttatccatcccgaggatcgttggcccatcaccatcgaagtcaagcctgccaatgatgacgtccaaaccattgctgagatcgctgccatcgtccccattgtccaaaaggtcgaagcatggatttgcgccgacagattcagcgactgcacttgccttcggaacgtggtggttcttctcctccgtgcccttcgtcgatggctctcaatgtctcgctag

SEQ ID NO: 51252 - DNA, 631 bp, Heterodera glycines
gcaggttgtcgacgtaggcattttcagccatttcaatggccaatggggacccgtcctgcttcaggtgcttctggatggtggctgccagcaaaaagggcgaggcaatgactccgaatggcacccttgaccatcggtagatgaccacgttatccggcaacggtggtttacggacgtcgttaacccagagcactttgcagaattcgcggtcgcgctccagcaagctgagtgaattgaaggccttttccaagtcaccccacagcgcaatgccagccaagcggaagcgcatgagaatcccagcgagttccggcataattacgggccctctgaacatgcacttgttcagagagttttgcccctttggatgggcagaagcgtcaaggacttgacggaatttgtgtgtgacaacacaatgatgcggcaggaaatgctcgagtcctcgagtacgaacggctggttcgatgagccccagtcgaagctgttcctggattgtggcttcgtacttggcaagaagttcgggaaaatgttgaagacggttgagaattgaagacaatcggcgatgggccatggcaaaatttgagggcaggtccggcggaaaattcttccatggccatcccacgctgtatcttccgtt

SEQ ID NO: 51253 - DNA, 549 bp, Heterodera glycines
atgtcttcagctcgatgccggatggctttggggcccgcgctgttccgacttcggcaacatgtcactacggccgaaaatttgctggacgagcccgtgatcaatgccgagacgaccgaaaaccttgaacaggaacgggggcacatcacccgtatcctgtcaaggatggaggtcgagctggacgcgtggggtgccatcatgaacggactgcaaggcccagcgagagaggcggaggaagcgcttttcactgcctttattcgagatgaccggcacttgacggagtggttggaagatgcgcgagaaatgctggctcacatagcagcggaactcgcagatgagcccaaccagccaatcgcggcgggaagacagcaaccagctgttgctgtgaatccacccgtgccagccgtgccattcgtcaacaatgccgcatttctcggcggtgccaatgttcaacagccagctgctgttgccaaccatgccaatcagccacgattggtgccaaataacaaatcgtgccaaacttgccggctgttgctgcgcctgcgcctttag

SEQ ID NO: 51254 - DNA, 235 bp, Heterodera glycines
atggagaaggcctgcaaaatttggagagattatatcgattttagtgcgctaggttcgatgaaactttttaaaatataagcctaaactttttggcctgtttaaaaagggattaaaaatttttaaaaattttattcatctcccttttgatagaaaaagcatcagagagccttatttaacttttaattaacatttggtgcgtttcagagcactttctgaaaaaatacttatgaataaa

SEQ ID NO: 51255 - DNA, 460 bp, Heterodera glycines
atggccgtcctcgtcataattctgtactttgtctgttccggacagtgcagctattcgtccggcgaaaagtatgccgacatagacggggacatcgaagcgggcacagcccacggcccacactggcccagcgaaatccgtgtcaaattccgttacggaagcaaagacagggacctggaggaaaatcggaaaacggaccacgtttatatcgtagtcggaaaatacggtagggggaggttcggttaactctattagtgagcggaagttaagtttttttccgattaggataaaattcggtaattaattctaccgatttttcatacctgtcagaaaatccgagaaatgatagatattatgccaaaatatattttcctttttttcgttattcaaaagtttctaatttttagaatacgaccacacaacaggtggagctcgagctcgaaacaagtgcgatttgaaataa

SEQ ID NO: 51256 - DNA, 639 bp, Heterodera glycines
atggctaatggtaaatggtccaatggaagtttggactcatttcgtctgtgcctcgactttgcctaccaatttgtgtgcctgttgagaaatggggagtaagtaaaataaataaataaagaaatcggtatttacgaggccccaaatatgccagaattccttaaaaattattcaaaagggatgctatgtcgtttcgtaaaatcctccattttaactatttttggacaaaacatggcattactttgcaaaaaaacaatcaaatttcaaattcttggtatcattcgatagccaagctttttctctataagtttgcaaaatttaaaaaaatttggtcaatattagaaaaagttgtttgaaaataagtactatttctgccataacttatgttaactttgataatttgctatgcaaaatttggttacttttagcaaagttatgacatgttttgtcgaaaaaatcgccaaaatggcggattttacgaaatgacccagcacgcagaaaaggcaaaactagcagccatggcattaagaaccatatttttgccgatctatcaaaattgaaaagaaagcgattgcatttttattttttgctatgaattgccattttgcacaaaacaaaatcaatgttattgttttgtaaaaa

SEQ ID NO: 51257 - DNA, 138 bp, Heterodera glycines
atggctgaccatggcggaggtggacgtacccgtggagtttggcaggttattttgaggatgaatggtcataatcagtgatggatatgattgattgatcatttgttgaattttcagagccattttaagattcttttataa

SEQ ID NO: 51258 - DNA, 99 bp, Heterodera glycines
atcacaggttgtgaagaatcggctccctccgatgcgggtgccctcggggtggacgcacttcgtctttggtgcgcttggctcgcctccgaatcctcgggc

SEQ ID NO: 51259 - DNA, 1496 bp, Heterodera glycines
atgaatttatttcttaccccagcaatttttctttttttattttatttcgtttttatttcaaatgtaaaatcattggtaagttttgattttttatttagccaaacattctatgtaaatttctcatttccaaaagtataaggatatcaaatttttgaccaaattttataccattttttccaatttttaattcccctttttaagccatttttaattaagatgggtgggccaacgtaaataattgacggtttttaagaaaaaatcaatgtaattgagttgatttggtccgccgaaaacagacctttttcaatgacacacttaaaccaaaacgactaaccgcattaaaagttaatggttttaataattttataattgaaacatttttaatccttcaacttttgttttaaaaaatttgagaggttttaaaatcactgaccgaaaaaattaaatttattttcattaattaccattcaattttgtagcagactgtacaacaactcgaagatgaagcaatggttgcatttgcaaagggtcggacgttttttgatgaattttgtgcgactcaatggttgaccattgaccgttacaatgacaatttggcacaaaaatatgaaacatttcttggcgttttgtacttcattaaaacaaattggcaatgcgagaaagtcgttgacaaattggtgaaggaagaggtaatggaggccaattaattaacactttgttaattggcgctggaatttgtaatttcagcgacaacaattttattcttcggaccattttataattttattccaattaatgcatttcttaaaaactatattaaaagataagatttactgtaaagtaattagctcttttgtttattaagaccaacagtgatgatgatgtgaatgacgtgaaggaatgtggtatttaccgtaagcatgtgatcatactgtacgaatatttgtttcgggaatacgctcgacaaagtgtaaaaggttttgaaatgatcatttctcttaaatactgattaaaaataatcaatgatttcgcaatcttacttttaagcagctgatcccgacttggcggaacaaattcccattgtggagcagccgatcgtaaaatttgcctaccatgaacggggatggggcgtactgtaccgaaatgcgggcactctgattgaccttatgcaaagtctgtgtcaaatttggcgcttcttctttgatcagtcgtatcggagaacattcaaaagcagaagcgtttgttggcttgcctatcatcgaattcaaaaaccgagttttgttaatcaagaatcactggtgaagaaatatggcgttgaattggacaaattgaatcggacagaatttttgtacaacaccaaaaatttgaaaataagtgccaattcaaattttgacaattcgtatctccgtcaccgtaaaatttttgatgaaaacatggcgaaatttttggaaaaagtggaaacaaatcacaaacagagtttgacagaatcgaagggc

SEQ ID NO: 51260 - DNA, 442 bp, Heterodera glycines
atggacattcgacggcattttatgtgccaaaaattgttttgtttgccccttttaatgataatcacttcattttgtacacggtcatcaaatgctgaacttagtcaaaacaacaaaaaattgtcctggattattggtaagattttgcgtgttgtgatggggggggggctatagaaaattttcaaaaaatcttagaaaatttttttaaagaaaaatttagaaaaatcttttttcaaaattttattatgaactactaattttttcaaaaatcactgaaaaatgtttcaaaatttttttgaattttcttacaaaaattttctattttttttttgaaagtttcaattgaatttttttttattagttaaggggataggttaatatttttataaagtacatttttaggttataatttaacataatatggttttactcagggattggtcta

SEQ ID NO: 51261 - DNA, 1504 bp, Heterodera glycines
atgattttgggccataagcctccgttgatgaacatgctggaccagcttgaccagcccgtcttcactatatggtcggactggtgagcaaaaattatgatgcaacaaatttaaagattttctatttttcaattacataattgacgatctcttttcacggcacttttggttttggatttatttctcttttaataattgttttgtttaaaaatttgaatattgcacattgaaaaataattttatttatttaaataatttttggcactgaaatggtcggaaaccaaccagcgcagttcgaaaaaataacaaaaaattgcaaaacatttcttaaggcgtcgtcctgctgaactgggcggctccggtggcttcatgacaattggtggtccggacaatgaccactgttctggaccatggcataatgttccacttatatctcgatggaacagctggacatttcgagtggatgggtgagaatccaaattgatttacccgggtggagaccaaaagatatatgatgaccgattaagacaggggagtgggcaggtgtcttgggaccaaaatttggtaataggtattgtggttggtccgccctttttggcaaaaaaataaagaataaacgcattccggattctcgtgattagcgatctcgaaaattcctcaaaaatttttttttggaaatctttcaggttccagatcggcaaatatcgttcatatcgtgactatactgctgcggtggacacgggcacggcgctgatcggtggaccagttcatctgatggaaatgatcagtgagtgggttctgctggcaaacacgataatcagaagagacgagaaagtttagtaaagagagagagagaggagagagagagagaggagagagagctccgggcactaattctagctcgggatttcgtactaggataacttgtactgtgctgagccgttataaaaaaaaagccatcaaatgaagcttttaagcacccaaaaatcccatcgccccaatggaattttttaataaaattcaatttttaatccttttgagttgctgccacaaatgctgattactgcgaggaggacaacctgtacactgttccatgtgaccaacgacccaaattggcctcaattgtgctgaaagttaatgggaaagacattgtggtgccagcggaggaatatataattgatgtgtgtgtgaaatttgattttaaataaccaattttaatgaattaattaatcaatagttgaatctgccggatggaaaatgtgcccttgggctgtttggccaatatggcgtcggattcacgacggtaaaacatttagaattttctttggcacttccactttggcattttcaccccaatctgtgctgattgagctgttgattcattcaattccaggattgggactggtctataaaacttttcggccctttcactttggcatttttgcgtaaatctgtgctcattgtgccattgttaactcatttattcccaggattggctgatccctga

SEQ ID NO: 51262 - DNA, 832 bp, Heterodera glycines
atggcgtcgaatagtccttacattatcagtgatttagcgcagcagctgcaagtggcgcttgacacctgctaccccttcttttgggtaattgactgccgatgcacagaccaaaattgtcactatgccaaggattgggaatatgaaaagcattgctttaacgccaggtctgtgctgggcgggcactgttgcactgctctgaaaatttggtttttatggtgcaaaaattgtgtttaatagcaatttttttgaacaaattttcaaaagttttttttagaacataattaagcgacaaattatttgcgttcgcctattaaaactcaaataatttttttaggttttccgaaatttccaacttctgatttccaagaacattttttgagtcggaattccgctttatgaaattttggggccttgaaacgttatctctaatagagaaaaacaatggcaattgttttaaaagtatgactatcgtatgaatttatatttatctaaaaatgcgaaaatgccgaaatatttaataatacgaaaaaacccgaaatgttgacacccaaatttaaaaaaaaaaaattttgcccatttatgcaacatatttttcatcgaaaaaactattattaaattcaagcaaatcgacaagccttcatgggagtggagacaaattaaccataccatgtcataattgtatggatgacatagaagcagcaggtgatgggcatcgagtcgagaaaagtctcattaaataagaaaaaacaaaacaattttgataataataattagggcttgaaattttcatgtaaatattctttgaatagttggaaattttgttccgaataaa

SEQ ID NO: 51263 - DNA, 1104 bp, Heterodera glycines
atgagcagtgcaccacaacaccatgcttcatcgcatgaacaacatcaaccacatgccaacggcagcatttttcaaagtacacgcgaataaataatttgtaaaaaattattcgacataatgccaagccaaaactggacaaaaaaacattttatcttattttttattccgcaatctcggctctcgggattatttaccggtctcgatcagtagaaattttcgaaaagctctgtttgtttagacccaacgccattcctggactccgcttcactgctggtgtttgccggtgctcttctgttaccgtaggattgagatcaaacaaaattattgattaaataccttaaaactgattaaaataaattaattaaaattgcttttacattcaaacaatcaccacagttctctcttctacatggccgtcttaattttggtctgttgtcagtgccctgagcgacaacgccaacggcaccaacaacgtgaacaacaacaacggcaaaaacgacgattgaccgggtcggccggtaataaaaatggaattcaaaaatttcggggcggattttcaagatcccgtcccgtaattcctgtctcaacataaaaggggcatcatgtgtcagcaaatttttaattaccgtattcccgaaaacagggcccctcagggtgctttattttttaacccccctcggtcctctaatttagtggctgatttacatgatcccgtcccgtaattccggtctcgataaaaggagtcatatgtcagcgaacttttaattaccgtatttcttaaaatatagccagctcggggtggtttatttttcaaccccctaggtccattaattttgggggtttccttttttttaggaaatgcggtattaaatatttttttaatttagtggaaatagttgaatctaaagcaacgacaatttcgacatcttctgcctcctcaaatgtggatgttgaacttcaagcaaatgaacaacaaatggggaaagaaattgctgagcataaattttaaagaaaaatttaaaaattgaaactgccttattttttttaataatgctaatattaattaaagcggttatttttcaacgaaatatttaattcatttta

SEQ ID NO: 51264 - DNA, 205 bp, Heterodera glycines
atgtgcccgccggcgacaaatcggacaacggacactgatcacatcaaagtggcggctgctacagtagacgattcgcgcgctaccgtaggcgaggggcttgcggacggtgacgacgacgacgacgcttcgcaactgcgacacgcgtcaacaccgttgctgacgcgctactattttgacgcggtcaccgctcaatgttatccgtttg

SEQ ID NO: 51265 - DNA, 204 bp, Heterodera glycines
atgtcgcaccagaaactgcgaagaaatgctaaaaagaaaggtctacaaacggattcactggaaaatcaggagaatgaggacccaatgccggccaaccaagagaatgtaattgcgaatgacgcttttgatgaggaagaagacttgctgaacatgaaaatcccagcaccgccagagtcatttatgcatagagacggcaatcgaatg

SEQ ID NO: 51266 - DNA, 259 bp, Heterodera glycines
cgatttgtcacttggcttcgttacaacgtttggctgctgctttatccgctcggccttttccttgagggtacattttgaaaacttcactaattatctcaatttatctttgaattctttcagccctcgttttgctcatttccgttccgtttttttactcttccgtcgtttattcactgcaacttccaaatgcgctcaatttcagttacaattttggcgttgtgttggcccttttcagcttcatttgcttccctttcagtgg

SEQ ID NO: 51267 - DNA, 339 bp, Heterodera glycines
atgccggaaattttgaaaacagtaaataatgacaaaaatggcaagcagaaaacgaagcaattatcatcatcaaattacgagaagcaattgcagcaagaatttgcgatattagaaaaaaaacaaatcctcgaggaaaagccattgcgcgaggaattgaaagaccaagctgagcgagtcggtgctgcactgctgtacacgctgatccacatgaaaatgcggctgttgttcgagcgggaaaaggtcaaaaaagaaatcagcatatctaagaaatccgcaaaggccacatctcaaatgtggggattgtttaagcgtgtggaagaagcagtggtgaaaccagtg

SEQ ID NO: 51268 - DNA, 2093 bp, Heterodera glycines
  unsure (1)..(2093): unsure at all n locations
agaaccaatggattaaggtgcatntaaaaaatggtgataaaataaaaattgatattcccgctgggtcataccaaaatgagcaagaattggaaaatgctataaatgagtcgataaaaaatggtataaaacaaccggctacaagagttaaaagacaattggaagatggagtggatttgttttttcattataatccagatgattactgggaaaaaattgaggaagaaaggcaaagatataaagaattgttaaaattgatagtgacaaagtcaagagaacgtgatgatgagacggacacgcataggaagagaaaaatagaggatgaagaaattactcctctccaaaatcaatcgttgactaagaaatcaagaatagaggcgctagaagaagcagcaaggcaaagagatgacgggaaggaggaaaaggaggagagaactggtcaagaatttctcaaaatgtatccagtaaactatagagagaagctaaatgaagttcgattagaattaataagagatttattcaacattcaagaccatatgaaaaaatatcaaggtgtaacagatggtagaagaattcaagaactaaatgaagcagcactaaggatgagaacagcaatgaaacaccgaagaaaaaatttgaatgcttttaataaagcagtgttgaaaaaggatttacgaacaacagctgaagaatatgagaggacgagctatgaacaaaataaggattacgttgaaccgttttttgatagttatccaacagattactgggaacatattcataaaaaatatggaggccttcaagacgattacaaaaaaattcgcaaattaagagagcaacaacaatttttaactgatgaacagaaaaaacagtcaattcaggatgaaattgatcaacttcgtcgacttattgattataggagaaaaagatttgctgcattggaatacgaagctaaaaagagggactcactgcaacaacaaccaatggctttagccttgactcatggtgaagtactaaaggaacgattaggaaaaatagagcgaaccaccacatcacatggggaagagacaaaaactcatggaaaatctttagttgagttgatagaacaggtacagaaagaaagaggtgagaataaggtcgaaaccgagggtaagacacgaggagaaattttaggagataaattaaaagccaaaattgatgaacaagacagtggtgcagatggtgcaaccgatggtgaagcactaaaaaataaaccagaaacaacaattattggtgaaaaaggaatgacaagaggagaaattttaggcgaaaagttaaaatctaaagatgaagaaaagaaagaagaaagaataacccatggcgaagcattgaaaaatagaattgaacaaattcccgaagaagaaaaaacagaaggaaaaacaagaggtgaaatgttaaaagaaaaaattggggctagtaaaccaatagaagaagaaaaaacagaaggaaaaacaagaggcgaaatattaaaagaaaaaattggggctagtaaaccaatagaagaagaaattgaaggagtgaaaacacgtggcgaatcattaaaggatttaattgtttcaaaacaaattgaaacaattttatttaaatatttgaaggagcggcggaaattttcaattgattttaatgaccaaagaattgacttcattgaattgtcagctcaattagggtacattctcgggttcgaagaccctacaaaaattctgattggagctatagcaaagtattattgtgacttaaagggtggtatagacagcctttgtgtgtatattaatggaataactgagaatgtaatagtaggggaccaactcgcttcacttttgcgaattgttgtcgttgaaggaaaatttggagacgtgattgagaagatttataacacaccaatgtacattaaggtggcagtaaaggaaattaatgagattgaaattgaaattaggactagggagggaaggcttattccattccaatggggtacaacattacttgtattagcatttaaaaaatctattgtattttagtatttaaatattcattttcacattatagtatatattaataattga

SEQ ID NO: 51269 - DNA, 532 bp, Heterodera glycines
atgccaatgtttcttcaagttcaaatgcgaaaggtaaagctaatattcaaaaatattcaaattttatattattctcattgttttttagaaattgaaaaattttctacaaatttgtcaaagttaactttatcaaacacgcacaccagtcaattagatgatcaagccatggaagtaaatccaaatattggaagtgttgatccaagaaatgtccaaatgccaatgcaaatgtcaatggaagtgagcaatgagcatgtcaattcagcgaacggtcaaaaattaaattctacggatcaaaattatgttgatcaagcccatccgatgtccgaaggaacaactgacacaaatttgatcagccataaaagtgatcaaattggtccagaaacatcaaacagtcaacaaaaacgggcaaaacagcgaaagcaaagcacaaacaatattcagcggactgaattcataacagaaataaaaggatccttttcattcaaaccaaaagcctcagaagaaccaattgtcaaatatattgagaaacaaa

SEQ ID NO: 51270 - DNA, 133 bp, Heterodera glycines
atgaaaaataggaatttaatatttctatttttaacatcaagaattttaattgaaaactgctgtttagccggcaaacatgccgatgaagcagccaaaacagatatgcgacggcgtcgaaatgagcaaattcaaa

SEQ ID NO: 51271 - DNA, 1867 bp, Heterodera glycines
atgctttataatcaaatcttctggactgctttgtctttatcagttattctgatggcacaaaaggccaatggtggaaataaaaaacgaaagcttattctcacagcggaagcttcatctgaagaaccacctcatattgcatattcagactcagaagatggaataagtatgaatcaaaatatttaattttgaaaaatctaaagtaatcaattttttaagaaatattttacttgagaaaaacgcatataataagtctcaaaattttaaaatatccagtaaaaaataatctggttttgagctattgaattttttgagaaattacctaatctctttaaaaaaatacaaaaaaacgaaaaatgtaacgcttagatttgaagtctcgaaaaataaaaaaataatttattcttcattttcttaaaaatgccaacatagttattttgtaaaagtgcaaattaggcatatttcattgactgtttcgttaaattgctaggtgttaagtaaaattgcctttgtcacctgtttaaaaaaaaactaatttaattttttagatgattaatttaaaaaatcgttattattaattttttgcttgtattctttttcaaaaaaaaaattgttttttaatttgcaaaatttttatagaaaaaatttctaattccacttcattaaaaaagaacctactgtttttgaattttcttttcataaattttttttagtgatcagaaattggtgaaggtatgtgcttttttaagtatttattggacttagatgacaaatcccaatcagaaaattggactctcattttaattcttataatataataaaaataataataagataatttacaaataatacaaaattttagtaaaattatcgcttagccaagcatcagtgtttctgatcaaaatggacaaatttttttctaaatgcgaattaatttctgatgaccattcaaccagaaattgtcttaaagaattaaaaattgtggatttgcgaagcatttttcttcaaaatgccacccaaaatgatcaacagtcggtgcccgatcagcaaaagccatcctcctcaaagcatttagaaagtgatatggataaaaaaatgaccccaagagtagtggattctgatcagttaatgaagttatttattgtaaaaagtatgcaaacattggacaatccgtccaacagtttggagcaacttcggatggtaagcaattttattgaatctcaaattttggcattcaataaaattagataataataataatttgaatttcgatctgggaaatagaaatgattatgcgaaaaatataatgccaacattttcatgagccaacttgatgttaaaattttatagtaatttttatttagaaatttacaaaatttttgaaattcttcgatttgttcccaaatgttttcgcaacaagggcaataaaggaattgacaacagaacagaatttgctaattttacacgaattgatgctgctttcaattgattatgcaaagcaaatttatgaaaaactttatgataaaaataacgaaatgaaattgaaactttacggcgaacaatacccattgctctattttgaattttataaaaatttggaggagaaatttaacacaattagtttagaaatttctaaaattttactcaatcacttcggcagaaagtaatttttttttgactttgaaatttaaaaattaataatgattatttaacagagttgatcccttctccaatattttttctgattttaaaagacaaattaaattgatggatcgagaagaaacaaagcatgaaaaactaaactgtattaattcatttttccataaatcatttttttaagttcctagatgaaaatctgggaccaaataaa

SEQ ID NO: 51272 - DNA, 968 bp, Heterodera glycines
atgcagaattataaatcggcatgggctgtatggaagaaggccggcaagaaaattctcgtgatcaccaacttttgtttctcaccaaaaaaaggggggttgtttgggtgatgatcaattttctagacgacaaagagagaatatcggggcagttcctggctggacgtacagccaaatggagaaaaaatgcaattaattaattgaaataattaaaatgaaataaataaataatgtagagaacaagcattaattgttagcgcaattctagagttttggtctaaagttttgactttcaaaaaaacgtatgaacaccgttttggatgattatgcttatttttatcaattatgaaaaaaatattaagtcttttttagagttaaatatttttttaattattttcttaaaatcccttttttaggtcactcggtcgcacagccacgcgccgtcctccacccgaattgaggtgctaatcgccaaaagtgacatccgtcgggcggcagtgaacgcaattagtgcaacgcctggggcaatcgttgccaatgcgctggagggcatcagcgacgcggcaaagcatcagttgccgaagattgccaatctgaaaaagacggccacccgacaaaggaagggcattggggacggagcagcgggtgagaagggaaacggacaaatgagcaacattttaatatttggaccaaagggtcgacaattttcaacttaccctaaaataggctggataattaattaatttcaagaatttttatttttcaaaattgataaaatcaaatgaaaaatggaaaaaattttcattgggattcctttcaaattaatgaccacttgacaattagttacttcctttaagataatccgctgtcaagcagagaaacactgcgcaaaagcttggtgcaaaactatcgcaacggcagtcaccgacggacaaccgttacagtaccaatgccacaaacatcgcattacg

SEQ ID NO: 51273 - DNA, 49 bp, Heterodera glycines
cccagtctctattaatcccgcagtctccaattatcccccagtctacgag

SEQ ID NO: 51274 - DNA, 913 bp, Heterodera glycines
atgggcgcacgtcgatgcggaagcggtaggagcggcgcgtgaaccgcgggctgtggtcattgacgtcatcaatgtgaatgtccgcggtggcaatttggcacagctccaacgagcggggatgaagcggggaacggctcttaacattttaatattaattttaataatttttaattattattttaacgaaattatttttttttaattttgtaaattcttttttattaaattaggcgggaaataatagtaaatgtttttaaaaaataataaataatctgagagagaaaaaaactcaattttttaagtgaattattaattaaaaaatagtaaaatttaaatttaaatttttttaaatatataggtagaaagctatttttggaagttaatattcatacatcttaaaattaaacaaaaaattttgactttaaaaaaatgtaaaagggattttttaatgaattttctgacatggtgtaacatacaaaaaaggcgtagattttttaatttttaaaaattttttattataaatgtttttaaatatattttttaattattctacatatggagaaattcaagaaaattatttttccattaaatttaaaaaataaagacaaattaaatgaaatcgaaaaattttttaaaattattattttaaataagcaaataattcaaaaataataaagaaatgatgaacagcgatcaccatgagtcgcgctttcacaatgatccgatcagtgctctcccggtcgatgttgacgccggaccggacaatcatcaccccgtcactgtccaccttgaacaggtcggagccgttcagcagctcaacgccttggacctgatcagagaaaggaaaagcggaatgatcaaaatttgagccgactgcttctgatcaatagccaaatatttcactgaaaataaa

SEQ ID NO: 51275 - DNA, 491 bp, Heterodera glycines
atgccggactttacaaacgaaattgagacactgaaaaagcctcaaaactcgccgccaaaagagaaaaaaaaagtgggaaaggcaaagaaacaaaacgccaaaggatgcagcaactcaatttcgaaattattcaaaacgaaattcaaaaatatgttgaagtcgccgaaaaagaccaatgggagcagcagcagcaaaacaagcgaaacacaaaacatggccaatcagcagaagcaggaggaactgcagccgctaacttcatatttgttggatcagaaattaaatggacaggtaaaaatgggggcaaattaatacaataatgtagaaaattgggtaattggtcagggatacggtataacaattagtagaggaatgacagacgccgatcgaaattcccggccaacaaatcttttatccctcaaatataccaacattagagcgcggatttgacggcatatgccattttctgctaacttcttacgaattaaaatgca

SEQ ID NO: 51276 - DNA, 651 bp, Heterodera glycines
gaagaaagaagcacttctctgtacagcttgcactcctgcaaaatgatgttcatctgcaggtccgactcaatgttccctttttggcgcagctcatagcaaagtgaaaatatccttcaaaatgttaatcatcggttttgttagcataaataatgattgaccgaccaattaattggcatccaatattttgggaattcgcttttcacattttccattaggtccaattctggtagcttaattaatttgcattcgaatcggatgattccattttgatcaatgtttgtcgttcgactgacttggatcagttcggagtcaaccagtgactccatgtttggaaaacgctttcggacttggatggaaatgtcgcggaggacgagcacttgggtcaaacacaaataccttttaaattgcaaggagtttaaaaatatattattgttagcttcattgcccctggctcacccattcatttgctgcctaattacctaattatgttcctcctaattgcccttatttgggggctgtcaccacggatataagtgccaatgaaaaatgcagggctatcgacgaagccaatattttgaaagatttgcttccatctgagaaaaggcagaaaataacgaattatttgtctgtaattaataaaaaaggttttac

SEQ ID NO: 51277 - DNA, 1902 bp, Heterodera glycines
atggagtcactggttgactccgaactgatccaagtcagtcgaacgacaaacattgatcaaaatggaatcatccgattcgaatgcaaattaattaagctaccagaattggacctaatggaaaatgtgaaaagcgaattcccaaaatattggatgccaattaattggtcggtcaatcattatttatgctaacaaaaccgatgattaacattttgaaggatattttcactttgctatgagctgcgccaaaaagggaacattgagtcggacctgcagatgaacatcattttgcaggagtgcaagctgtacagagaagtgcttctttcttcccattagcacttaattacccataattaataaatttatgtgtctgtgaattcagaaactgcaaaatttgtgcaattacgattgggtccccgtcccattgggtcattttacacattttaattaagtgtaaatttgcttgctctgttcagcttatccccaggtggtgtttctcgccgtgcgcatttactttttgctctgtctgatcgcccgtcaataccgtgtccacgaaaatgcggaagaacagaaccaagtggacagagtcattccgctaatgacagtgcgcgaaattctatgccaaattaaatttaattaggtaacaatttcagatgctgcaactgattttcgtgatgggatggctcaaagtggcggaggtaaaaatggaaaagcattaattttaatgtttttattttcgtttttaatttaaggcactgttaaaccctctgggcgaagacgacgacgattttgaatgtttaaaattattattattatttataatatgtaaaatgactgataccccattaggcaattacataattgaccggaacattggcattttcctgacaatggtcgacgagtgttacgatcagaaaccgccccaatgggcaggtgaaaggacacttggaattttcaatatttttaaataaataacaattttaaagaaagcacaaacttaaaaaacacgaagaagcccctctacgcggagaattgcgcgctttacacccaaaatccgctcgtcggctccgcaactttgtgccatttgccaggggaaagtgatcgcgtccgaatggtccaacggcggccgagtggtaaaaaaaagcaattaattaagggcctaattagaatttgtgtacaattttttttcgagatatgggcaggcgtcacagcagcaatttcccctcccaacgtccctatttgatctctccgaagagacttcgttttcgccattcgttgccaattcgtcccgccgaattggtgctttttgtacataagtgtgagcagcaggtgctttcccgttgtacaacagaacaaggcaaaaaatattgcttttaatgtcaaaaatttaatgtaaatttaatgtttttttgtgttttattccaaattatttttttggcgcctaaaaatgctaatgatcggccattattatttagtaataataatactaatacaccgaaacaaattcaccataaaaaattttataaagccggcatcgaatcttttagcttgtttgaagaagcaatatttgctctgctcgagtcccacaactgaaaagtgcccgttgctaatcttatttaacaaattgtgccattttaatttttttaaatatttatttttagccaattattatttcgagtggactgtacgaaaatgatattgtcaaatcagcagaaaatgtaaaaaaaaacggagaaaaaaatatttgaacaaaacattttgccattttagcagggcatttcgtcgccgtgtccgtcctcggccgaagtgccgcgccatttggacacagtgaaagaggacgaagaggtggaaacggcaaatgacatcgcaacggaggaaaacggcacaaagggaaggggcgactga

SEQ ID NO: 51278 - DNA, 142 bp, Heterodera glycines
cagcgagtagggggcgaaggcgggcggggggcgggcgtgcgccgattgggtgtcgcgaccaagggccgcgtcgacaggggcggcccgggggagcccgggctgtgccggtcgcacaatgaggagagcaacggctcaggcccgc

SEQ ID NO: 51279 - DNA, 601 bp, Heterodera glycines
atgaacctgtcaactgcaagtttcgtgccgctagcgccggcaccaacggcgggtgtacccccggggcgtctctacccgaccattgcgccaccggggaccgtcgcggtacaatcgacgccggacagtcactttcacagtgagtcaaatttaaaaaattaattcatttaatatgggtccaaaggcgataattaacacaaaaaggctggtaatggcatttcaaaaaagcctaaattgacgggtgaaagttcgagactcaaaaagtcattattattactaattgaggctaaacatgggttggacagctgaacaaaaaatttgtttaagcattgcgcgagtcgcttgagaatccgccacttccaccgattgatcagcaaccgtttgccaaccaatcgcaacaacaacagccacttccttttccgacaatcgctccgccgccgtactacgatcactttgctggaccagccaacggtgtcggtagcattggtgtacggtatttagtgcacggaccgtcacaaacgcacgaagttcactccgtgcacgcagtgccaagtggaaatgccggcgcagcaaggggaggtgggagacaggcgaagtcatgaga

SEQ ID NO: 51280 - DNA, 867 bp, Heterodera glycines
atgatcactttcacttatgctcttttccagttaaatagcatcgaacttttcgttgcgagtcgcttcattctcggactttttgtcacaattggcattggcatcagttcagttttcctaatcgagtgcaggtcgaacaaacaattaccgtatttgctaatattttcctgaacatttttaagcccagtgcaatgtcgaggcggaattggaatgatcactggtctgatcaagaaggccttcactaatcgaattacatttttaattatccgttcattaggcataatgatccaattcggttgcatcgtcggcgctcttttggcaatgcccgaattgctcggtgatcaatcgcattggtggatgctttttctgctggaggcactcgtgctaattgcggtcaccgtcacaatgcttacgcttcatgaaagcccgaggccggaatgcttccaatttaaataattgcaaaattttaaatttttcagttttctactgttccacgaccagcacgacaaagccgccgacgccgccaaattttactggggacaaaataaaagtgccaatgccattttggatggatttcgcactgaacaaacaaaacgttcaaatgccatgggaatgctcgaagttttgagagagaagcaaagcatcggcacagcgaggggcctttggattggcattttcctaagcatttgcatggcattttgtggcatcagcggtgggcatttattggccaactttttaattgtttttattgccaaatttgtcttgcaattagtgatcgatgcttacatcgtggaagtgttacaacagacaatgggcttctccgctttgtcctcttccttcgtttacattggcattcaaattttcggcttg

SEQ ID NO: 51281 - DNA, 1346 bp, Heterodera glycines
atgtgcaggagagaagaacaaagtgatggcaaaacgaaagtgagctctcatctgctttaaacattttatccaaaatgtctaagggctcgtaatttcttcagacaacttattatccatttccttatcgatagaaaaaatggactcggtcaatttaccatatttgggccatcttttcggtacttaagcagttttaataaccaagaaaattggcaacattttattttcattctgaaatttttttggggcaagtcgaggatgccaacaaaactctgtgacttcattattaaatttgtcctctgataatgggtttttcaataaagggagtcgacagattacaactcacaacctccttctaatttttattaggaggttttgtacatcgccggaggcaccaccggccacgtttataacatggacatttggcgcctcgagcggccacttgggcaaccgcgaatcccatggatttgcaccccaatgcacagagatgggcttgaaattggtcgttatcggctggagatggctgcacatggccaaaagctgtacactttcggtggcggagcacccgaattttgtgctgaatttgaagaagtactttttggtatttttctcctatcaatcttttctcacagattctcgctttcgacctcagcaccaatcgtttcggaaaggttcgagctcttcccgacccgaagtacggagttcccatcggccggaaatgccatgcgttggtgcaaaaggggaatttggcgtatttaattgggggatgtcgcgacgcagaaacacaacaaaatgtgaggggaaaaggtgatgaacgaggcgaaagggaagggtattcagcaaaatcgaagccatcagctgatagccgacgtttggaagttcgacatgaacaccgcccaatgggtccgaatgcgcaacaacttggcgaaggcggtgtttttccattcggctgcccttacctccgtcagtattgtcgggatttttatttaaaaattccaaatggccaactttgctgctatttgttaggatgactgtttgtttgtgtttggcggttgcaccgacgaactctccgaacgccgctgcaattccctgcagcaaatgtggctccaaccgccctctctcaagtatttggcctcgatttcgttattgggacttttaaacgaaacgcaaattcggcggataaacaaagagggcatccgactgagcaacgtggaggcaagtgccggtcggattggccaattacgtgcctaattgacatcccttcaggcttttattccgcgccttttcttgccgacttccgctgcttagggctcgcgcaacaaaatgaagttaggcgaaatttcagaaaa

SEQ ID NO: 51282 - DNA, 1018 bp, Heterodera glycines
tcccgtcggcctgagttttgcgagtgttgtgagtgtatttgttgcgtttcgccttttcccctgggtcattcattcattgttcactcattcgataggtcccatccctcgcagtggccatcgcgtctttgctgactccgatttcatttacgtatttggcggatacaacccatttcactctcctgacagcacttagtctgtgcttttctattttaaaaacgatcttttagctaaagatcattttcataattttagcactgatttttggcgcttcaaccgtctcacccatttatggcaaaaatgcggcctttcctcctctgacccaacgactcagttgccgaattcgttggcttcttttgcatgtaatttcatttgtgcaattatcaatcattgaacaattttttaataaaagttcaaacgaagggacaaagtccgcatacatttttgaagaaaaattaatacgtttatttcccccttttagtggcttcatcttctaggcccagcgagtgttttatttttgggggtaccggcattcccttcggtctcgccgcttcaaatgaattgcatcgaattcgaattgatttgcttggaaatgtcaatgttcgggtatgaaaatggggtggtatattcccgatgccccccccccccttttttttgacagaaaaaatttttaagacgaaaaacatatttctaaatttagaattttttattttttttcggatcagtgattttatataggccaaataaatgatatatttgtgaaaagcgactcccaaaaccctcagaagcatgctttcacgacaaataaaacaaattgtctttcaaaaaaaaggggggggaacagcaaaatttgatatggaacagaacgaccattcgcaagactctgcttcagactgagccgaaacaaagctatgaacaaagacaaaacacagcgaacattcggcagagggggcgcagtggcggggaggcggcggacgacgcggcggaacagcggctgatgcccccgcggatgtgagcaaag

SEQ ID NO: 51283 - DNA, 828 bp, Heterodera glycines
atggcctatcgacggctaacgacaatgcttcaacggctgcagaagactcccgaggtgctcaagcagtacaccacagtgatcaccgatcagctcaatgcagcaataatcgaggaaacgacgatcggagctggtaaacacgaacacttcatccctcaccaagcagtgatcacgcccaaaaagttgcgggtcgtctacgatgcgagcgcacacacacgaggggcaccttccctcaacgactgcctactcagaggcccagtttggctgccggatttggccggcatgctcattcggttccgagcatgccgagtaccagtgatcgccgatgtcgagaaagcatttctcatggtcgggattgaagaggacgacagagatgtgtgcaaatttttgtgggtgcgcgacccatttcggccagtgacaacggacaatttggtgacataccgatttcgacgcctcgcatttgggctcacgccaagccccttttgtctcgccgcagttgtacgacaccacctgcgcaaatacgactccaacttcgcggaagaactcattcgggacacatacgtggataatgtgctcatcccggcggacactgcggaagaagcagccattaaaggacaagaagcaaaacgaatgtttgcggacgcgcggatgaaccttcgggaattcttgagcaatgacgagacactcaacagcagcttttcggacgcggaattcctcggcaagacgacggccaaagtcttgggactcgaatggaatgcggagacggacaaaatacgaatgaagtaccccgggagcgaacccggcactccgatcggcaccacacgcagaacg

SEQ ID NO: 51284 - DNA, 600 bp, Heterodera glycines
atggtacgggacagccaacaaacccgtgcgcagcccaacggaacacgaaaagaagagcagtacgggacgaatgcccgtttcaccgagcgaacagtggcacgcggcaacgagaacggacacaagggtgggaatggaccccgcttcgcgcaaaatgggctccctccaagcttcgggagggggaattgttcgttttgtctggagagcggacatcggccgagtgaatgccgcgcctatccgacgccgcaggcacggaggaagcgactaattgagcaaaagcgatgcctgcgttgcctgggctctgatcacacattcgaacagtgccaacgaacggtccgatgtgacgcatgtcgaaaggacgatcatcattggcttatgtgctggaagaaccaaccgggaaaccaatcccggccctccggtgaacccgaacggaaggagaacaaccacgcgatgctgatcagtgggatggaccaacccactcacgtcactacatcacgagacgagccgaacagtcgagacatatccgagatgaatgccggggagcaacgggctttcaccgcttttggaagccgagtcccggcccagcaaatgatcgaagagtga

SEQ ID NO: 51285 - DNA, 1023 bp, Heterodera glycines
  unsure (1)..(1023): unsure at all n locations
atggatgatttttacattgtactaccttcgaacacaccggggcaggagaacactacgtcaaaattcacagtacgcctccccgagactttggaattgggcacaaattggtcagtagctctctcatcaattatttacccctactcattcaccgctctcggtataaatggtcaagagtttataaaagtatgggaaaatgacaacaatgtccccattcaagtttatttaccggacatgaattttaaaaccgccgggggattgggaaataaaattaacgaagcattcacacatcattacaaaatcaaaaaacaacgtgggaagagagaagccaaggctgaagataccaaagactcaaaaattgatgtcgcaaagagggccgcagaacgcgccgggagagacgtagaaagacattttaatcagatcaacaatatctcgaattccatccaaacccaactaaacacactacgagaaacaaatcctcacattttagaagagcctgatataaaaatttggtttgacaaaatggttgagatgggaaccgaaattcaaacatcccgaaatgaacttaagtcttttcaagaagaagtagataaagctaaaaacataacattggagcatgtggaaaagaatgacttgaaaaaagcaaagaaatcagccgacgtcgcaaagggaatcgccagacaggcaaagaccaaatatacatcaactctcgagggatataatgataaatcggaaaagggttttagcgggatagtgaataggcttaatgaggctttgggtgagcatattaaacgtaaagatattgaaaatagacaagtatctgaagctgagaaaggaccacaaaaaagagagagactagccaatgaggatgttcaatttcaatatgacagcattgatcaaaaatttattgtctatctttcccctgctgtctcccacatagatttgtcaaaacacctccgctatgtgcttgcntttangaacacaaggctatttcacgcggaagaagcgaatatatgccagatttga

SEQ ID NO: 51286 - DNA, 939 bp, Heterodera glycines
atgccatacgccattttcgacaccccgggccaaattgaggtgttcacgtggtccgccagcggcactgtcatcaccgattcattggccgcctcttttccgaccgttcgtttttttgagtttttcaacacaaatgcaaaaggctttttgcaggttgtcgcttatgtgatggataggtaattggaggcgttgtgccgcccattcattacttttttaatatacaaaattgttataattcgagtgcccgttcgaccaacccgacgactttcatgtccaacatgctctacgcctgctccattctttaccggaccaaattgccatttttcgtcgttttgaacaagtccgacgtggtggaccctgcttttgccgtcgaatggatgagagattttgagcagtttcaagtgaccaacaatttttggaaaattatgctctttttgcctttgttttcagactgcgcttgaccaaagttcgtccagtttcatgaacgacttgacccgctctttgtcccttgtgctcgattcgttctacgaaaatttaaattgggtgtccgtatcggcaaagacgggtcagggctttgataaggtgaatttaattttgttactaaattttcagggttttcattttcccactggatgatgcttttccctaaaatttttactctagaaggaaaatgttaatttttaggttttggagttaattgaaaagtgtcggttggaatattgggaagtgtataagccaatgtgtgaacgagtggcacaagagagagctgctgagacagcgaacgacggcacaaccgacgcaatgccaacggaaaagttggcgaatttggaaataagagaaaatgatgtgccaagtgatgagaagggacaaacggaggaggcgcaaattacagaaacaaatggcgaagaacattcaacggaagaaagtgaagcgcaaaagtga

SEQ ID NO: 51287 - DNA, 99 bp, Heterodera glycines
atggctgatgacaaaagctgtgacggtgcttcttctgcgttgcctccgtgtttaattgtgcttggaatggccggttctggaaaaagctcatttgtccaa

SEQ ID NO: 51288 - DNA, 586 bp, Heterodera glycines
gacgttcaagtgtcttcattcgatagccgaacacttcgcgttgtcgtggaagtgagtgattcagtgaaagttccaccatttgttttttgataaatgtaattttaatagggtttaattagttttcattgtatttgccattttctttgtttctttttctcagttcccttcccttcatttttaggacgttaaaatgcgttcccaaccatcagccaaaccgtcctttgatgcaaaactcatcttcgatgaccacattcgattgatggccgccaaacagcggctaagccgtgggaagaaaagttcgcgtgccttcaaactcagtctgatcgctgaactgttcggcatacgcttgccgccacaacagcaacaacaaaatgatggcattgccttccgacattccctcccatgtcagtcgaactcggcgagcagttcatcgacggaggagaaaaggccccgcggcattgcacccggctcagtgcagaaactacaaatgcaaaccaaagaaaacgaccagcgatcggattcgtcggctgctccgcctgacccggagacggcacgacttttgcccggccaaatacatcacttgtag

SEQ ID NO: 51289 - DNA, 220 bp, Heterodera glycines
agagaataacagctcaatcgaccaagcggcgcacatgaatgaacacagaaaccggccctccccgcccaaacatggtccgatggggacaaaaagtgcacgtgaatggagacaacatcaaccaatgcatgtgaatgttctaccgcaaatgaaggaagtcacagcgaagaaagaagagaaggaagagaaaaagacagcccatttgatcagcccatttctctaa

SEQ ID NO: 51290 - DNA, 771 bp, Heterodera glycines
aggttccatgtgtccacccttttgccgtttaccattggcgacgcgcaacaattgcagcgcaaacggcacattggcaacgacatcgtggccattgttttccaagagcagaacacacccttctgtccggacatgatcgcgagcaagtacaaaaaagggcaacattcagtgcctaatttaattattttctttttttccaaagctttctccacgcctatttggtggttcatcccattgagccgggcactgaccgcacgcgttaccgcgtgtcgatgacagcgcgagacgacgtgccgttctttggcccgacgcttccgcgctcttccataatttggaagtgccaactgcgcgactttttgctcaccaaactgatcaatgcggaaaacgcggcttataaggcggaaaaatttgccaaattggcggtattatggcaattttcattttctgaattaatcaagtttgttcaggaacgcactcgggcatcgctgctggatggactgtactcaaatttgaaagagcgggcccaattttacggcatggcatttttggattcggtggacagcgcgacgaaacagcagcaacaggagaagcaccaccaccaatggcaaaacaacgggcaaaaccatcaccagcacagccaacagcagcaactgatgaacggaggaacgaacccaacgttttgttttccattgacactgcgctcgttctgatgctcctcttattcaatgatcaaaagagcaaaacacatttttgactgattatataatatatctg

SEQ ID NO: 51291 - DNA, 246 bp, Heterodera glycines
tgccacgcaatgccgccgcccgactccacggtggtgctggtcaccggagcggactgctgctcctcaaccatcacaagcactcgacaaggagcatcagcagcagcagcttcttccacgacgaacacaacgatggcttgcgacgtcaccgccgcttcatcgctcaatttgttgctaattgccgctaatgatggtcagccgccgtccggccggaagccgtcatcatcgtcctcgtcgacatcgacatga

SEQ ID NO: 51292 - DNA, 767 bp, Heterodera glycines
atgctgcctttattaattgttgaattttatgttctccttgtaatttccttcgttatgccaatggaaggagattcttgtgatgttggtaatttaatgactttcatatcttaggaagtgtttattagagaccgaaattgaaaatatcaggccgaaccgcccggtcaaaaaagccagtttaaacgggcgtcccaggccctgtcaaatttaggctgggcgttttttgtaattttttggaattttgaattaataaaaaaaatcggtagtcttttattttaaattttgtaatttttaatggcgcttttttaacagatctttctcaaaattgagaaagttttgaggttttaatttttacgctcggttattaagttgtctgtgatgaaaattttgcatttctttttctctcgttttggcgtactattttcatgtttctaacacattaaaaaacatgaaattagtaaatgctagtaattttggttgtaagggtataaaaccaatttatacatttatatcaataaaaaatattaattttagcattttggtagggattagcggcctagggcttgagttataattagggctcgaaattatatggactaaaaaacgtcaaatatggacataaaatatggactaaaaatgcccgaaatatggactaaaaagctaaaaatggtcaaatatggaccaaaatattggctaaaaactgccaaaatatttgttttaaaccctccaaaattccaaaaggtgtgtatattcatatttgcttaaataaa

SEQ ID NO: 51293 - DNA, 683 bp, Heterodera glycines
atggccataaaatatggaccaaaaatcgcgaaatatggacataaatttttccaaattgagggtacaatttctcaaaatttcttcaaattcgctaaacgcaaagtaaaactttcaaaaatgttaaatatgggattaaaaatcatttaaaaaaaacacgatacagcttaaaatttattcattttagcgaaaaatcaacctgaaaagcgaaattttcgcttttttgtttatttttaatataaattaaccaatttttaagaaaatttaaatttaatcaatattttcggcaaaattttgctgaaaaagtctttttcggaaattttttcggtctttagggacaaaaatgccaatttacctgatgggggccgttctaataggggttttttgggaaaatgccaaaataaaaacatgtttttcgtgcgtttcaggcttcccacagtccaggaaaaaaatatggatttccatataattcccagccctactgatcagcgtcacaaatgtcctagaaatgactttatttaaaatttcaagggggtctcaaaactgaaaagtaccaaaggctgttcagttataataaactgcgaaaattttaaaaagaagtccaaaatattatcatagaatataaatttatttcttttgaatatttttttaattaaatttaaaattttcagtgatttgactgtcaa

SEQ ID NO: 51294 - DNA, 1833 bp, Heterodera glycines
  unsure (1)..(1833): unsure at all n locations
atgtccaagcgcttcactgatttttctattgactcaattctcggcaaaaagcctcgacagggcttcctcatcaatcaaattttgggcatagcccacgtgcttggatccgttcaacacggtcagggttcgtcgaataaacctgtcaacgagtacgtgaagaagcttgaaggaagcttggaacacaacgaaaagtttcactacaccaaaatgaagagccgattcagcatcgaggatgtacctgcaaacccggaagccttactatcagcaatcttccaatactgtatcgaagaatcgattgcagacagtcgcaagcgaggaatcgagcccactcacctcggttgtctcatcagcagcccactgctctctggtggtgacattccgattcccatccggcaaatcaacgaaaacactgtcaacaccatcctgaaccgcttcacccaagtggcccagagtaaaaaacagcagaacatcaccttgtggggcgagccgtttactgtggttgtgactacagtaaaccgtttgggactccccaccaaaagacaagtgaagggaggagcccgtcgtcaattggctcgggtgcgtcatcaaatacatgaacaatgtttaatcaaggttttcccgcgattaaaaacatttggcccactatcaatgtgctagtttaagatcctgaacccggatagacacaacttttgtttgttttacgccctgcaggcaacaatggttgcgaagacaaaacaatggcctcgatggaaatttcaccgatatttgaataaccagcacgggcaacagggacaacttcagcatgatgcggtgcaactcatgaaccaaattggtgcgcctttgaatttgaacgcgtacgacgctgacacatacgtgccgcgagttatcaaccattggaataacaaccatcaacataaccgatttgctgtcttcatatttgggacaactgggcactacaaacccatctacaaatacgtgaacaacagctacaacactcctcttctcctatatttcaacgacaatcactttgatggggtgcagaagcagagtggcctgttcggaaagccttactgtttggagtgcgaacagccatatggaagagcatcaaaacacagcaaatcatgtaaagcacgttgcattctttgcgctcgctgtggtccggcattcccttgtgaagcgactggtggcttcttcagaaattgcaccttatgcaataagaattttaacaacaatgattgcttccaacaccatctccaatccggtttttgcaaacggtcaaagaagtgcagggattgtggtgttgtttgggacgttacagacaacaacaggaacggaagaaaaggtcatgtgtgtggtgaacgctactgcaagctgtgtaaaaacttccacaaccctgaacgtggctgcttcatcaaaccgctcgagcctagagaattggacccatatcgaattgttgcttttgacttggagacaatgcaacatcagcctataagtcgtcgtgagccagagaagagacagcatcagcctaacttcatctcagccaaagtgatttgtcccggatgtattgacaacggtagatggcggaatggaaccgcaggatgcaaagtgtgtggccctcaccgcacagtcgccttttgccaacgtcgatttgtaaacacagctgtcgacaaacaagttgtcactgacaacccgttagagacgtttgtcggttggatcatcaatgatcttccgaagaaatacgattcctacgcattctcacactttggaggccgtttcgacatggtccttgtttttctgaaatgtgttcanagatgggtttcaaccctgaaatga

SEQ ID NO: 51295 - DNA, 118 bp, Heterodera glycines
gcattcttccgcttatccctttcatcagctcatccgccgcttcatttggcgtcacctccaaacaatcgccgctgctcaatttgggaggggcagtgaataacgccaaagaattgccggt

SEQ ID NO: 51296 - DNA, 961 bp, Heterodera glycines
atgggtaatggcaaaggcaatttccgaccaacgtgcggaaaggtggccgagacattcatagaaattgcaattcaccaacattctacaccagaaacagtggtcacagaccagggaaggcaatttatttcacaaattttcggaaatttgacaaaaatttatggatttgaacatattatgtccactgcttatcatcagcagtcaaatggaatggccgaaggttctatgagaatattggcaaatataatttccacgacaataaatgcacaaggggacaattgggatgaaatattaagtcatgcaatttttacttataataaatacatcagtgcatacggcaacaaaatattcaccctattttatcatttatttgcgtgaaccccgactacccaccgatcaaattttgaaattgccctcaagtaatgaatttttgtcggacatttccgtttgtacacgaaaatacactgagaaggcatcaattgcatggaaaattgtaagggaagaaattttgaaagcccaggagaaaaacaaagctgaaaatgaccaaataaggaaagcaaatttcagaaatttgaaatggcccacttaccactgataaaaaaggaagtacttaaacataatttgaccaacaaatgtacagagtacatataatcaatttagtgcacattcaaagaatacccgaaatttgggtttcccataaagaaaatgtggaacgaagaatgagtgacaatgaaaatagcagaacagcagctggactttgataattatgttgcatttaattaaatttttctattttctaataacaaaaaattaataatcaaaatataaagcaaaattaaatttaattgggggcgatccctttaatgccaacacttatccccttccccactcttccccacgatcagtctctgtcccgactgcgaatcgggaataggcggaccatccaattatataatactcttga

SEQ ID NO: 51297 - DNA, 1194 bp, Heterodera glycines
atgcgcttttggtatttgcttaacatttctgatcaccacacgcaattcctcagctgttttcgcgtgtccaatcgaaccctttgctttttgttcggtttggcccaatttctcgtcgttttggcttcattgtttcaagtttgaaattgttttcaatgctttgtttcagttcaaacatttctcattttagcacgtttattcatggacaaaatttgggcatgtgtaagcggcggaaaaagcaaaaaaaatattacaaattataaataattattttaagtttcaaatgcaagtcgaatatttcggcggatgccaccactgaacagcgccttttggcttacgatttggtcatttttgacttcggcctgatgcatcgcattttgaaaatgtccaaatgcgtcgcgaattatttggcaaattaaaaattattttaatttttatacattttttcaattttaaggatggcggctatctccgcttttcatggtgcattttaaatttacatatattttcaaaattattttctttaaatatttctttttttgaggtgtgttgagcattctcttgctctcctcgtccttctcattgttcttattttatcgctaaaacgaatttggctttattggccaggtaatttgtcaaatttattttttgtataattcaatattaattagaaataacattcagctctgtttatgcaatcaacttatgtgcttggaatggccattttgacaatggccacaactccaaaaatggttttcaaataattaattatagaaaataaaaatgaaagctttatttattttattaagtttagcttgaagcactgagtcgatctgttgataacgcgttgggaatcgccttttgcatttacattggaggagttttgctaaactggatgtttacagttaaaaataaaaaattatttagagcctgaatttagaaacaagaccgaaattcggaaacagaacggaccgggataatgtttccgggatacaatatttgagtgggattctggtccgatataagccgcagaacatgtcctgggtctattaaatttgaaaaaatagtaaataataatgtaaaattatttatcaaaatatattgatgcccataaagttggttctttggcaccattattgggcggaggaggcgaatttggcacaaaacattcgtgaaaatgaaagtgccgacggcgaa

SEQ ID NO: 51298 - DNA, 260 bp, Heterodera glycines
atgtttgaagctaaaaaaggagaacttctcagtaagaaatgtttataaaatttcacatttaaatttagtaaaaattattaaaaagtaatattttttgtggcaaaaatctattcacaaatcctattctaaaatccaaacaattgatatttgtgggtaaaatccgttaataaattgcaataaaaatccataaatttccagacggttggacacactttccatttgaatttgtttattatgtcaaaactcaaaaagtaatttaa

SEQ ID NO: 51299 - DNA, 262 bp, Heterodera glycines
atgtttgaagctaaaaaaggagaacttctcagtaagaaatgtttataaaatttcacatttaaatttagtaaaaattattaaaaagtaatattttttgtggcaaaaatctattcacaaatcctattctaaaatccaaacaattgatatatttgtgggtaaaatccgttaataaattgcaataaaaatccataaatttccagacggttggacacactttccatttgaatttgtttattatgtcaaaactcaaaaagtaatttaa

SEQ ID NO: 51300 - DNA, 1363 bp, Heterodera glycines
atgcccgagcatttgatccctttcgaccccggccatatcattccgtgcccgtttttcacacgtactgtgaggaatatcgtagaacaaaccaaaccggacgttgtatttatggtctttcggtagtacatttaaatagaaagaaaataatataaataattattaatttacatattttaaattaaaaaattgttcgcttattaaaataattaattaattaacaattttttgtttgctgtgaatttataacgattttttaaaccatcaaaactacgtaaagattaaaattaacatttatattaaattttaggtggtataatgaagttctgaatgtcccatttaatgaaaatgggactacaaaaaatgacgaaattttgaaagcatttcgccatgaattgcggcattttcaaaaattcgtcagcaaccgaatattcgtctcggccccaacactgcaattcaaacatgacgtggccaaagagttggccaaacggttgtggcaacacgctccgcttggcgacctgcaactatcgcttcgggtaaagcttgttaatcgttgcctccgttttctaaattttactgatttaaaaaatattttttatttttttaattgccattaatctctttggcacttcctttttcattgttttgccctcgtcggggaatcctcgccttcccgtgccaatttacaaaacactgccaattttcttaggagcattacgtcacaaatcgcttttcctatgcccgtctccgtctgttgaactgtccaaaatgtgtccaatttgacctcgccgaacatttctgtgacgcgcgcacggacaaatgtgcggcatttgatgagcaaattcagttggccaactttttcgacaacaaccatctcagctatttgggccggcaatcagtgcgcccctttctgagggcaattggcaaccaaatttggcacgataaacgaatgaatgtttaagggactgactgattgggatttgaatttagcatgaaaagttttgacattgttatttattggcattatgaataaaagaaacggaaaataaaaacgttttgaaaaagccgccgcaatgcagaaaatgaaaatacacccataaaagttagtgccgaatcggaaatcaaaatttttcacgaatgaacccaaaaaatccagtcgcattttccaggtcggattcgaaatcgaaaattccaataaagtgcgatcattttttagccaaggttctcgagcagcatagaactgtgtctcgaaaggaacagtcgaaagctaacaaaaaagcagattttaggaatgaaattttctgcacctaaaatagaaacggaaactgtgaaaaaaggcataagaaaggcatgaaaatggaataaa

SEQ ID NO: 51301 - DNA, 729 bp, Heterodera glycines
gaccgttataaaatcctacccggagaagaacggacggagcgatggacaaaacaattaaagcaattattagtacaagaagggaacaaaacacctcaaaatctgttaaaatttgttattgaccgtaaagttaaggtaattcaaaaagagtaattaatgcctgtacagattgttttttttaaaaattattaaataaattattaataattattggtttctgaatattaaataggttttagaataaaccggggaatacagacacaggcttttccaataagtcgaactctagtttaagtagtaaaaatatttataaatcgaaaaccttactgaaattgttttgaaatttcaggggaccgggaatggcactgtccttcttgtcggcaacagtcatgccgatgtggtggcgcgtgaattgggagaggaaatgaatgcttattaccacgattttcaagtatttacaatgccgggtaagcgaggcaaaaaggacaaaaccggggacaaaaatccgcaacaattgtcctaaaaccagaaaattgtttttttagcaaaaaggaatatttttattttaaaaatcaaaaatcttttaggcataatttgatttgatatatcaaatgtgagcaaatcctaaaaaattacaaaattggatattattttgttacaagacacctaacaaatgtataatgttttttgcgatgagaattttttacattgaaattacatattagaattaaa

SEQ ID NO: 51302 - DNA, 600 bp, Heterodera glycines
atgctcgactcggacttccaaaaggcacgctttgacatgtactgggcattggcattcgtcgcaaatatccaaccggtgtttgaaaacaacgactatttcgcagaggtaattttgaaatagatttttttactcaaaaatagcaaaattttattcataaattggtctttaggtcagaattaaatgttttggccattttaaataaattttgaactattgccaaaaattcaaattgtttacgctttttgacactcaatttagagacatgatctatagcaaaaaccaatgcaaaattggtgtcaaaaagaattaggagtagaagccataatcgaaatatgctactacagtattgcttacagtacccaatttcgttcgtccccaaaaggtgttctcctaccgtcccttcctccactgttggtcccttggcgtggaaatgcaattttacctgctcgccccgttggccatgcttttgctgctgtcacttcggcggcttacaccgcccgtttgctgcgccatttcttctgctccaccgtacttcttgcatcggttattggtacacaactgctcactactgtaatgcctgccctctcttttggccttatg

SEQ ID NO: 51303 - DNA, 621 bp, Heterodera glycines
  unsure (1)..(621): unsure at all n locations
atggcgatttctgtacaaatgcatttggaaatgatcaaatgttgctctgttgttcaaacaaaagtgaaggcccggcatcagcagaagaaggtgtaacaccttaaagaaagaacaaaaattatataatgaactcaaaagtcataaactaaatattaaattcaaaaattgaacaaatattctagtagttccccccataaattttttttattgcaattgaaactttttcagccgctactgttagactttctgtctgccccggatttctccgtgcctacccaggcaatgctcttcgcccttcagcagtgtgccgtaatgctttggtggcgttggcaaaggtgttttgatgatcactgtgtgctcagtgggcggcggtgccgcggactgctgaagttgtcgcaagcgaatgtttgtcgccgatggttcgcagcagtcgtcgttgttgttnccnttntactcccactnttncttctnctnattttnnccaattacacaattcnnntncaanaaaaanccntnctccntttnctnctnctnnctttnancataattttcnccacttatcnaanaanannannannannannannnananacnnactnannaannancacanactnana

SEQ ID NO: 51304 - DNA, 478 bp, Heterodera glycines
atgcgatttttattcaatttacattttactgccccatttgttgtttctttagcaaaacgctcttcgaataaccctaatctctgtccaacaagcaattcgatgtctgacatctacggcttcatcaacaatatctcagatcgtatatcacgacgcgtacgtcgcaagcgcccaacggagtctggggtttctggtgaggaccgagtcactttttcgaaagttcattttctttcggttttcaggtgtcagcggcgcaccgccggagactcggaaggacgacaaggcgaagggcggcggctgctccaaaaagtgcgcttgcatcatcgtgtgcagcattctcacgctcattgtgctcgtcatcggtggactcgtcctggccgctgtcctgacgcctgaaacattcaaaaatgctcctctgttgagcctcatcgcgggcaaaaagaatgggggcgtggatggtgaggagaaagaaaccgaatga

SEQ ID NO: 51305 - DNA, 869 bp, Heterodera glycines
atgcatatttacgtatgcgttctttatttcgggttattaaatcaaagtcttctaggatttggattattttgtacaaaacttatgttagaccgttattggaatatgctcctgaggtttggaatccatctcttctaaaaaacattaaaaaaattgaaaaaatgtcaaaaatatttcaccaaaagagttcttttcaaatgcagccttccacccattccataccaacaaagattagaataccttcaattgccgacacttgaaagcaggcgaaagctgtctgatctgttcatggctcataaaataatttatggccgaacagatctgaatccctttgaaatacttaaaccttctaaacgctttaacattcccttttatagacttaactcgaaatataaattaggcaaaaaatttatacttttgcggggcgggtaacaaaaatttggaaccaactcgataaaaagcttattgaaataaactcattaaatcaatttaaaaataaaattaaaactatttcattttccttaaatttattttattcatacttaattggtcttgtttttgcttttattcattttttattatttgatttttaactttaaatatataaaataaaaattatataaaaaagggaagaaagaaaataaatttctaatttattaatataattggaataagaaatgaattaatatttgctaaataaatcttctggtcccaatttattttattaatttttaatacataccagttaaaaaaaagaaaaaaaaatgaattttgttctttaaaattttacaaaatttaattaattttcagaaaaaaatataaagaacacaaataaattaaattatttaaaaaacaaaaaagccataaataaa

SEQ ID NO: 51306 - DNA, 1012 bp, Heterodera glycines
atgtccactaccactgacgttcagcacaagagcatctacgactttaaggccaacgacatcgacggtcacgagatcagttttgacaaataccggggcaaagttctgctggtggtcaatgtggcgtccaattgcggcaccaccgagttcaactacagccaactgaagcagctgtacgacaagtataagggcaaaggcttcgcggttgccgccttcccgtgcaatcagttcggaggacaggtgggccgagttggcaccgtccgacgctttctttctttcctaattctgaaaaattttgcattttatgcttatttaaaaacgaaatactttcaaaagattccattaatacagaataaaactcatttgtcaggaaccgggcaatgccaacgaaatcaaagactttgtgcacaaaaagtacaactttgagccggaccttttcgagaaaatcgacgtcaatggatccaacgagcatccgttgtacggctttctgaagaaagagcagcacggcacactcatcgacgccatcaaatggaacttcaccaaggcaaggggaaggcacaccacaacaaaaagagtggtgtagcgcaaaatattaacgatgttaaccgtctctttggtcattgatagttgatttttgcctaattaccccattagctaggctaatagagggcggagggaggccctctcgactttcttttaccgtttgttctctcattttcacgcaaacattggccgttctgatctttctttctttggggataatgccgattggtcttaaaacttctttgatgaactgttttggttttcagtttttggtcgaccgaaatggcaatgttgtgcagcgttactcgcccaacacagagccaagggacatcgaagcggacattgagaagttggtggctgccgcagcctaatcgcaaaaaccatttgaaagaaaacgaaatacgatgatcgacgagaccaaaaattaaatgatgttcatttaagcaaatttctaaatttactttggaataaa

SEQ ID NO: 51307 - DNA, 165 bp, Heterodera glycines
caaaaattttcaatttattattgctgagcaagtggatatttaagcggggtttccttttgcaattaattaattgtaattaattgatcgtctccccaatggcttcttcactcaccattgaaaaacgctgcaaacttttcaacacaaaacaaatggaatgccaattcg

SEQ ID NO: 51308 - DNA, 414 bp, Heterodera glycines
atgcccgaagggccagtcagcgaaccgcaaatggtgcgacacatgcccgaagggccagtcagcgaaccgcaaatggtgcgacacatgcccgaagggccagtcagcgaacagcaaatggtgcgacacatgcccagaagggccagtcagcgaaccgcaaatggtgcgacatatgcccagaagggccagtcagcgaaccgcgaatggtgcgacacatgcccagaagggccagtcagcgaaccgctttggcgcgacacatgctcagaagggccagtcagcgaaccgcaaatggtgcgacacatgcccgaagggccagtcagcgaaccgcaaatggtgcgacacatgcccgaagggccagtcagcgaaccgcaaatggtgcgacacattcccgaagggccagtcagcgaacagcaaatg

SEQ ID NO: 51309 - DNA, 845 bp, Heterodera glycines
atgggcaaattatcttataccgtaggtttaataaaatatgcttgaattttttcttttaattattgtaatgattttttttacttttgcatgtatggatttttttagtatttatttatatattttatcaatttttaacagatatacaacaccagctcctcagcgctccagcgagtccgcccgtgaaatggtggcacaacgggcatcatgctttttattttgaaaaaattttttaacttttcatttttcaatcagtaaaattcaatttttttctttaattttagattgttttaaaattattagatttataatattattatttaataaatttttacttcttctcagtcggaaattgctttgtttcgttgtccgttagcaattagaggctatgcggtatttaacattatcaaagttagttgaaaaatttggaatttggataagacatgaagatgcatttagattacttttttattaattactcgttgatatatgaggtttttaatttttacaaatttgcaatctttccttttgaattgatatttaataattaagaaataaattttctttttgcattttacactttatattttttttcgaatttccttttacgctataaattataattttaatatttttgaaagttttttaatgtttattattattttttaaagtttttgaaaatgcaaatattttgtaaaccaataatttttaacttttcaaaaaatttaacaaccagcaaaaataaaacctttttctctgtcttaaaatttgttttaaaatggtttttaacaatttaaattatttctagaacagtgattaaattatgagaatttaatattttaaataaa

SEQ ID NO: 51310 - DNA, 117 bp, Heterodera glycines
atgcgccttatgggctgcgtgttgggccaaggcggacacaacgggcaggacgatgaggagcgcgagcaggagcgggtcaaccgcgagatcaacaaggagctgaagaaggacaaaaag

SEQ ID NO: 51311 - DNA, 740 bp, Heterodera glycines
atgatctgtcgaaaggcccaattaacgccaattcctacggtatcgccaacaccgtaagaatatttgtcatttctttcttttggaaaacgaaaacttccatttgcaaaaatggccttgtttgtacagccgttgcttggttttctaaacgtaatcttcttcgttttttgcttgttgtcgaattgtaccgaaataattatttatttacttattaaaaagttggcatttttatctcgccataaaatttctaccttttctttttgtggacagtaatttcataataaaaaatgtcggacgaattattttttcaccaaaatcgaatgtttagcgaagacggaataccaacaaccttttgaaggaaaattactttaatttattgttattaatgaaattagcaccgaatctttcgtccaatagacagttaaacatttgtcgccactgatttcgaggttttcgtgacaagcggtgacatcccaataattttttgggaattccttaaaataaataattgcttttaaaattattttagtccaagtcttgaaggattgattattttatatgaggtttagctaattaaaaatgtttacttgtcaaaaaatgaattttatttaattttttctctttcgcttattcaccattctcttctgaacgagatacgtcagatataggcctagtttgatcaagttcatggggtctcaacatatttcgttggtactcactcatcttcatctttgattcgacta

SEQ ID NO: 51312 - DNA, 605 bp, Heterodera glycines
ttattggggcatcatcttcggattcgctgttaaacagcagaacaaattggatcgatcaattctatgtgaaaggggcacttatgcatatgaaagtgatagcaatatttggattaacggaaaaagaaatggaacaaattacaaatattcctacgttgttggtgataccgtaggaattggcgttcatttaatcactcgacagctctttttcatcaaaaatggacttcgtttgggttagcaaataataaataatataattttacgattttaaattacaatttggttaattgtctattttatctaatttattttatgtttaaaataatcaaaaatcccttaactttttcacagatacctctgatcttttggttgatccatcttttgctgatggttctctttatccattcgtttctttgttttattctggtgaaaaaattgaggcgaattttgggcccaataatcggaaaattttgtcgtttccctgggtatttaagactaaaagatgaaaatttgcaaaaaaaataggtttttttccaattatctgctaaaattcataatgatatttataaactcgaaaaaactaattattgagttaaatgcaaaataaa

SEQ ID NO: 51313 - DNA, 849 bp, Heterodera glycines
gcctctacaaccaccacaacgacaacgacagaagaacagccgagggttgaaaaattcgccaacactccgccactcatttgtatcctggacagcgcgtgcaattagtaaattttttttcaaattttattcactgttaggccagcggaaaattttttgagggattcgatttttttcgggcaaattggcactaacaatcctattcattttattaaatattatttttttttatcatccaattttcagcgcaacaaaatacccaacggccaagctgagtaagcggttcaaaatcagtgaggactgttcggaattggccaaacgcatcgaaatgaaatcgacggacgcggattggcagatgagcttcgagttcatgaacggcttcaaatacgcggcttttatcttcgatttccccatgctcgggggaggaaaaggcgggggacagtgagcagcagcagcagccattttaacaattaatattttattttaaattatttaagcatttttaatttatttttattcatttttttaaatatatttctttttcatttttaaattttgtttttatttttatttaatatgtatttgtcatttaattcatcttatttaaaaatttaaaaaagccaaaaaaagagcaaaattaaaattgccaaaaaaaattgtaaatcttttttaatttttttattatttaagcattttcaattacatttattttaattgtattattcagtcgttttgtaatcatttttcaaattttatttatatttcacttaatttatttcttttcaatatttgtattataatcttttttaatcatttattttctttaatatgcatttatcatttaaattaaaa

SEQ ID NO: 51314 - DNA, 92 bp, Heterodera glycines
acactgcccgccttggggcaaatttggccgactccttcgggagtcactctcccttcggacgaacgaagaacttcatctcgtcaacaccacgg

SEQ ID NO: 51315 - DNA, 2036 bp, Heterodera glycines
ttgttattcttacattaggtgcgcaattgctcaaaattgctatttgagtaccgaatggatttggttaaacgaattgtgaattgtctgatcaaaattgccccaggagaaaacattgagtatgttttattactaattgttaaggctgcgactttagtgactaaagatctcgaaatagttaactaaaagagtgagtaaaaatgccaaaatagtggcaaaaagttcgaaataatgacctaatttttagccaaaaattaagtaaaatattttttattcaccagttgcagttgaaaatgagtaggactgagatttttaagggcaaaaaaccaaaaataggtacctaacaaataattttaaaaattaaaaattcttgccaagaaaatgaatttttgagaaaattttttcattaattaggagtgtattttataaaaatttttgcatttatttttaggggtgtatttctctgaaattttttaagtgatttttaggtgtgcaatcttcgtttttattgcatttttattgagaaattttccaaaaaatgccgaaatagtgacttttcactattttagtgacgaagctccaaaatactgatttctagtgaccgataatgacatcagaatcgaaaatttttaatgcagaaatgcgttttttgagctttcacagccctattaattgtatttggtttatatttccaattgaatctttcagtgggtggcgttgtggcggaagcatttctttacaattgttggcccaaaaacttctcacggccgacgaccggcgaatgttggccaaccaggacaaaggacttcagactttcttacgcaatcaacaccaaattttctgtgtcatcaaaggcattgtttcaatgcgaaaatggagcactgtaaacgaagaattcgcacggaaaagtggaggaaagcccccgcggagccattgctttttccaccgattgcatcccgacgggtcaaatttaattcaattttttatttaataatttaaacattgatttaatattatcgtatatattttgacaaaatgtttcagttgtccgttggaagcgcacatttgttcgtacaagcattaatattacattgttgtcgattatgttggtgatcatctcgctttttgttatggctttatttcgattgtccttttgttattatgcaaatattgtctttttattattgtaataagaaacacaacatataaaaatatcttcagaaatcaaatccctatactattatacaatacgatgtaatttgttctgattttattgccaaatttatttttttttgtatttaccgatttttttattttagtgaaaatgaacagtcatcataaaattcttttcctcggcgattcctccgtcggcaaaacttcgctggttaattcgctctgtggcattggctcaccaccgcaaagcacgctcggctgcacagttcaggtgggtcgttgttgtctgtgccttgtttcggtaaaacgttcaattgcttgggccaaggcatttgattttcagtttggagttctttgatggtgccctcccttttcgcagattttcccccatcagtttcaagccggaactccgaatgaggccactgaactgttggagttttgggatgtgggcggctcaaattcacatcgcaaggcgagtgcagtgtttatggacggggcggacggagtcgttttggtgcacgaccttaacaatgtgcggagtgagcagaatttggcactttgggtggatcttttgtatgctcaaatgtgaggagacaatgcaaaaaaaagggcgaaacgatgctcaaaacggcacagcactcgccaccgtcgccatgggctgaactcctcgcgattggtctcctcgcccaacctaagcatgagcgacgcctcctccatcgtatcgccggagaggagctttgacggcggaagcggggagcgctttatcgcattggacatggacagagtttacaccatcccaattctcattgtcggtgggtattgtttaaattcttattttcaccaaatgtaaatgtaaccagtttcag

SEQ ID NO: 51316 - DNA, 1179 bp, Heterodera glycines
atgtccaataagcttctgccggatgagatgtactgcagcagatacaaagaaattaagaacgctttcggcaaaaggatcgcttcggtaatatcttcaaaattttttaatccgtagaattggaagctcgctgagattcaatcgctcatttatttttaataatttttttaagttggtaggtttctgacaggtgtatgcgaaaaccaaaaaacttcgaaaatgaaattacttcctttttcacattttttatgtacttcatctttcctgccatgtgaaatatttttgtagagaagaatagtgaattttataaattaaagtttttttttgtggaataaataaattaattctgaatttgctgtttatttagcttcttttatttaaggcgtggactgaaaagacggaccctagcaaattcgtttacgaagattgcgggattgtcgcgtatcttctcgaactttggcaaagttacggcatcggtccctccaaacaatttgctgacctcggctgtggcaatggactgcttgtctttctgctcagctgtcacggcttccgtgggttgggcttggacgtgcgcgaaaggaatatttgggagcaatttcgtatgcaaggagcagatttgagagaaacgaagttcgatccctcctcccgcgattccgttgcggagcatttgaaaggggtcgactttttgatcggaaatcatagcgacgaattgaccccgtggataccagtgatcgctgcaaggtgtcaattttcatcctcaaagtttttcgaatccgttaacattttcagacttcgttgcaattttttccttttgccatgctgcacttatgatttttttggcaaatattccaaaaaaatgccatccgaaaaggctttggcagccggggcgccgaagggaattgcggaacaacactttgcctacattgaacatatttgccaccaactcggtttcaaagtggaaattgatcaactgaaaattccttctcgaaaacgcgtaattttgtcgtattttattaaaaatgtccggtcattcggctttatttttagaaatgtttggtcggtgttgtccctgccgatggccttggctcatcggagcgcattgaagccgccatcaatggccttttatctttggctaaaattggcacaaaggacatttttacgcctcgtccctccaaagaacag

SEQ ID NO: 51317 - DNA, 616 bp, Heterodera glycines
atgcctaagcgttcaattggatctgaagacagtgaggatgaacttagagaaagtccaagtgggccgaacggagagtcaccatgtgccaaaaggagaaaatgcgtcgaatttgagccagtcaggatttgcagcataggaagcgtggtgagttttaactttttgtataggtaaatcaagttttacttaagaaagaaatcgaaaatagagttctgcttgcacagcattacaaactttgcgaaagatttcgactgaaggagaagatcagattagagttggagaagcgaattgaagggtttgaacgtcgtcagatccaagacgatgcggtgatgtgtatcatcaaccgatactggaacagagtgtgttttagttagatgaaaccattttagttcatcatatgttatctaatttcattttcccaatttagttggatgaggaaattcaacttttgttacaacgatttgacagagaaacagcacaaattgacactgagatgaaaggtggacaattgaccttgtttagcatacctaaactattagcaagcaaaccaaagggctttttaatttttgataaaatttaaataggaattaaacttaaataatgaatgagttgagcctga

SEQ ID NO: 51318 - DNA, 623 bp, Heterodera glycines
atggccaaaatgccagttgtgatggcatttataagcaagcaaagcatgtcgatgacggcaatgtaaaacatgaactaattgaaaattgatataaacaattaattttggtaactttttcaatatttattgcttctcttctgagacattggcatggtttcaattgagtttcatgccacggaataagaaaacaattaaaaacttttcttaaaagcaactaatcattaagggtattggttattattcggttgctctgacaagggaactcacgaactgtaagccaaaaagtgggtatacatttggtaccattggatacagcaggtcgacttctattgtgaatttttatattagcggtgtgtgacgaaaaataaaaaagttatgtggcctcaaaaaccgaaactaaggcctaagggcccattcctagctttgttaactttctattaatttccaaactttacttttattattattatttttttagcttattttcactaaataaaaattattatacatttttttagtctaaaatgcacttttaattatttagttatattgtacattaattaaaacttattattttttatgttgaattcgaaccggagctccaaaaatgcaaatttaataaa

SEQ ID NO: 51319 - DNA, 810 bp, Heterodera glycines
atgggcaacggatttggaggcggaatgggcaatggatttggaggcggaatgggcaatggttttggaggcggaatgggcaacggttttggaggtggaatgggcggcggaagcggcggtggctatgggtacggtaaacgtcgctgatgaattactgtgttttacattatgacgacgacatttcattatgctcagattgtcttttttttacaaaaatgaaacttttttgtatttataaatgaatatttaaaatttaaaatttatataattgcacaaagaaaaaagaagttttggcaattttaaagtgcccggaatttttacagttattttgcacaaggaatattcccaatttaccagcgatctgaaaaatccaatcactttcggtgattaatttttgactttcttctaaaagttcaatttatcttctagtttcaaaactgtaccgacttttcagacgtcaaacatattttcggagtcccaccgaaatttcctggtcatcgaccaataaattcgaaaataacggaccaataaaaaaatatcgctttgatttattttcagactactcctaacgacctctttcccgatcagggatgggcgaaacttcgagcttcgtgcttcgaaaacttcgcgttttttgggcttcgaacttcgagtttcgggtaatttacccgaagtttcgggaaaaataacccctaaagatcgagttttcaaagtaagaaatacacccctaatgattggcttatggtaaagttaatttaaatatcattatgaactttttgtgcagcaaaaaagtcgggtgaagagtaaaataaa

SEQ ID NO: 51320 - DNA, 871 bp, Heterodera glycines
atgtacggcgggtatgctgtacttagcggaggaagggttagcgactccttctccgacttgacgggaggtataacggaagaatgggacttgaagagtctcgatgtcgccaaacgaagggacatggaattggtaataaaaaaatttaaaatataagccatttttcctaaattccgcaaaggagtaataatgaacccgcttaagcagagccagatcaataaaaaaaatttgggattgtatgccaagcttggccaagctctggtaagaaaagcactgacaaatgagtggaaatttaaaatgtttagctctgatttgtaacagatattcaccagttgtggcaatccctaacaatttttcgtgttttcatcaaaattttcgcaaccagaatgccgggctcaaaagtgtacgaaacggaagtcgacaatttaattgttttttgccgaaaatttttttattttttccggaggcatcgactgcacctgaaaagctatcgattggcaccaaaaaaaaaaaaaaattaaatttggctgagtttaacagggaaaggctcattgattgcggaatttaggaaaaatctcggcataaagaagaatgataatttaatgatttttaatattcaaattaaacatttttaaagatattggtaaagcgtcctccgaacagtggcgttaaaaactactctgagaactgtgtatttggctgcgccacgggaccagtgaatagcgatctcacgcgagcagggctcgttgaagtaattttcaacttacaataaattcttaaaattaaaaaaatttcacgaaaaaacaactttcgcaaatattgctgcaattcgttaataattttgttgaaaaactgtgccttttcaaagaaagaa

SEQ ID NO: 51321 - DNA, 117 bp, Heterodera glycines
atggaccaaaatgaaaaagttagacagaaaatgaaggaaaaaacaggacgaagaattgattcattttgtattttttatttgatcaaatttatttgtttgttttcatttttgcaccat

SEQ ID NO: 51322 - DNA, 419 bp, Heterodera glycines
atggcaagtgcagcgaatgcatatgtgaacagttggaagaagagcagaaaaggacaaaaacagggggacaaagttggcacaagttcatcgggggcacaaaaaagccctgaaatgggagaaattggtttgtaaataaataaaaacaatgaaaaatttaaataaaatttaaaaaatttttggaaagcaattttccaaaattccatgaaaaaaaaactcataaaatcaaagaaaatagtcaataaatattttttaattgaaataattaacaaatttaagaaaatccattggaatgcaaaattgttaagcctatcttgctaattgaggaacgcgaactccaaatgagttcagcaatggaagcgattaaatcagtgtaccgcgactttttcttatggggcaaggggaaatatttaaaaaatacg

SEQ ID NO: 51323 - DNA, 1260 bp, Heterodera glycines
atggtccgaaaaaagcaaatatttccttctgaagggaataaagctaaagaccaacaaattgatgcagaaagcattgaactgggttcacagctcccattaaaaagcggtttgaagggttcgaagctccctgataaaagcggtgaaaatgataattgggttcaaagctcccagaaaaagcggattgaacaatacaaacaatttattgatatgattgataaaccttcaacttctcagcaatgtaaaatgaaagaaattgatagaaatgttaattatcttgaaacaaacagatttgaaaacaggaaaagaaaaagtgatacgtttataaatttagacgaaattgatttagatgaatcatctaaaataagtatttgtgatagaagtcaaggttcaaacagcactgaaaaaacattatgtaaaaaaaatacccaaatgaatttaaaagatttagtcaaacaaaatcccattttggagggtgaaaacaaaactaaagatttgtttaaaagaaaaatggttggctttttatttaaaaaagcggaggaaaaaaataatatttcaaaattttccctgcaggattttaatattgagtgtttgttttgtaaagctcttcattttccagaagaaaaatcgataaatgcaaaagggaaatttaatgaattttatttatgttgcaattatggaaaattcgaaagattaattgggttttttgatacttatcctgaagatttaaaaactttattttcagaagaaaataatttacacaggcattttattgaaaatataaggaaatataacaattcatttgcatgtgcttctttagcatgtaatagattttctttttctacacccggaccaagttgctataaaatttcaggtcaagtttatcacaaatttaattcaactgctcaaccaatagaccaaaattctttacctacaaatggtcaactttattttcttgacagtagtgaagcacaaaatgttcgattgaattcttttgaattaaatgagcacctcattggaaaaatagaaacatcgcttagaaaaaactatccatttgctaaagcttatgaaatgatgaaaaatgttattaacgaacaaaaaacattttcggacaaatctattttaaatgaaacacaagaagtgaaaatgtttttgagttttaagaatggttttgaccctaatcgatataacattcaacaatcaaacgaagtcgctgcaattatggtatgcaatggaatgatgaagtcccgcctgcaaatttag

SEQ ID NO: 51324 - DNA, 137 bp, Heterodera glycines
tcttttgcggtcactgagcccgaggcgggctccgacgtgtccaatgtgtcgacgagcgccgagcgtagtgaggacggcacattttatgtgctgaacggtgccaagaaatggatcaccaattgtggcgttgcgcaatg

SEQ ID NO: 51325 - DNA, 511 bp, Heterodera glycines
atgtccttgcaaatcggcatacccgtccttggaaacggagcatggatgtgggagcgttataattttaaagtaatttattcaacattatctctaaacattaatagctttaaaattataattatagttattaaaaaaagccaaataggcatatttgaaaaattatataaataaattttatcaattcgatgattattgttctattattattttaaaatcggccgccaattgctccatattaagacagtcccgactctgcagtcgacgattgcaaaatttatttgattcgctttggtattaattcactatcttataatatttatatgagaaaatataaaaataaatttatacagaatattgttgagtagaaattaattaattttaattaaatcatcatattaaaaaatgccaatgtttaacaatttctgaatattaactgattatgttgatttaacatttttttctttcattatttaattttatgcaatcaacaacacaacaaaaaattaaaaca

SEQ ID NO: 51326 - DNA, 873 bp, Heterodera glycines
atgccaaagaagcaacaaaaggatgcaattgttgacaacaacaaattaccgacagaacaacaacagcaaaatgatggtgatatttgaaaaaaaatttaattttttattaagtatttttattttagttttattggagcgcaattcgaatgaaattgaccagcacaaattggatggaattgatgataataaaaataataatggaaaacaatttggtgctaaaaaggcgtttgatcaatttgaaattgaacaaccaaaaagtgttcaaaaaaattggaccgacatgagaagcatttggacaaaaataaaggcacgcatggaaataattttttcaataaataatttaaaaatttatataattttttaaaaacgttcctttccctccaatcattccacggtttttttttttgtaaattaattaagagagaatttttattttatttccgaatgttaatacacagattttgttttttgtttacttatcttttagtaagataccaattaaacttttgtttcttatgtgttaattatgcaaaaataattaatttataattttcaataaatcttattatattttctacatttagaccaaatttttggctccttatcaaaatcgggttgttttccactggtcactttattccattgtcatcacagcaatgttttatcaagtgaattcaaaaaataattacttgaattagaattaattttaaatattctttttcaggtccaaaattacattcaaaatttgtgggactttcatcggaaagctgacgaaagagaatggaatggttttgttgagagcattaacacacttttaagtgagtaaattttaaaatgaaaattttaattaattcacattacatttgtctccta

SEQ ID NO: 51327 - DNA, 1075 bp, Heterodera glycines
atgttcggctttttgtttgtcgtcttcctcattctgattgttacttgttctgaagcaacaattcttttagcttacttccatctttgcgccgaggtaattatttttaaacaataatacacaaaattacgtgaactgcaataccgcgtgggatcccgcaaactttaaatgcttgattgcgtgattaatcccatgtgatcttgtccagcaaaaaaaaaattttaatttgttaggattaccattggtggttccgttcctttatgacttccggatttactgctgtctatttgttcatctactgcattcactacttcaactcaaaactcaccatcactggtgtatgtgttcattgaaaactgagtttcaattactattcttaatattttaggtcgtatctaccatcctctacttcagctatacttcgatttttgtctttttgttcttcttaatgaccggttagaaaaattttggtatcttaattcatttctcttcagggaccatgggatttttcgcaacttattggttcatctacaaaatctacagttcagtgaaagtcgattaaagatgtaaatttgatttgtgattagaatacatgttaattttttttggtcattggtttttgagcaatgatgggcttctttcaatgtttaatatatttttgtttcccttgtcttaatgttttttttataaatgtgattagaagtcgaagttcggataactatgaaaggagatattccccaaaaaatggcatgggacgagtcaatagcactcgtacaaaaggcaactcgtacactgttgtacaaaggaaacttgtactaaagtcaactcgtaaaagcttaagcctaaacctagatccaagcaagcataggcctagcctaaaccttaggcctaacctaagcaattgtatgagttgtaaattcgatttaaatcaaagcaaacgcgagtcaattttgggctcccagtgtaaataattttttttttattcagaacgccaaaattctgcataaaattttttggggttttcccttgtaaaaacgcaagagccgatctcgagttaaaatatgtataacttccaaaa

SEQ ID NO: 51328 - DNA, 151 bp, Heterodera glycines
agcgaacgaaaaagtaccacataagaaagttctgtgcgcgttgcagtggtggcagaatggggcgggcatttgcctggggggttgttgtgatcgctaactaacaaatttgtcattgtattcccagcggaattgacggtaaatttcttgatta

SEQ ID NO: 51329 - DNA, 709 bp, Heterodera glycines
atgaaaagggaaggcaacggacgagaaatggttgtaggaggtgagcagaccgctgagcagcacaatggaaaggaccaagcgaaggacggcacattgggaagagtcggagggatggagacgaagcgaactgcgaatggccaagagacggtcggcacagatggcgatgatcagcctgtccaaatagagggaaagtgccgaattaagagcgatttgaaaagaatgactgaccaaatggcaactgcggaacaccaattggccaaggccaccaaatggacgcgaagcgacagataaagcagacggaagcgcgggttttggccaaaagagtcgaattgggccaaagcggagggcaaaaggagcagcagaaagagaacatcgcaaaaggccaaagcgatgagaagggagtcggaactgaacaaagaaagtgccaatatggcaaagccaaagaatggcaaaaaaaatgccaaaagaaaggcaaagaatggcaaaaaagggggaaaaaggcaaatgtgcttttttgacgaaccgtctccgaattgagcctctgccggggttaagcagaaccaactgaaaaggggtagcagtaaatggaaatggaggagaagcaaatcaaaaacacttgccaagttgagaaaattgccgacgaaaccgaaaagaaaaagccaagggaaaagaaaagtgaagaagaaaccctagggggggggggggggta

SEQ ID NO: 51330 - DNA, 460 bp, Heterodera glycines
gtggaaactgtcagcaaacaattagccgcccacgtgtacaacttccttggcaaggacatgctcacgtcgggcagcacgggacagcaaatggccgcctatgtctattttggcccaatttactaccagaaactgaagcacatggtcatggacaaaatgcacgcgcgagcgaaggggccccggttggcattttattacaatgactgcaattggtttatggggtgcatttttcagcgctgttctgactcgacagcccaccgaagggagggccagggacggcggacttcgacttggcgaaatggaaagggactgtctgatagcgtatggcgcgtcgatgctgctgatggaacggctaatgatctcctccgatcaattcagtgtgagtacagtaattccattcgcaaatgactccattttcgcctcatcttttgtcagatggatgtttgtgccgagtgcggtttga

SEQ ID NO: 51331 - DNA, 2590 bp, Heterodera glycines
ttaacaataaaacaactaatttaaccaaccgtttgcatcgatatgtcccattttgcagcgaaaatttaaccccttggaccacagttatggcactttttctgctttacttgataacacttctgtggatgtgcaaacgtataataaaatgaaatgaataatttctttatttcgtttttatagatggaaaaaacatttgtcacccaactcctgattcaatttatccttatattggccgacttaaacaattaaagagaggtaaaatttattttttataatacgagtcactcttatatattttttaatttcaaagcgttggaccatttgttggtggatgacatgtattttttaactgaataaaatattgtttgtctgtcattattatttaagcaatatcgaacttactgatataaaactcggccaaggagctgttggctttgtattcaaaggggtaaaatacgaaatacattgagaaatggcgctattttttcgcgccagccctttttgataaaagttatagcttgtaatttataattctagatccgcgataattacttttttatttcaacattcagtacgttgttcccaaatcacaaactcggttcaagcaaaaagtattcgccgctgtgaaggtacggaaacttaaattaaaaaaaacagcttgggatgtgagggatttaagtttttagtcctttttcgtaaatatggaaaaaagaaaagtgcctccgatgggagtcgaacccacgaccttctgttgtctgccactgagtggtacaagacagatgctctaaccactgagctacagaggcgatcaacgaaatatttttcagatgagttatcccatgccccaaaaaagcattggcttattagaagaagcagcgaggatggcacgattgaaccatgcgaatattgtacgcatcattgctgtaagcaaactgtgtgttgtgagctattcgactcgaagaatattcgagctaacagaaatgccggtcgactttttagtgtcttttcatataattaaccattttggcaggcatctctgtttttttgaccgtttgtatttgggatatggaacattcagatcattctccgcctttcggccaatgttcgcaatggaatggcttcatggcgggagtttggctgagtttttccgggaagagatcagggtttgtttgacgatcaaaattttgaccggaaggcttttcagtgcaaagaggatgaaagagaaaggccgcgtgtgtttgtccgtgacattgtgcacgtgttgactcaagtgggcaacgctctgaagtgttcccaactcaaaattaatcaatttatactaattttaaggttcttacacgaaagtcgtgaccttcagggcaatgaattcgctcacggtgacgtggcagccagaaacattttgctgactgaaagaaatttgagcaggtgaaaggagccaacattcaacattatgattcttcttgttagatgtgtcgcaaaattgggcgattttggtttgccaattgactttggtccgcgtctgccaattccttggcttccgcctgaaatcgtctgttcaacggaccgtacaaacgcaaaacatagaccagagagcgatgtttggttggtaaaaaataaactaatgcggcaattcaactaaaacaggatgtttggggtcctttgttgggaatgtgcaactttgggcgccgaaccacactatcagcaaacctttgatgaaatatgcgactcctttcgtcttacccatcgtggtcttccgcttcaaaaggaatgtccacctgactagttagtgttttatctaacaggctatataggattgtacgggaaagggttttaaaattccgttacctagcttaaactgacaaaactattattaaaacatttcaaggaacctaagtttttgaagaatgttagtttttttgggaatttagctttttcccggcttccctacgtggaccggatcggtcccggggtcatgccgccgagcttaggagggcagcagcgtcagtcgcacgaggcgggggggggcggtcgagaaaaaagggttgaagaaaaaccgaacggatctccccctcctccttccaatccctaaaagtttttggaaaaagcgcgcgccgtaaaaaagttggtttgaaaagcaattttaaaaaaatggtcgaccgcgaaaaagtttctgcgggagggggggggcgcaaagcccttctccgatgtgtacaaccctaggcaactgggaaaggaaatgtaaatttcctgggggtatctccctccttatcaaatttcatttaaaagggacttatagcttcgccgatattttgaaaatttatcactgttcaactgtttagtgccgcttttgtgttggactgcttctcggagcagcatcgtcggccccgtttttctggcccaacaaatgtcccttcatcggccattcgtcgccttcgtcatctgagcgatattttcaaacactcaaggggtcgtcttatatacactcatattttgttttcattttgtttttcatttagcccatttcaaagtggtgcacaatgtatctaactgcacttgtgctcaacacagatgtaatgtgccattgccggtt

SEQ ID NO: 51332 - DNA, 1672 bp, Heterodera glycines
gtcattttcccatggcgtcgttttgcctccgttttccccgtggcgccggcgcccgccgctgtgctcggcgcagcattccgccgagcattttcatcaacaaccatcgcctgctgttgctgcattcattcctctcatcattattatcagcattgttccttccgcttttgccgacttagacgagcgaaaaacggtacggtagtacaacaggatactgtacagagtctacagggagtcctatcagggaaatttagtattttttttttctgaaaaactaaattttacagtactattacattaaaatcttagcaactttgaattccgcttcgctaccaatgaatttggaaagcacttgtccctttaattcaataattatttatgattttgttctccaaaaacttatcgtgcttgaatttttgaatttacatatgtattttagggcagaaatttggccaatttatttttcatatatttttcctttttctctgaattattatttgtcattaatatttttcgagaggctgtgtctggtaaaaatttcagctaaccctggtaataagttgtttttttaaacttaaattgggacagagtcacaatgcaattacttagtggatcatactcgggattatgtttccgggtttcagtctcgagttttacggtgccaaaatacaatataaaatgaaaagtaaatgagaaataatgtttatttttatttagataaaatattatgctgtaatatttttatcggagaattgtgggacaattaacaattaatggggggggggggcaaagtgttccttcgatggctcttccatttttattccatttttacaccaaaacgaaatctgctgatagttttttgccgttatttgttgtgtttagcaataaaattgtgtacacattttcacttttgttggtggtgaatcgatttgaccgtcacaaattaattgctttttttccattaatcatttaattacaatttgtacaatttttaaataaaaaactattaaaaagtcagtattttcattaaaaaatctttgtttctaaattctttacaatttttgtgtaactttttggctgtaaatttgttaaaattaaacttttaaatattcataggacaaatgatgttttcattggtcttatttgatgtttctattttttcgcattgagcaacaatttttatatgaaaattcttaatttttgtcgttgaaaaatttttgtcgttgaaattgttttttaataaatggaaacatttttgattttattaattattattttttaagtcaacccaattaataccatttttattttcaaattttaaatttttcaaattaaaaaatatattttttctagcgctttttcttcgaagtgcttccacatttgatagtacaaatcaccaacaaaaatcttcttcggaaatgacccaacagcgggagagcgacgatgagcagcaactttacgaggcacacattgccaaaatttaaaaaaaaataaaattttaattttccagaaagccgtcatccagctgaacgccttgcaaagcaacgcacaaacgttagtattggcacgaactcaacaggaaacgcggccagaatggagactggaggagaccaaggaattcatggacattctcggaatttcggtcccattttattatttaatttggtttcaataa

SEQ ID NO: 51333 - DNA, 1032 bp, Heterodera glycines
tgattaggactcataaagtgcaatagagccaatgcatttgtagtctcgagaattttaattaagatttacagaatctcgttgtcaaggtctgattggtgatcaacaaatatttttttgaaaatttcagcatacttacatcacccttcaggggttcatgacgttcatgttcaaaaaaaaaaattttctagaaaaaattgttatattcatttttaaaagaaaagaaaatgaataaaagcaatttttaggtgtattttttgaaaatttgaaatacattcctttgggtgcattttccccttcctttttattaaaaaaatttcataaggccaatgtaagggttatgtcagattttagaagatattttcataaatataataaaatcttttaaaaaatttctgtaaatttttttcattttttcagcgatggttacgtcaccctgcaggagttcatggcgttcatgatcaacaaggagacggagaatgtgcggtccagtgacgaaattgagatggcattccgcgcactcagcaaagagtaccgcccctatgtgttcgcggaagaactgttcgcggtgcgtttttaaaattaactaattataaatgtaattttggcatgtttttgttctgcaggaagaatatttaaattaattgatggaattttatttttaaatgaattttatttgggttttttcaagattttgattcttagtgatttttaaaaagttggaatggtaccaataaggaaaattaaagattttcactaaaaataatatttttacataaaattttcggttgcggggggtctttaggggttgctgcccctcctggcaccgtttttatttgtctaaaaatttttgatagatttctaattttatctttaatattatattgccccctccctttttttttgcagaatttgacccaggaacaagcgcaatactgcaaacagcgcatgaagccctacgtggacgcggcgtccggccgtaccattgaaaatgcgctcgattttgaacagtttgtgcactcaatgttcatgaac

SEQ ID NO: 51334 - DNA, 847 bp, Heterodera glycines
  unsure (1)..(847): unsure at all n locations
tgtggccaatgcaatttttgtgagtttattccatcttttttgtactttgattaacccagaaataacacagaaatgtgacgtcgacctacgtaaaactctctatcagaacattgtgctcagcggcggttcgacaatgttcgccggattcggcgacagacttttggccgaagttcgtcctccccttcctcagggacggacggttccgggggagggtacgcgggatacgtacccccttccccccatacccctccacattcggaactcgcctgtcggcaccgccgggacgcggggacgggacaaacgccaccaaattaatcaaattttaaaaagaaattttttataaaaaagtcaagaaaacaaataatagtaattcgtcataaaatttcgaaaaccgataaaaattcttcaatttttttcttgaaatttcttataaataaattttcttagatttcacgaaaaatttcttttgtaaatttggaatgttttttaatccccgcgcgagattttgaggtaaagccgccggacaaatcctgttgctttaaaattaaaaaaaagtagtccacacgaggatggtatcccctcccgaaatcccgggactgtcccttcccttcccccccctccctttttttattcccattttccgtcattcacttccctttcgttttgccagatgaaacggctctgtccaaaggatgtcaaagtgcgcattttggcgccccaggagcggatattctccacttggattggcggttccattttggcgtctttggacacattccgcaaaatttgggtgacaaaacaacagtacgaaaataacggaaagataatcatggcacgngaaactttt

SEQ ID NO: 51335 - DNA, 533 bp, Heterodera glycines
atggcactacaacacaatgccaatggaagaagaaaattgaataatggcattttcttaattaaaattgattcactgataattatgaattgtatgtcttcgtgattgccgcggcatatttatatttgtgaaggagatacttaatggacagttatatgtctacaagaatcggaaaaaataattagggtaatctttgtaaatacaaaacaggaaaaataaataaagtctaattttaaatgaataataaaatgaatttttcgtgaatttaatggtccttgcatatgaataaaatatgaaaaaataatgagttttttcttcataatattcaatgacgtaaaaagtattatttaaaaataaaataaattattgtttgagcttttgcattgacatttgaaaagcatgtgaatatcatttgaattacaatctaaagcagatgaattgattgacgtcaaattaaacgttattacgagaaaattatattcaaatgaatattaatattatttgcaaaattggaaaagaaaaattattataataaa

SEQ ID NO: 51336 - DNA, 1365 bp, Heterodera glycines
atgagaaaattcatcgtgagtattttgcagtaaattttgaagaagcatcattaattaattaattaattaaatcatcattaattatttaattatttttgtaaatttatacttaattttcaaatgaattttctttcttatttttattaatgttattaactaaggaatgctttaggaacagctttttcagcggcaagagcaaatgttggccaaaattgacgagttacaaaagtccgtttttgcattaaaagaaggacagagctcaattggtgggttaaatgaatgcttaattgaattaatttgtgaaattattttaaattttcattttcattggggaaattatcggaagtttaaaaaatttattgacacaaaaatagggttcgagccccgtggcgcctatcgacaccgccgggcccgaatttaaccattattttttgaaaatttgacccaaaatggcaaaatctgcgattttcggcgcaaaacctctactaattcctgtttttgcctccgtcgctgaagattttggaaatattactggtgcaaaaaatttttgttggcccgaagagcaagaaaaaaaaaaagctcttcgagtgccctcgccgaaatttttttgtggatacgggcctggcccagttttaggcaataagccaatgtatcaaattggcattgaaagcgccgctatgcgttttcgtcgggattttttttgagttactaaatttttgaaaattcacacagtttaatagggaaacgaatctttattataattcctaatctgggtggttttgttattcgataactcagaatttcaggaaattcgactttctcgtgcccaactgtcccctttggttggtgccaatttggtgcggcgtttggaaaagtgtggcacggccggcgaggcgatgaccgaactgttgaacagcgtcgttaaaatgtaccacatcattgaaatgtaagtccggtgggaatccgtcacggagtacctacccccccctcccccccccccctcacaaggggtaaaatttctaaaaagaacagccaaataacgggctattaaaaagacttttccagcatttactcccccttcccaagtctcaaaaacccaaaattatgggactatccgttttttatcttggacatcttttgaagggcttaaatgcaattaaatttaaatcttcaaataagagattttataattattagaattttaacgcagaaatctttttttgagcccctttattcaaagcaaatgcgatttacaagccaagtcatcaataagcacttcaaaaactttacaggtataagaagcgaaggaaagaattggacgagcgattcaacgaagtcaaacgaatggcggatgcaattaagtga

SEQ ID NO: 51337 - DNA, 1063 bp, Heterodera glycines
  unsure (1)..(1063): unsure at all n locations
atgtacaaaattcggtcaaaaaatttattgagcccgtttattaataaggtgagctatgccattatttattatttatttatattattatctttttttccattattttcttatntaatntaaattggtttatactggacttggaaaattgattttttgacgctttccggcgctttttagcaccgcgaatttttccattccgccactttttggcgccgttgttttccggccattttttttcattgtttgcggaatccagttctagtttagcctctatatggcgttagtttttttgttgttgttgcgtattttccttttttttgcactaaaagcgcttacgataatcacattgctgtacgattttctaacaaatattacagtacgcgttttacagttgaacacgtacagtaattattgggatatcgccgcgtgtcaccccaatttgctcatctccaactcggcatcaattaatgctaatgccccactgaacaaagcacagcagctactaaagagcaatatcttcacagctggcgctgcgattttggcaactttgcccggatatgtgcgcaaaagtgtagtggtcaagcataacgggaagaacagcggtaaatgatggtgacgaatgttcgagagtcaatcccgggttttctcaattcgagaatttctcggcctttttttatctttcatagccttgacggctcgagatctgtttttgttgattagaagtgctccttatatatttctgtcgtaattacctaaattattttatcatttaaattgccaaaaatggaaatggaaaaaactttttcgacaaccaatgctaatgataatcaaagagttatttagttaaagatttttatgtttaattttgcggtttttaatttatttttattttagttgaaaattaattgtattttcttgcataatttttgattttaatttcattgttttgtttgttttaggcttttgttctgtgttttccaaaatttcaattccaaatggatcatttttctattacgaagttacgattctgcacaaacattacgagtatgttaatagttaataa

SEQ ID NO: 51338 - DNA, 92 bp, Heterodera glycines
atgaggaagatgacaatgttgatgcagcccatgaatgccgccacgtgcagcggtgccagccccgaatgggtggtggcatcgacgctggcatg

SEQ ID NO: 51339 - DNA, 59 bp, Heterodera glycines
atggcaaataaattaatgcgcattgcttttgctttcactccaaattcaatggatgaata

SEQ ID NO: 51340 - DNA, 231 bp, Heterodera glycines
ggagtaggcaaaacggtcgtcagccgaaacgtcgtcgaacgaatttttcgaccataacttttttctttctcaaccaaattaaacattcttggtattattcgaaagcattcgaaaaatgctattagcctgcaaattttccaaaattttttatttatgcacaaaaaaatcagagcaaaaaaagttcgaattactggggtttttgattcccttctgggcataacttttttgaaa

SEQ ID NO: 51341 - DNA, 548 bp, Heterodera glycines
atggggaattggtcggtaggggtcagttggccaagcataaaacatcataacatttttcattggtggtaaatttttataaatttggcatcattcgaaagctctacatgcttagaagcttttggtaaacaacttataaaaaagttgcaacatgaatactaactacgggcctgaatagttttaataatggcctttttgtttttaaaaaaaattttccacataaatattttacttaaaaccaatcaattagagataatttaaaaaaaaagaatttttttttaaatttttgttatctttagaaagattatcgaatttcactgcccattgtttcgaaaatgagagaaaattttgtggctaaatttttgtcgaaataattgggcaaattgaattacccatccctcacacattctctgtgttagggggttgtactatgttttgcccgcaaatataactaaatttaatttgtttacgcggccggtacattctgttcaaccaaatttttggggcaatgtaatttgatatttaaatgaaaaaaattaaatgataataaa

SEQ ID NO: 51342 - DNA, 3829 bp, Heterodera glycines
atgacgagcgtttaggcgccgcttcgcggtttgaattttctactacaatcatctcgtttaaaattaaaaaaaaaacatactattttcaataaaacatccttaaaaatgaattttttcttgtcacttttcccaattttccgtccgtccgtcccacatgagcagcagcagcagaaagggtgtggtggtcgtgaaaaaaaataaataaactcctatttttggcaatgtgtgcttccgtccgtcccaccccccgggggttaagttaataatcgtattgatttggtgggaggctcgggattcagctgccaactcggccgggaacaacagtgcacagcaccagcaataaaatgccccaataaacattttcctctcccctctccatagtccccccccacatttgtttgtgcccatatttttgtgccgtctgtttttttgtcagggatgaaatatggtggtgtttttcagttttttggacactccaattttcggaaaatctagaaatcataaaaaataattaaattaaattacataccaaatttgacattcattaacttgtttttgctttgatgaatacaaaattcgtgattactaattaatccaaaaatcctaataaattcgtattttcgagttttttaatttttgaaataattcactcaaaaaattaatattaaaatattttaaataattcttattttattattttatgatttttaataaaattttcattcaataaaattaatattaaaatattttataaaattttttattttattgccctataatgtttaaagaaattttcttccagtaaaattaatattaaaatttttaattctaattttattatcatttaatttttttcatttaaatatcaaattacattgccccaaaaatttggttgaacagaatgtaccggccgcgtaaacaaattaaatttagttatatttgcgggcaaaacatagtacaaccccctaacacagagaatgtgtgagggatgggtaattcaatttgcccaattatttcgacaaaaatttagccacaaaattttctctcattttcgaaacaatgggcagtgaaattcgataatctttctaaagataacaaaaatttaaaaaaaaattctttttttttaaattatctctaattgattggttttaagtaaaatatttatgtggaaaattttttttaaaaacaaaaaggccattattaaaactattcaggcccgtagttagtattcatgttgcaacttttttataagttgtttaccaaaagcttctaagcatgtagagctttcgaatgatgccaaatttataaaaatttaccaccaatgaaaaatgttatgatgttttatgcttggccaactgacccctaccgaccaattccccattggctacgaagcctgaaactatttaaggcgttaaaaatcatcaaatgttttaaaaaaatttcttgccgagcttatcggcgccggcgcctcattaaattgaattaattaaattactttaaaacctttaaaacgtttaaaaggaattcttatgaaaaaatgattatgcgcccgtcctccatttttcagaatgttctcagactctgaggatgaagcggatgatcaccaggcggccgcggcggagcacgcgcgcgatttcaacgagtccatcacgcaagggctgcgcgactcggccgtcgtccacctgatccacaccggggagcagggcgtgggcggcaaaagcagcagctcaatggcatttgacaccacggacgctgacctggaggcggtgatcaaacgagcgcaggcaatcaataatcaatcaatcatttgattaagtatatcactgagacataggcaattaactaattggtacagaaactaataaataaaacacagttcatatgtcgggcgggaccctttttactcttcgaaagcctaatttttttttattgtggttgcacgccaaattttttgcacgctttggctgcaattaaaaaatggagagaagcggggtccggcacatgcctatttcgacgatggaaaattggaattttttgacagaatttataaagaaaatcgtcaaaagtttcccttttttacaagccctaccccttgcaacagacggcctttccccccccccctcgaataaatgcttttatttttcagaatgccccagtgacaacggcattagccgattccagctttgtggagaatgggaatgacgacaatgtggcactgagtcgccacgatctgatccaaccgaggtccttcctttttttgaaataaaattattttataaaataataaatttaaaaatattttttatttcagcaaattgttcatgaaaacgtgggtataagttgacaaagtttacttctttttttttcatgttttgatatttttttcgtgttttgtgttttaatcccgccaattttttattcaaaagcaattaaaattgtaattaaattattcgaattgattatcccttaaaatttttttcttccctggtgtggttttatactaaagtgccaaatgtgaattggtttaaattagagttcaacattttgaaaaaagcatggattcctggacaaaaatacaaaacattcaggctaactcgaggcctgaacctgagtttctggaaatttgttttaaaaagcaaacagaggtttgaaaaaaatcaattaattttgaacacctaaataactaattacataataaattctttttaaatctattctaatcattttttgaaaacttgaaaaaaaacatcggttatttgaaatgataaattctaaggttttgtctaaaaaatccaggttgccgaaatatggcaggacctgggttcaggaaaaaaaccaagcctgggtccaggtcgagctctagtttaaatctaaattaaaattttaaaaaaatatattttttccttttcgattttatttggcgcttttcatattttccccatttttctatacatacaattcactagcttttccgtctgtgttttgtacacttttttttgcttttttttcacacaacccattgtaattgttggcttaattaccccccccccccctaattaagctttctcgtctcatttttggtggatgcccgcgggggcgcaatgcgcggctgccgtcacagcggcgttcgtgtgattattccaccgcgcaaggcagcggcaccaattcgcatcacatgccgttacctaaagaaggtgaattaattaattaattgatcctttaatttcaatttttatacttatgaaattatttttgaatttgaattttcatttgaatttattatttataatctttgttttttttaattataactttttcgttttaattaattctaacaataattaattagcttcaattattttaattgttttgatcacttatgatcattcggcttaatacaaaataaaaattaaatttatttttgaataaaaaatttattcaatttttatttatgaatattatttttaattttgcgagaaaatcccaattttttaagttataataaacacaacaatttaaaattcttttttttaaagtaattattatattatttgtaatttctttattaaataaatttaccattttctcaaatttttaaaattgccaggaaaaactgactcatccgccgccgttgagcgagggcgaagcgcttgcctcgcgcattttggagatgggcccgcacggggccaaattccttggcccagtgattctcgaggtgccccattttgcgtcgttgcgcggccgggagagggaaattgtgattttgcgctcggacgatggccaacattggaaggagcaccaattggaagccaccgaagatgccgtacag

SEQ ID NO: 51343 - DNA, 1120 bp, Heterodera glycines
atggatccgagaaacggcttttacgacaaaaatgaggacaaagtgactctggccattgatgtcattgtggggcaagcagaaatggacagaccaatttctgctgatcaaagcaaatcgaaagggacactttttatggacattgaaaaagtgtcacaatttgcgcgagaaatcatttggagtgagcgcaaaagcgaaactgtgacgtgcttagggggacttccatggaaaatatccgttcaaatatttacgattatgggaagtgccgtcaaatgtttgagcctttttctttgttgtaccgctccaaaagaaggtgaaattcaaataatcatttgaaattatatttaaatttaagacgaaaattggagagccgaatgttcggcaaaattccgaattgtttcgcaaatgagcggagttggggaattcagaaaggaatttgagcacactgtttttaatagcgaaacgaactgttggggattccccgatttcatcacatttgcggtgagaggccaatttgacattgcttaattgacctaattatgacaattaaggaattaatggacccgggccgaggcttatacgacagagaggaggacaaagtgacgttggccatcgatgtgactgtgatgaaagagcgaaagggcacaaaacgaaaattggccgttggaaatgcccacccaatcattaatttgacataattctgtttttgtctcccatttttctctcattgaattgattaaaaataatttaaaggattgctttttagaattagtattcttggactggctaaatactaatagaaacggtgagccccctgttttcttttaaactttttctttaaaatttacactttcaatgaaattaaattttaaaaaccttttttcctcaaaattccagtccaaaaaattctgacgccggctacaacaaagaaattgcaaattttcttttgaaatagaaaaaaaaagtaaaattccgtaatggattttgaccacgtccatcatgtagagagagtaatcgatttactcataaattttcgggattttatggcccagccaagtaacagtttcagaaaaaatataaattaaaattaaaattttaaaatattttgataatttaaatcaca

SEQ ID NO: 51344 - DNA, 910 bp, Heterodera glycines
atgccgaggaaggaaaatgaagttgaaagcaaagtcagagaaagaaatgcaatggaaggaggtgagagagaggggagaggaacgaaagaaaacgcaaaaggaaaattagagaaaagaaaagacagacggaaagaaaaaaaggaaagtcggacgaaaacaaaaattaatgaacatttaatcttggccaacgaacagactttggttgaggctgtttgtggttttggttagcttcacgcaagcctatgcatttagtgaatggttggaagcgtacgccaatcggcgctgggcggaaagagggaaaacaaacaaacaaacaaatgtatatctaaaagaggcttccatcttgcataccaaggatcggcacgaggaattttgatctttttttgtttgatttttcgcatagaattcagagtaggagttggacataaaaaatacggacttaaattttgccaaagaattaatctattcaatgcattgtaaatgaaataagcacggctatactttataaaaccagatttctgggtaataaataaatttaaaacgggagaagccgtatttaacccaaatcagttcaagatttattcccgacacctttgaaagttggtaaaaatattttggtagaggaggatataatatattattaaaattacggtgcaccccaaaatctcgccgccgaaatctcgccgccaaaatctcacctcctcaatctctccgtccttaatctcaccttcccaaatctctcccaaacaaaatatcacctcccaaatctcacccccccaaatctcaccacaaatttcaaaaaaaaaatttcaaacttagaaatttttcaaggaaaaaattcttagaaaaatttttttataaaatttaaataaaaaaattgttgaaaaatttttcagcaatttttttttga

SEQ ID NO: 51345 - DNA, 1485 bp, Heterodera glycines
atggcagggaatgtgagggcggagggccaaaccaaaaaaatgatagaccatttaatggaagaacgggtcggccggcgatcattcagaagcggagccatttgttttcttttctgatcagtcaaagagcggatttgtgttaaaagtcacagggaagtaattttttttcattttaaatgtgttttgttttcttaaaaatcatatctatttattttggcatttcgttttccccggatcacacggctcttcagtcagtgcttttaaattcctctttttctctctctctctctctctccctcctttttcctttttcttaatcattaatttttgtccttctctgctcattactgtaatttcgttgcaaattgcgtctgattactctttaaaagccattccattaatgggggacagagtttaacatgaaaaatggttgaaagtcgtcgcgcgcttcggctgggtcgccctgtccaaataaattacctccgtttttgatggattgtcaatttccccccccccccattttgtccgcctttttctcctcacttttcgcattatttgttcttgtgaaatccaaaattaatctttgtcctcgacttttgacctgtccgatcattgagcattatttacctttaattaatttgcgcaattcgtttgtgtcggcggtttaattcgggtccatttggacattttacgctcaaagaacaaagaatattttattaaattcaattaacgatgataaataaatagaattggttcattttagttttacaatttcttcctttttatttgtttaacttttttaaaattcttttaactccaattcttccccattttagcttcttcaaagccaagtgaattcggcacgagggattttgatggatttgctgaccgccaatcggagggatttgtccccggacgttgccgcgtgtttgaaggcggtcaccgcgctgctgaaccccgccgcttcgcccgctgctcagcaaacgtacgctgccggcggatgcgcaaatgtcggagcagcaaacgccgccgtaagtgggcgaaaggaaaagccgatgttcaaaagcaagtaaaatctcgtattttactttttgctagtggaaaaatctgacaaattattgcggatgaattaattataaacggacgcattaatatttttaattaattgccatttttaacattgccatttgctcattcattctttcaactgtttgccaatgtgttgattctgttcagctgtcgttgactgaacttggcgtgccgtccgtcgtggagagtccgtacagtggcgaagtgcacgtcgcatcggtgggtccgatttcggccatttgccatttgttgttttcctttttaaatttgaaattccaatcaattatgaaaccgcctaattgtctatgaatgaaatttgataccaatgcgcaaaaatggaagaagagctttgcttttgaatccaaaaatgccggtggcttcttaagttacataaataaa

SEQ ID NO: 51346 - DNA, 232 bp, Heterodera glycines
ggaaaacaacaaatggcaaatggccgaaatcggacccaccgatgcgacgtgcacttcgccactgtacggactctccacgacggacggcacgccaagttcagtcaacgacagctgaacagaatcaacacattggcaaacagttgaaagaatgaatgagcaaatggcaatgttaaaaatggcaattaattaaaaatattaatgcgtccgtttataattaattcatccgcaataa

SEQ ID NO: 51347 - DNA, 2386 bp, Heterodera glycines
ccccccgaaattggcgcactgcgctcgctggtggagctgtacgtggacgagaacagtctggaacggttgccagacgccatgctccgttgcacaaagctggaacagttggacgcctcctccaacaagctcttcctgttgccggacgagctgggcgaactcggcgcacttgtggacatcaccgtgtcccacaactgtttgcgcgaattgccaaattccattggttcgtgcaaaatttttcaattttttttttgaaaatttcttataaaaaatttataagattttttcttgaacatttctaagtttgaaagtttttttagaaaaaatttggggcgaaattttgtcctgtttcgtttcctcaccccttcgaaaaattaaaaaaaaaaatattttttttcaaaattatcaatagaaaatttttatttgaaaaatttttcgagcgattttttacaaaaaattttcgatgaattttcgaatggacaaactaggtctgctcttctgtcagttcaaaatatttgtcagaaaattatttaaaaaaattttttatttcattaaattaacagtaataaatttcaggtcgcctgaagcggttgatgattcttaagtcagttttattttatttatttttttcggaattttaaatcactgacatttttcttggattaattggcttaaaataatttttgtatatgtattttttttacaaattttagagccgacgacaacactatcgacaccctaacgccagcaattggcggctgcacaagcctgaccgaggtgtacctgcagcagaacttgatcggcgaattgcccagctctgtcggcaatttgaaggcatgtaaaaaaaaaagttctaaaatttttcaacttccaaagtgccgtaatttatgaaaaaataattttgtcagacgccaaagcaagaaaaaaagccgacaattaaaatattaatttttaaaaaaaattttttgaaataaaatgccaattgatacacaaattttctggacaattaaaagtgggagaagttcgtttcagttctagcgatcacccttgaaatttttagaaaatttatgaaaaaaaatgaataaatttccgaaaaattttcaccgagtttttcaaaattttatgcttaattaataattattcaaatatttttccaaaaaatcgctgaagaatttttcaaagatttttttcttgcaatttttataaagaaatttcttttttttgaaaaatttataggttaaatttaaaaaaattgttggggagggttgagggaacgatacgggagcgaaaactaatccgggaggggggaagaacccaccctaaatccgccctctccaaaaaatttatacaaattttttttcccattccaggccctgcaaacactgaacatggaccggtgccaactgcgccgtgtgcccgctctgttgggcgaatgtgcctcgctgaccgtgttgtccatgcgggacaatcagttgcacgagttgcccatggaaattggcaaattggcacgtctacgggtgatggacgtgtgcaacaaccgactcccgcatttgccctacacggtcagccagcaattgatgattaattggttggggaaatgggggttgatcaatttcaattttcgatggaattggcgattggtcggtctcccaccccctgaattttggaaaaaaaattcccaaattttaattattttttttaaatatatgtcgagaattgctaacagttggacccaattgggaagcagtattcattttttgcagagaaaattttcgaatttgtaaattctaaaaccttttttctaaaaagaaaattaaaaattttacaaaaaatatttaaaaaaaattttcacggaaagtataaaaaaagattaaaaagagaatttttatacgaattctcttaatgtttttattagcaaaaaattctttatttaaaaaatttatagaaaatttccgaaaactaaaaaattcattttttaaatttttcactgggtaggttaacggttttttttggagcgaaggcatattgatgcactccgataggtgtcgtccgggtatagttttagaatttactcaaaattttcaaggtaacaaaaaacaaaatcttccccttcccctgatttacgatgtgcctgtgatagaaatgccttttttgtgccattcggttcaaatccccccccctcccctgtttgtcccaaatttaaaaaaaaaaattttttttttcatttttttgcagctaaatgtgctgcacgagttgcaagcgttgtggctgtccgagaaccagtcccaagcactgctccgccttcagccggacaccgacccgcggaacggcgtcaaagtgctcacctgctatctgttgccccaacgggacgcatccgttggctcaaatg

SEQ ID NO: 51348 - DNA, 383 bp, Heterodera glycines; identical to SEQ ID NO: 51114

SEQ ID NO: 51349 - DNA, 742 bp, Heterodera glycines
atgaaccaacaattgccgaataagcacaaaagagatgaattgaagcagcaaaagaagcagaaaaaggtcacttttcaggagccaacgaagaaggaagaaaatgcaggagacaaaacggaggtaattaataaataaataataataataattcgtaaatttaaaaatcagaggtcgcgttgtgcgtattcctaagacttgtgctaattttaaaaattccaatatggaaatttatgaaaaagttagaaattttccatgcgtttcatattcaaagtttttaataaattttctttgccaattatttttctcaatgaaataatttttttttcgtagaaaaaacaattaaggcatcaaataatcgattttatttttattttctcattattaaaatgattttttaatttttagtatcaaaacagggttaggttactaatttgaggcttttgtcgtttcttaggaaaaacccgcaaaaaattcttattaacaaatcgcattaaatactccataatttccagaaatttcccaggtctactctctaaaactcttttaaaaactgtcaaattttgaactttttagacaaaattaattatgtaattgcactaaaactccaattttttcttacaaaaattggctaaaaattccgaaatttgtggagttttggacagaatcttttacttcgaacacacttctgtggatttcacctcatctttttacccttttaaatcaaattaaatatttaaataaa

SEQ ID NO: 51350 - DNA, 6685 bp, Heterodera glycines
attaaccttaataatgagaaaggacttaatcagcaacagaatcaatcagaaaaattagattcaaatgctttgctgtccaatttttattatttttattaatatgtagattgggttaattatatgattaaccagaataaaagaagatacacaagtttatattaatatattataatattttattgaactctcttcatacataagcttaatattaaatttaatttaatttgaattaaaaataaaattcataatattttcccagtaaatatgcaaaagttttctaatttattaaatatcggattattacactttaaatttctctctgaaaattgccgctgtcaaaaagagttaattggcattggtactgaaatatttcgtgccgactgtgcttgcgttttgtgccaatggcactcaaatacaatactcagttgaccgcgaataagtgacaaatcaatgagcacaaagccaacattttatgtttcaatgcctggagggcattgactaactgaagaaatgggcctttgtgccgagtgttttgcttctcggcattgaccattcgcaagctgctaatgagcgaggagcaccaagagttcattcttcaagttagttaattttttaatgaaattaattgtgatttattattcctttaattaatttttatttttcttgaaaaaagaagcgaatattttttggaaatttaattatttttcatttgtccctaaaggccattgcttttgacaatgctgaactgctcgccgagcttttggctgcgcggcctctgctggccaattgccatgacgcggacggaaggatgccgctgcaccacgcggcggctggcggacacgcgaaatgcgctgagattttgctcgggtccggaggtgatttaaaatttttaaattatttttaaacttaatccccctttttctgaattcattttttccagctgacgtcgatgccgttgccggtccgcaggacacagtcaaaactccgctgggattggcctccgccatgggccattgtacggttgttcatctgctggcagaaaatggtgctgaccttttttatgtggactcggatggccattccgcgctccaattggcccaaatgggtggccatgaccaagtggccacgctgttaattggcataattgaacgaatttatgccgaggcggaacggaaaaatcaggcaaaaattgggaagcaaataaaaatggggggggggggaaattttcacttccatcggcaccgccggccccttgtccctaaaaattatctggaaaaagcgatcgcaaaaaaagtggcttaatggaggactttgtaaatgtttgatctccccccccctcgtctgggcaatttactgataatttgaaaaatcattttgcaaatttgtcggttttatataaattgtgccttttcagaggctttgtgctgcttgtgttgatggcgaggtgggccccgtgttggacattttgtccgatttgggcccgaaaagcattaggaaacaaattttgaatgggcgatatccgggcgaacaaaagtcggcactgtttttggcggccgaaaacggcagggcggaaattgtgcgcgcattgctcaccgtacagtaccattccatcatttttgagcccagcggagacacggtatggacataaatgtgaatttattactatatttggaaaaggctattaattttgcttcataaaattctttttttatgtttaccaaaaatttttcatttcggttggccttaggccttttatttttttgaaaagtttccagtcataaaatcctttccattgttagcttcttcatgccgcaattgcctctcagaatgtggcaactgttgagcagattttgcacaaattcccatttttgatggatgccgtaaatgaggaaaagaatttgccattgcattgggcatgccggtaaagcaaataaattaattaataaaagcatctaaataaatggttagtttctctcatttccgatgcggaaatgcgcgcgtcgttcaggcacttttgagcgctgaatatcccgcggaggaattgaaatttttcgcgtttcggcatgaccgcgccaattgttcctttggcaatggcactgggacaaacgaacggtgtgaggatggctatttgtttgtctgtgatctgaatgctgttgatcgggaggggagaagcgcgtaagtgacagaagaaaacaatggaggaatcactgatcggagggggaggagagggaagtgatcagaaagggggataagtgatcacaccattgatcagagtgggagaagtcagtccgttcgaaatttatttgaataatatagaggtttgaaataaaaaaatggagaaaaactggcagagaatttgagccaattcatacaatgcaacaattcaattttaacaggttctttttggccgtaatggaaggccattctgaagttgttcaactgctcgctaaggttgtcaaataaaataaatataataaacaaagaaaacataatttaatcttaaactcattaacaaaaatttgaaatcttttgagttttactaattttataaataaagcaatgaattccataaaatgatttcattttctattaaagttcaaattgccaatttccaacggcacgcgccaccgcagagaaatgctcagaattgaggagaagcaaaatctgatggaacatccaattttgtttgatggacgagtaaatggcaaaactccactaatggtacaaaaaaagccattttgaaaatgtttatttttaatttccctctaatcttaaaaggttgcttgtgccaatggttccactgaaattgtcaggtattttcagtttattaattaattccctttctgtttatttttaaaatatttgcttgacaaattcaattaaattgccaatttttcatttacatgaggccaaatttgatcagaatttgtcagaggaacgtttaattgttaaagtgggaaatgaatcagaacacaaataaactagcaaataataatttccttgcagttgacaattttgtcgtaattaattggccattcaaaagaaaaataacaatttcacgtcaatagcttatgttttctgctcagaattttggtcgaacaatgccatgtcgacgtgaattattctccgccaatgagcggcggtgccggagaaagtggcggcggtgctttggccgaagctgcaaacagtggccatttggaggtgctccaagcactgttccaccaaggggcttttgactacggtaaccgtactctgagagggcggttggccaacgatagtgggcacagtaacgcggcggaaatggtcggccttttcctgcaacaattggtccatcatgacaacgaaaactgtgtgaacagtgcaaggagtccacggcaaaagaaggaacatgggcaacaacagcagcaggtgaagaagatgaataaatggtcattggctaattatcttttgcatttcaaggaccattctctagcactgccctttgtcgagagtttgttgaatgcctccaacaaagtgccattgtcggaccatttgccgtcaacaaaaggctgccaattgaattggcaatccaccggcattcgagagcttcgctcagaatggatggtcgatgcagcgcttaaactgaacccgcaaattccgcgccatttaaggtcgccgggttaataaatgccatggcattggcactttctccgctttaaaaaacaaaatttataatttagtaaatcattggcacttaatgccatctcacgcatcgatctgtcctccaatcagttgtgctctgtgccccatattctattcacccatttgtcctcgctccgttcattggacctctccaaaaattgcattccgcgctttgaaataccgccggatggtgcgaattggcaaatgccgagtctggacagactttgcctggacgaaaaccaattggaggaactgcccaaacaggtggacaccaacactggcatttgggcatttagctaagagccatttcaaagtttaatcccttcaatttaaattgtctgttgctctcagctgttctcttctgtccactttcctcgcctttgctttctctccgccactttcaatcgcttgcgccgattgcctccgtccgtttggacagcgccgcgtctcctcgagttgcacttggccaacaatttgatcagcgaactgagtgcggctgctctttctcagcaggaattgcgcaggggaagccatttgtacaggggcacgggcaccggaggcgcgtcggcggcacgcatttcacggcaaaaacagcgtgaggcggtggacggaaggtcagcaagggaaaccgagtcaagactgggccgaaaatccgagggtcacgagtggcaattaagacgcgtctcgaacaatcaaaatttgagtgttaatttggctgctgatcagtgtcaaatttggttagcttagatcgaccgaaatggacgaagaaaatcagcgacaaagtcggacaatggcgaaacggagggaatccccgacacagcaccaacagagcagcagcagaagggagtcaaggggagtcgcagctggcgaacagcaaacgacgagcaaaagccaatcgacggacacggaggaggacaacgcaagcgcaactccgaggggagcggcgacaaacgcagcaacggtcgtggagatggacatccacaggtgggcgagaggcgagagtcagtctcgaccaaattcattcccacaaaggcaacattcacaaaactgtgagtgccattcattcaccagcgaactatggctgttttatcgcaaataaaaaaatttacaatttcggtatttctgaccaaaaaccgtaaaaaaaagcataataattaaggttaaaaatattaagaaagaaatattaaaaagcataaaaatttaaaacaaaaataaagcaaatcccatatttttcgaaattacattaattttaaaaaatggaaataaatatctgacagattggtcgacaatttttaaattttagggtgaatatttggcaagagaaaatccacctgtccaacattgacgaagatgggccgacggtggcgaacgaagaagcgaccggcgatgaattagcggcacagaaaggcaatggcagtggcacaacgcgcagtcaaagccaactccaacttctgaacctggcacaaaacaaagtcatttaaaggcactaaaaccctaaaaaattagcgttcgttcagtttggccgaatgcccacctgcttggcctgctgctgtccccgtcttgccaagttggacctttcctccaattcgttgtcctccctcggccccgtcggctgtttgccgtcggcactgcgccacttggatgtgtccaaaaaccagctggtccgtctttttgggggtgaaaatccggctcagctgaggcaaaagctgcgcttttgcgaggctcagtccgaatttggaattgccggtgcgaaaatggacggcggtggcggtggaataacggcgggcaatatgccaatgccaaggcattcgagtgagtgccgaaaagacaccttaacatttgtgacattgctctcttaaggaagtcgctccaaatccgtggccagaagccaacgttcgttgagcgttgtgcgaaagagcggcggcggcgttggccgtgctgaacagcttcaaaatgagcaggaattgttgctgagctgctgcgtgcacaaatcacactgccgttttgaggcacttaaaacgctgaatttggcacaaaattcattggaatttgtggacattttgctgccaatgggcggaggttgaaattaatttggagaattttccgaatttattttttaattgattgaaaactcaaaaatgaaaatttagttttaatgccaggaaacaacacattgttttccggcactgtttcaggtgatggtgagaagctgttcaattggagagaaaattccgaattggtaattaattacattttttaattaactcaaacacattttgaaatttctgatcaaatgatgtttgataatcttgcttagtttattttacagaataattaccttttgtaacttattaatctattttttctctcttgtttttgtctaaaattaagcgcttttaattacaagattcatctcttttgttgtcgtttatcaattttaattgttattaaaaatttcagcttaagccatatgtgctgtttccttcgttgaccaattttgacctgtcgttgaatcgaattcgtcaacttccgaccacaatttcattgctcggctccttggccatgctcaacttggccaataacgtggagctggacagtctcgtgcccgaactcggccttttggagcgcctgtggaccatcggcctcagcgggtgccaactccgagcggaggaacccacgctgcaagcgatggtccaagcaggaagctacaaaacgggcgaagtgttagcgcaactccgacaacggcttgaaaagtgatgacattgccgggggtaataagtgtgataaattgtggcacatatttaaaaatggaaattccaaggcgattttcatgctgccccatttctctaatgtcctgatgatagctgtggcaatttcgagttagttttttcgtttagttcgatgccgtacccaatgctcaagctgatgttgcttggtgcctcgtctgtcggaaagagcacacttttgcaacaaattcgccttgaggggacactgtcgaagaagc

SEQ ID NO: 51351 - DNA, 1508 bp, Heterodera glycines
atgggcggagtttgtggaaaaagacgaaaaaattgggacaaagaaatggactgcaaaatgggatacaaagatgtagaacaaaaacttttaaatggcaatgcctttgcccatttcagcgcgagtaccaatccgtccagcggtgtttcttcacccggcgctgtcttttcctgctgttgtggaaagtgacggacggtgacattgcgttggccgacctgcacgactttctgctggccattcaggcacaggcgccgaacagttacgtgctaattgtcggcacacattcggactttgtgcgggagcaacctcatcgtttccccagtgactatttgagccaaatggacaagcaaatccaggtaaattgagcagagagataataaatgattagaaaatcagggggaaggcctctgatcagtaaaatgattggaaaactataagaaatgatcaatcaagataattgataactgctgttgaaataaaaccaccaaacactcgaccacaaattcaataaaatattcatctgtcgcttaggctgttaggacaaaggggcgggcaaaggatgaccacagaaatttgggctaagaatggacaaaaggagcagagggaacggcaccgaatatgggcagggtgaagaagggcgagacgaatatccaatttaaatatttatttcaaatgaaaggcacaaaagtgagtgatgatttagggattttggtccccttttatagcagaaaagaaacgtgggaggagcacttttggggaacaataagtgggaggaggcgtgggtggagtactttttttaggaaaagaggaaagaacatgatgaataattggacagaaaaacagaaaggacagagaattaccaaaaaaaccacaaattcaacaatctcacaaaatcgatcaaaggccaattagccaattcaattttttccgtcggccactgtgccgacatcatccaaaaatagcggtgaaaatttctcactgcttttcctttttgagcaacgcttcattttgggtgccgatccggagaagaacggcgttccacgagtgcttggatctctttacatttcgtgttgctcgcgcgaggatgtcagatcgttgtgtgccctcatttacacttgtgccacagaaattcggcaattttcacggggtggaggcccggcacggcagcgccttttggcacagaaagttccggcttcgtttgtattgctggaacatattgtggccgcaatggtcagaggacaaactccgttttttgccagttttgctttaaaatacttttgattcagtcagacgaatttcgtgccgttggcaaagagccaataatgcatttcaacgaattttggagtttggccactgatcggttggctcagttggaagaacaaaaggagcagcagcaggacaaaaagactagcaccacgaagcctgcctctggcactttgcactttcgtggtgcccaggactttcgtcaggcgtgtctgttcctgcacgagaacggtccgacttacccgtag

SEQ ID NO: 51352 - DNA, 1634 bp, Heterodera glycines
atgcaccaaaattcggtcatcgagtccgtcgagctgtacaccgcactcaaacgggcagttcgccacaacttggcggtgactttcggttaattttaaataaatttgctcccacataagcttctcctctcttccggcatttctcggccctctgtcgaagtgtccttcaattcccacttccgtctcttccgccagtgtgtcatgaatttgctgcgaaagttcgaattggccatgccatttcaatatggtcgaatgagtcttttggcttcttgtctgcctgatgaatatgtgcttcgtgccgattacccgggctcaaaagttttggtaaaaaatctcttttttttaatatctatttaaatgctttgttatttcgctaaagatccgaaataaatttgacaaattgcgcattcggtggaactccgaaaaagaaacgacaaaagcaacggaattagtgccgataaaatcgacacgaccaatgcctataaaaatgtcgccaattcgcaattatttgcagcacaggcgactgtcccgcgcagtggcgacgtcaattgacaatttgaacagcacaaaattgacggaaaacaacggaacgggcgaaaatgaggagaaaaatgctgatctgatcaagattttggcagttgatcagtgcaaagaggtgaggaaaagccaagagcaaaagctgattatgggtgatgaattagtgaccaattaatagcaaaagcctaatctaatcattagtagtatccattgacaaatatgatcaatcaaacgacacttaatggtacaataaaagctgttagaaaaagctaatcattactgatcatttgataagttgtagatagttttttttattagcaatcacagtaatgaaagttttaatgacaataaactaataattatgatcactttatcattactcgcaaaaaatacggatactataggcttttcttctctaggagtgtcttcgtcgtctttacgttatgcattacattccgcccggcttttgggcccgtctcaccactcggctgctcgatgacgaacgcgttggcaatgtgttgaccaaaatgttgctcatttcccgtgcttctcctctaccgcagcagcagcatatgatgtcgatgacggagactgatcagcaacaaaaacaaccattggcggcactttggagcacagaggcaattgttgcggcattcggacgagcattgaacgcgggacgaatggtcaatttggcacagcgaccatcgatcagacggtgattattcgaatcacaaaggattaaaaaaatttcgataaaattcggactgagtgaattaccattttgaagagacgcttccgccgccgatgaaatggaaaatgtgccggaggaagagacttcgtttattgttgtgaattcggcggaggaaatgactgaggagttcgccttcaactccaataacaaaggcaacccgtcatcgtcgtcgtcgtcgggcgggacggtggtggtcaaatgctgcgagcgcggcgtggaggcgacggacgaacgttgccgcggcacaggcggaggcatcggaaaagttggggaagaactgggcaatgtgctcgaatggatgttgtggcgaagcggtgttgaggtgggcgaggcattttgggcagggtag

SEQ ID NO: 51353 - DNA, 330 bp, Heterodera glycines
atgaagcagctccttttggagaatgcgacagctgctggacgattggccaaatggcggaggacagcaaatgatccgctgaacggagcaaaagggacgaaaagcactgatcggagacatctgagaagagaatgcgctaatcatcagagttggatcatgccaatccaacaatcatcaacccaattacctcaattccgcgtacaattagcaccactccgttgcttgtgccaaccaataattgctcctcttcctccccctcgtcgcccttttcgttcctccatctttctttatcagtgccgaaagtactcaagtccatcacttccaacgcagtaa

SEQ ID NO: 51354 - DNA, 359 bp, Heterodera glycines
ttcattactgcgttggaagtgatggacttgagtactttcggcactgataaagaaagatggaggaacgaaaagggcgacgagggggaggaagaggagcaattattggttggcacaagcaacggagtggtgctaattgtacgcggaattgaggtaattgggttgatgattgttggattggcatgatccaactctgatgattagcgcattctcttctcagatgtctccgatcagtgcttttcgtcccttttgctccgttcagcggatcatttgctgtcctccgccatttggccaatcgtccagcagctgtcgcattctccaaaaggagctgcttcattcgtcaaccaaaaaagcgcccttgt

SEQ ID NO: 51355 - DNA, 1361 bp, Heterodera glycines
atgatatcgcctcattcaccgcccaacactgaaaggcattcctccaagaagcgatcactgctgatcgaaaaatcccgttcaataatgctcaaagcaactggtggtgctgtagccggaactgctgcaggaaacggcgaatgccaaggccaacggccaaaaatgagtgcttcaattccagcggaagaaggaaagcagcagcagcagcaggtgaagcaatagttaaacaattgagaagatgaatttataaaattatatgactagattttgtaatttttcagttaaaaaattattattttgctaatgaatgctttttcttgcaaattttaaattaatttgaaaaattattagctgatttttcgtataggtggctttcgatttactaaacgcgtcagtttcggcggtagacgaactgtgcgaaacggtgcggagcggaatgcgcggcatttttacgtccagtgaaagtgccgaagtgcgtggcacagtcgccgataaaggaggaggaggagaagcatatttcattagcattggcaaaggatataggtgagtaattaagcaaattttttaaatgattttttgattctattgaaacaatttctgaaaatatcgtttcttgtgaatgaagtttaatttaattatttcaaattgtgtttaaggcctcttctgagtcgatttgtaagctctgctgaactaaaagcattgccaaataaacacagcgaagaaaactgtgccattttctttcggtcaacgacagaatggacaacggatcagcagaagaactgattgaaaatgatgcttttcaaaaaagagcttgtaaataaatattattcaatatctcaacagatgctttttgcgcatatgtaaataaaagctaattaactgcgaaattaaatataataaatatatttatttttgttaagacaaaaaacacaaaaagaaaaccattcattaacaaggcaaatttttaaaaccgtcaagaggcttaaaaatgtcaaaaaaggcaacaaaatggcgaacataaacctaaaatggcaccgcgccgacccacatacctgcttaacttttattaattaactcagattcgtagttttttggccaatttgctaagaaattggggcaaaattaataaaaaatttatagttaattttttattgccaaaaaatttgggacagtccaaatttttgaattgaagtttttctcttatttttttttgcttgacttttcataaaattagttacattttttagtttttcgttgctggcgtctgtgccaaccaaccaaaagaagaagcagaagagccgtggtacatcaccatgatgagaggcagtaaagcgagaaagtgccagcgaatgaaaagcggctga

SEQ ID NO: 51356 - DNA, 1689 bp, Heterodera glycines
atggttaatatttattcaaatggcttgtatttttcaccggaattgttttttatttatttatttatcgataaagaaaaattgccatcagaagggcggagaccacttactctgatgactgatcacaataaaatagtctcagagtaagtgaataaatatcgagtgagatcacaggttaaaacaaacaataatgaaaaaataaaatggaagtcaaagtcaaaaaaaaaaaaatgcctcaaaagttaataattgctttatacattggtgctttgagaatcaagagtcaattctaataattttttaaaggtgtttaaggagctagacattaacgttttatcaagggcattccaggccttgactgatctgttaacaaaagatttggaagattttttagattgtaatttaacatttaaccggaaaaatgacttatttcgagtatttaggttagttcttttaaacagaatttgggtccaaatgtgtaaaaccatgtaaaattttgtaagtagttaggaggtcaaaaatttttcttcgtttttcaagagtagctaatttaaaaaattggagccgttggtcatagggaatattttttccaaaaattttgtgggacagagggggggggaaattttgaaaatttgaatgcaatttgttaacagattttcaccaaaaactgcctaatttttgcgattttaagccatgcaacgactttttttgtttataaaatgggtttttttacggcgcgctttttaaaaaattttttgaggataggggggtccggaaaaatttgtaatttttaatgcgagttgtttacagatttttgtccaaaaatgaccaaaatttgcgatttttggctaattttttaagaaaaatagtgactagtgacttaatgccataaaatttcaaaaattctcaaaaattacatttttaaatgacataatgccataatttaatcaaaatattgttgaaaattacaaagatttctcaaatttctttgattttttttaaacttttccaaatgctcattttcaaggacgtccttgccattcaaggacggattccatccctgatcttaatattttcagaattgctacgtataattaaaaattcagctcgatcggttcatgtgaagtggtcaaactcccaaaaatagggcgtccttattctaattgaacacactgtatagcgccgaataatttatttccctttttggcagtgggcacttgagtctcgctggaaatggatatttctgtcggacgaaacccaactcgtagtaggccaactcgtactgtttttcgacaaaaaatcgtcataacttttgttaaagtcgaccaaatttaacattcttggtatcattcgagagcatttaaccttctttatctatctgcaaaatgcaagaaaattttattgcttttcaaaaaagttatgaccaaaaatcgtaaaaaaaaattttttttgaatgtgatttgccagcagcgacatcagccgcttttcattcgctggcactttctcgctttactgcctctcatcatggtgatgtaccacggctcttctgcttcttcttttggttggttggcacagacgccagcaacgaaaaactaaaaaatgtaactaattttatgaaaagtcaagcaaaaaaaaataagagaaaaacttcaattcaaaaatttggactgtcccaaattttttggcaataaa

SEQ ID NO: 51357 - DNA, 842 bp, Heterodera glycines
atgtccttgcaaatcggcatacccgtccttggaaacggagcatggacgatggcaaccctgtttaaaccattttggatcaaaaatctgaaactcgaaaaatttggattttcgaatttttgttcgaattcagatccggggttcgaaattcgtcgaaatagatgccggattcgtgatcagcggcgacaccgaaaaccctgggaaacttgctttcatgtcttttgaaaacaaaaaaaaattcttcaaaaaaggggggggtaccatcgaatgtattaccaaattctctacaaattcgagtttattggtcctttttagccaaaatgcaacaaggtctcaattgggcaacacgacaaattttgcgacacctcagcagagcctcacaatgactttttcaacgccgcagaacaacaacaatttcaacaatgagataaacacacagtgggaaacacgacgaacacacaacacttacaaatgtccgttttcagaaccgtcgtgaagaggacgaggacgcggcagcagacagtcacaatggaaagcagcagccaagtggcgactgaagttgacgcggtgttcagccaagtgctgaatgtaagcgaatgccgtgaaagatggcaccgcttttctgacaatgagggggtttcaattcgtatttttccaggccaccccccccccaccagaaaaccaaagaattgtacacctttcacgttttagatccctcacatggacaacccgatcgaggagctgaaacgacaaatgcagaaattattcattcaaaaagagtcggaatgggccttcaaattgaacgaggtgaaaaattgcaaaaattcattgaaaaaatttacaag

SEQ ID NO: 51358 - DNA, 568 bp, Heterodera glycines
atgtctgtccaaccgaagctagtggtcattaattatccccttgggaattcttttggtgtatttctgaccgagccaaagccaatggaatggtcattaataaccccttggacgcattttgactgtataatgcccacggaagtgtcaataatatcccacttggaattgaggtcaagctgtgagtcaatgggggtgatttattgtgacagtgtgcccatgcaaaagaaccaagtcaaaggacccttttcgaagggacagatagtgtgtagctgttccctattgccggttaactttcagctgtgagtcaaaagggtgattaattgtgacagttgtgcctatgcaaaacccaacatcagatattctgggcttgagacggcgactcattttagtggtagtgtggcatagcatgaacaatttagttggcaacctggccaaatggtggtcgtataacccaaaacttatttgagggggtggtggtgacatggtgggcgactaggagggggtgggaaaataggtacttggggtcataacccaagcctaatgaaagatgaagagttgtagaaaaaataaa

SEQ ID NO: 51359 - DNA, 275 bp, Heterodera glycines
aaattattccctttattatgtttaattatatttttaataattgtcaaaattgaatcagaaaagaaaacgctgcaacaaaagtcatttggcgaaatatttggagaaaaatgggaagaaaaagaagaagaaaaaagaaatgaactcaaaaaaagagaaataattgcaaaatattataaaataaaagaaaaaataaagcaaaaaggaagaaaatattcagcaaaagaatggaataaaattgacagaaaaatagcgaaaaaattgggaacaaatcgaaa

SEQ ID NO: 51360 - DNA, 626 bp, Heterodera glycines
atgaaattattccctttattatgtttaattatatttttaataattgtcaaaattgaatcagaaaagaaaaaattgcagcaaaagtcatttggcgaatatttggagaaaaatggtaatgttattttataagttaagaattaaaaaaatatatattttttttaaaaatattatttataatttattggattttttataaaaatccacaaaaaatagttaataaaaatttttttaggaagaaaaattggaagaaaaaagagaaacaattggaaaatattataaaataaaagagaaaattcagcaaaaaggaagaaaatattcaaaaaaagaatggcatcaaaattatgccgaaatttgcaagtgtagaacataaaaggtaactcgcccggtgggactcgaacccacgaccccagcaatccgtgccgtgctctaaccaactgagctacgggcgcctcttttagaggttctctcaggtcctttatcccactttctcccacactccgttccttctggcatcacacaagaatggagtaagccgagaaacaattaagaaatggaagaaacaatttggaattaacacaacaaacagcgcataacgaagaaagaaaaaaattaaaaagttttgacaa

SEQ ID NO: 51361 - DNA, 640 bp, Heterodera glycines
tttttggttgctatttatagaaggggtatataaagggagtgaaaggaccatttgattggtacattgtatcaaaaatgcaaaaaccgataatcgtaaatataattgctctcgctaatctcggtaccggaattaaactaaactctctgacgatcaccgaatgcgaatttaagtataaccctagaaaattcaatgccgcggttatcaaatgtataagccccatcaaagccacggcattattatgggaatccgggaaaatgatatgtttggggacgaaaagtctgatagactgtgaaaatgctattaaaaaatttatagaaataattaagggctcggggtgtccggggcttcttacaccggacacacggttgaaaatattgtttcgacctttaaattcggacgtgaaattgaactgaacgagtttcgaaaaaatcgtcgtgcattttatgaaccagaaatattttgcggtttaaatttcaagcggggtaaaagcatgacagcgttaattttctggaccggtaaagtcataattacgggaactaaaaacaattctgaaatagaggaaatgtatcatcatattctcccctatttgaaaatggctcaaaagaagttagggagacgataaaaatttttcatttattgg

SEQ ID NO: 51362 - DNA, 3579 bp, Heterodera glycines
atggaaaattataaattgatggattatcaaacgactacttgccaaaaatttggatttacgaaaaatattacggaatttcggatcaacccggacgtggaacgccccgatgaagcgatgaaggatgcgatcgacaacatgataaaggtggctttaaagactacggaagaaaaaatgaagcgaaaagtgcggatgtttggagttgcaattacgggtgccgggcttgctttcccggtgtgggtgccgtatcgggcgtacccccagaataatgcggatgttatcatggaggagattaataagctggggcagagcggggacggggatgaaaataagaaaatgctgttgctctcggagcctattacgatgaaaattacatgcgttacaatgcccagtggagaggggccgaggaatgtccacaaatttgactttggattcaaggaacaccagcggatagggtaagtgttttaataaaataaaattaaaatagaaaaaaactaaaataaaaaaatcaataaataaatttaaaataattatttctaaaaaatttaatgaagcacaaaaaaaaaacttaaaatatttatttttaaataatttaattaggcaaaaaaaagtaaattttaggattgtgaatactgataataaattttgccttttttacgcactggcgtcgtcgatgaattatttaattatggaccgttttgaatttaatcgatttatgaaaaatattgtgagacagagggatgcagctattgagcttttacgtaattgtggaattgatggaaacgaaattagttatggtgtggagcaattgccgaatgttcagaaatattgggtgggttaaatgaaaaaatgcaaaattaataaatttttcaggatgagatttacccaggaaagtaccgggttgtggcatttgagaagtcagctgatccgcggaaatcgatccgtgttttgtggaaggcccctatgggacgagagaaggtcgtaccgatatttttggagaatggtcactgggatggtctgaagaattatgtctgctttttcaaccgtgggagaaagttctgcgttgaatgtgaatgtttttacgatcaggatgtttatcatacgatggattgccgggcgagatgttattattgcaatagagtggggggaatgccatgtgaaaaggagagtggagtgaagattgaatgcccgaagtgtcgacgttacttttacaattgggagtgttataattatcatcagggacatcagacttgcaaattatggaggcgttgcgttatctgtgacaagacttatcgatttaacccgaagaaggaacatgaatgtggtgagacttattgccagctttgtagtgtgagccatgaccccaagcgggggtgttatattatgccgatcgaggagaaggaggaaaaatatgtctacagaattgtagtttgggtaagttctacaaataaaatcaacaaaaataagtctttaactccaggattcggagacttcgcaggattctatttacaagggggaccagaaggagcatgttattaattatatttcggtgagagttacgtgtacggaatgctgtgatgacaaaaacaggatgaattgcaaaatttgtggggagaagaggatcaaggattggagcgaggcggagggacatgagccgaccaaggattttgtggagtggattttaactgcttttacgaattacgatacgtacatatttgcacataacgccggacgttttgacggtaatttcaaaatttaatttttaaatcctaaatttttaggtcattttgtttttaattacctctgccgtaccgggaagaacccgataccgcttatcaatggattgaaaatttatgaatttaaagtgcgaaactcgaagaaacattcaatgctgatatggagagactcatgcttattaatgccggtgaaactcgagtcgcttaaggcgaccttcaatttgggctgtgaggacaagccctttttcccgtattactacaataagaaagaaaattatggagtttgtttggaacatctgccaccaatggaggactattcaccggggtctatgaacaaggagaaatttgcaaaatttgaaaaatggtaagaaaagaaggacaaatcataataaaaattctttttcaggtacaacgagaacaaggggacgcccttttatttggatgaagaattgagaaattattgcagaaacgacacggagatattgctgttatcgattattgagttcaggaggatattgattaacgatattactaagggatttgacccactaccgaggagttgtacgaatgcgggggttgcgatgaatatttttaaggcaatgtttttgttgacggagcagttatcgattgtgccggagaagggatatgagcggtgtgatagagcgagtgttatggccattaagtatttggagtggcggagcaagcgtgatgagattgagatacggcatgcggggaacggacgggaggtcaaagttgggaattacaaattggatggatttattgcgaataacggagctagggacaaatgcatcgaggttatgggatgttacatacatggatgtatgagctgttatgacccggcagcggaactgattggaggaaggacggcccaggaattgaatgatgagacgcaggagagattggcggagctgcggaagactttggacgtcgaagaagtttgggtaagtttatttgacatttacatttttattgtgaatttttagggctgtcaaattgagaaggagctgaaaaaggatgaagagatgcgggacttcttcgacgacagagggaatgagaaagggccgattgatccgcggatggcttatgcgggagggaggactgggccgatgaaattgtatgcaaaatcggatgagaagaaaaaaattagtgtttatgatattgtgagtctgtatccgtctgttaattacgttacagcttacccgattggattaccgcagattattatacggaagagcgatgagattgatgttaattggacgagaccagaggatttgaagtataagggattgtataaagtgagggtcaacccgccgcgggggttacgggttccggttttgcagctgaagtgtgatgaacgattattgtttccgtctatgttggagatgtgcgtcaaaatttaagaaggagactacgagatgtaattacaaatgccctcatgatggggcacagcggagatacgtggcgacatatactagcgttgaattggtaagaatttctaagaaaaaatttaaagaaaattaggacatttttcaggcaaaggcgttggaatgcggttatactgtggacagattttatagagcgtgacactacgaagaggaggcggatgatttattcaagggatacgtgcgattatttttgaagctgaaggaggaggcgagcggttttccgaagggagttgagacggaggagcagaaggatatgtggagagaagaatataaagaaaaatatggaatcgaaattgagttgactaaagtgaagaagaatccaggattgcggtacataagcaagttgatgctaaatagcttatgggtaagaaaattaaaaa

SEQ ID NO: 51363 - DNA, 656 bp, Heterodera glycines
atgtttcgtcgttcggtcaccaattcgcttcttccttcctccggcaatgaccatcgacgccattctcatcagacaatcacagttgttgagaatagtcggcaccgacgacaacaaaaggaggacgacgaccggcggatggacgcatcggaacaattggcaaaggaaaagacgtgccgatggagcgacattttggggggatggagcggaaatggcggaaaagggagggacggacgaagggaaagtgacggcggagacagcgcggaagaggtgggaaaagaaagggacggaaggaaaagtgccaacggaattaccaatcgaaattaattaaaaaagcatcgtttgggcgatattttccaaattcggaggggggggggagcagctgctaattgctgcttctgctgctccattagtagtccgattgatcagcagaaaaagcgtttcagctaatcgctgcactgaaaagcctccaaagcaccggaaaaatgacagaaaaagcggcggaagcgcagacgaaaggggccaaagcattggcaaaatgggcgagcaaaagcaaaaacgaagcgatggcggacattgtgggaagggtcagcgaactgatggaaatgcacgcggagagacagcggacattcgccaaagactacggccattacctcaaa

SEQ ID NO: 51364 - DNA, 667 bp, Heterodera glycines
atggtggcgggccattccctggccaccaacagcgggtgtgccgcggtgtccgctctgccgcttcaccacgctgttccgcctccgttctcctcgccgctggtcgtgcagcagttcaaccaacatcgccatcagatggcacttgcgctggcaggcatcaatgccaatgttagacattttttgattacattggctgatcattatggaccaattagaaattcaatcgtttgtccttcattatctcatttaattttaaaatagctgttttctgttttccaggcacataattccaatgcctttgacgccgccaccgccgcagtgccatttcaccaacagtccaaccaaaagcatgaacagagttgttctactgaagttccagcggtacaacagcaaattatgagcacagagtcgaaacaaaggcagccaaattcaattggaaatgtggtaattaaataacaaaacgtttcgccctttgaaaatgaatcggttgtttttctgttaaacagcaaaagacggagcagcagcagcacttcttcgcctcctccccgtgcaattcctcgtcgactccgccaaattcgtcctccgcctcttccaccgcttctctcactcgcttaattctttctttccttccaaacaccgtttttccgccgccaccttcctctcatgctta

SEQ ID NO: 51365 - DNA, 388 bp, Heterodera glycines
actacatcattcctacaccagacgttgaacgtggcatttggatgtaacgaacaaatctactctccacgtgagtaaactgtttcgtagtgggcgcgtctgttaaaaattctttttagactacatccttcctacaccagacgttgaacgtggcatttggatgtaacgaacaaatctattctctccatctgagtaaactgtttcgtagtgggcgcgtctgttaaaaattcattttagactacatccttcctacaccagacgttgaacgttgcatttggatgtaacgaacaaatctactctccacgtgagtaaactgtttcgtagtgggcgcgtctgttaaaattctttttagactacatcattcctacaccagacgatgaacgtggcattt

SEQ ID NO: 51366 - DNA, 1301 bp, Heterodera glycines
atgccccgttgggtgcgcttcgttttccttaaggcacttttttcgcaatttcaaattcaaatttcaattgatcacatggccaatgaatgctttgtttggcttttgctctgttcagcttatgccccatttgctttgtatgaaaaggccgtcgcccgcaattaatcgtttggcgtggcacgcgacggacggagccgactcggacggtctcaccacccttcccggggttggccaattcactgtgccgctaaatgtgtcatcggcacaccacccgaattgtccggcggccggcaaaagggacaacaaaatggagcaaaaaagtgggacaataaagcatttgtgcccattttctcgtggtaatgagagggcgggtgggggcgacaaccggcgaacaattacaattttggaattttgccgtttttaattttctaatgttccgtttagacaataatgaagctgagtcggctaaaggcgaagcgacggaggaacaaacggaggaaaacgaccggggaaaagccaccaaagccatcccattgagtgccgaagcggtaaaatcaaaacggcaaaatgccaaaaataaataccaaatgaatgaaggtccgtgcagtccattcaattgagtacattacggagcacatgagaagggaggagaagcataaaacggtgagtcagccgaagcgattaaaaacaattgcatatggtggcgcacgaacgaaaactaaaaataccgtacccagcgcaaagctactgtaaattccgcaaaaaacgacaaaaactcagggattggtctgagttagtttgttttttcccttttattttattttttatgtattccgaaattaataatttaattaataattagttcccatttcgctgttagcaccgcgacgattggaaatatgtggcaatggtcatcgatcgctttttgctttacgtgagtcaatggacatttagagataagcaattgcatgaagtatttgtttgtcctgctgctggacattcataaatttaactaataaacacgaacaaaaatgggagaaattagccacggctttgcatattcgaggagaattgtaagggaatgccaaaattggaatgggtgaataatgccaacgatttctcccaaaatgattccccccccctccctaattagtgccccttttccgttttgggtgtttttcggcgtcaccttcggcggcacaatcggcgtgctgttgtccgcgccgacagtgttcgaatcggtggaccaacaggcggttctgcaacggctcattcaggcgtacaacagcgggggacgactttga

SEQ ID NO: 51367 - DNA, 354 bp, Heterodera glycines
atgtcttcaatcaatcctaatgatttcctttccccttcaattttagcggcagcggatttcaaaatgcaagcgccagattggggcaactacgacaccaacggaaccgactacgactacatctacaacaactcggacgaacgggacaactggaacagcgagcaggccggcgtgttcagacatttagtgacccaggtagacgacgcgttgttcgatgaattgttttaatagaaattctcttttcagctcggcaccactcagactctgcagaatttggcgctgcccaccttcgtgctggaacgacgctctctcctcgaaatgtacgccgacttcttcggtgaatacattgctttttaa

SEQ ID NO: 51368 - DNA, 915 bp, Heterodera glycines; identical to SEQ ID NO: 51017

SEQ ID NO: 51369 - DNA, 1042 bp, Heterodera glycines
tgcttggctgctactggcacggctgtgagcgctgttttgatcccggcgacaaactggtggacgccaaatcatgcagagaactgaatgaggagaccaacctgcgattgatgcagcttcgtgaaggcgatgtggacggacaaggcttgcaggtcgaagcagtttgggaatgcgaaataaatgcgcagttggcctgcaatgccgaaatgcgagcctttttctctgatttggggatggacagagggcctattgaacccagaggagcctattttggtggaagaacgggcccattgaagctatttgcagagccaaaggaggacgaaaaaatatcagtttttgatatcataagtctgtatccttttgtgaattatacgtgcgaatatccggttggtataccgaccatcatacggccaatggccgatgaaatgtgcgttaattggacacggccggagcagttgccataccgcggcattctgcgtgttcgagttgtccccccacggggtctgcgcgtcccggtgctgcctgtaaaaattgacgagcgacttttgttttgctgttgtcatcattgtgcaacgatgtttcgcaaaaaaagcacgcgccgcccacataaatgtccacacacggatgcacaaagatccttcaccggcagctacacgcatattgaactggaaagagcacttgaacacgggtacaaaattgatcgtctttggagagcttggcactatgatgaatggtaattgtctttctgtttaaattgtatgcgatattttttttctctataggagcgaccaaatttttaaagattatgttagactgctcatcaagttgaaggtttgtctgcagacttttgacccatctgtttaatcatgtgtttttttgttaagattgagtctagcggtttccccgagggagttagcagcgcggatcagaaacagcgctatgctgatgagtatcggcgcatttacgaagtaaacattgaattggagaatgtgaaaaaaaatccggggcttcgattcattgcgaagcttatgcttaacagtctctg

SEQ ID NO: 51370 - DNA, 63 bp, Heterodera glycines
gctcatacagatgcttaaaacatttcttctccttttttcacatgatcacacaatcaatggttt

SEQ ID NO: 51371 - DNA, 608 bp, Heterodera glycines
atggattcgttccaaggtaatatatgtttcgcttgataaacataaacgaacttagggtcaattggttgtcctgtttagttccgtgttttgatagttataggtgaatccgttgaagaaattgagcaagatggatcattcacttcgttgtacatttctttggacaaatcaaaagaagtgtttggggaatccgaagctagggtaaacttgaggccattgccacaattcgaatccattggactgagaacgcgtgtggccaaatacgcggaagcaaacgaaaaatgtttattgaccaagtccggacccgaagaatttaaagaacacacaattccgattcggcgaatggaaggcatagaaaatggcattccgattatagcgaagggtcgggaaaatggcattggtatttacatttcgcttttttaacttgaataatttccaattcagatgcaaaacaggtcataaagcccgtggctggaccggcagaagcgacagacatttccacaaaacagcagcggatgccacgaatgcaagtcgccgccacccctcctacggaaaagccgaaaacacggaagcgaaagtacgaactcgactttttccttagcttctcataa

SEQ ID NO: 51372 - DNA, 356 bp, Heterodera glycines
atgccaacgcatccacgcggcaaggaagcggctgaactttggctgaaacacttccgaagggaattggaagagggacgagagaggcgaaggcaaatgttcatggtcgcaatgcgcaaacaattggacataatccgacggtaccagcaaggcaaactgcccaaagaggagttggatgcccttttggaggaggcacgacaacgggacgcacaagttgtagaacaagtcaaattttaaacaatttttgattttagcgtccagacaaagagcagtacgaagagaagattaaacaacacatggcaaaggcttatttcgaagatgttaaaaacgtacaccttttaacattgtttcaattgtaa

SEQ ID NO: 51373 - DNA, 658 bp, Heterodera glycines
atgtttgccaacgcggttatgtacaacagtaccggacattatgtgaacaattacgccaaggaaatggttgcgtacgcattgaaatgcattgaggtgagcagtcaaatccaaatcattcatctcatcaacttcttgtctatgctcaggttgttcagtttcctaccggccaatttcacgctccgccgcccagtcgccagagcaatggcagttcctccgaggggggtgcaattggcggagggggagcagcaaaatttaccattgcttgggcaacaactctgattaagccgaaaggggtggaccaaaagaaggcaaagggtcgcaatgacgaagagttgaccagcagcagcagccaggacaaggagagggaagtgagtcaatcaacctacgcaaaagccaatcgtaaatgcaagcataaaagcgacgttttcaggcagatcaacgcgatgaggaggaaacacgtcgtcttttccaacgacgtcgaatgtataacaaaaagtacacatttacgtctacaatttaatccccttctccaaatttggtgcatttcaactgctctctctccctttattcatttatttgtgctcaaattatcatactgaaatgcgacacttactaccactcattattgatgttagcaatttgtattttccattttcaa

SEQ ID NO: 51374 - DNA, 250 bp, Heterodera glycines
atgccagccactgctgctctgtgggtttgggaggctgatcgcgactacgaacgctgggaagggtcgcgggtgttacgtgagcgccgagttccaaaatttgtgctcccgcgaacggtgcggattcgctatgttccgcttgcatttataaacttttttagattttcgattggtctgactttgattatgctcaacagatgagaaaggctcctaccggttaaggaaaaagactatttacctaatacatatttga

SEQ ID NO: 51375 - DNA, 842 bp, Heterodera glycines
atgcaggtgtttgcaaattatgcaatcaatctaattgaggtaatttctctaaatatctaaaaaatcattaaatgattacagatggaaaacaaatgctcgcttaaccgcgttcttattgagatggtcaaaatagaaaatttatggagtgaaaaatcttcatccgacaattattttatacaagcactggcaaaaagtggcttggaagcatttaggcgcaaaatgtgtgaagttttttggcaaaaaaatcctacaattgttcaatgtgcggcatttttggaccctgcggtcaatggattattgagtcaaatttgccattcgaattctaattggggaacccaaacaatggttatgagtcgggatttttgaaattttaaatgtataagaatattaagatatttgatgtaattgtcagcgccgctaaagagcgctttccacaatgcacacaaattgccagaaattttgaactttcaccgagtttgtcatgctttcaacagactcctaaaagttgtatcgaagcagaaatgattttttacagaaatctttgcgagtcccttggcgggaaaaagataaatctgcttgatttttggaaagaaaattcaaaaaaacttcactttttgtcttctttggctatggagtttttgtcaattcccgcatcatccacatcttgtgaacgaatttttagccgtttttcaccgctggtttatgattatcgtcgtaatcgctttgaccctttcacaatttcacgccttatttccctacaatcattgtttcgcgatacttaatttatttttaaaaaaatatcgttaaaacatcgtttggcgttgtgaacatcgttataatta

SEQ ID NO: 51376 - DNA, 1882 bp, Heterodera glycines
atggaaagtgattcgaatccgcaacaacagtctgtgcctgtgcagcaattgccgtccgacgcttcgccccaaccgcagcaaaacggcggcggagattcggcggacaaaattgggccggaccaaatgcgtttgttgagcgcacagatcgccgcatacaaaatgttggcccgtaatgagccggtccctcgtgcactgctcagagaggttcgtacaagtccaaatcattcatcgtcggattggcacagtgccaattttgcgggtgtcgaaaccgcaatttctccgattttgaaatccatttgttttttaatgggtttgtttaattaaccacgtaaagttcggcacttaactttccggattgaattacatctgggtcttggttttgccggtgatttctctcaaattccgaatttggctctaatttgccggtctacgattcggagtaaagaaagtcgtatggttggagacccaaaaacaatcgaaaaacagtattattttaaaaaacggatttttcttcctttattttaacccaatttctcagcttttaatggcactcaatccccacaacaaaactttgattatttggatgtgtaggggggtacaaaaagcgatgaaaaacccataattttgcaatttttaaccaaatgtttaccattttttgcacaggtgagcgaccggaaacgggacgacacattgccgctgccgtatgagtatccgtacgaattgccggacgggcgcaaattgccgtacgatttgtccaaaattttgctgatccaccagcagcgtacaaacacacggacaacggacattccgacaccgcctggcattgacccggaagtggtgctgcgcgagcgcgagaaccggtgccgtttcattttttcggacaaaacgcttttttgaatttcgaaatgtgcaaaattagttttcataatttttgtcgaagtcaatcaaataaacatttttcatgagggaatgaatgggttagcaattctgggctttcacctttctcacttgtttaatttttcagtaatttctaaatttttttgtggaattttcagcttttgcacactcttcaaaatgttcattgtttgtgcacattttgcaggattcaaaatcgcatcggcctgcgcatccaggagttgcaatgtttgcccatggacatgccgccccatttgcgcatccatgccgaaattgagttgcgtgcactgcgtttgttgaacctacaggctcaggttggcttttgccgggttaaatttcgacagggggttggatgatattcaaaaagggcaaaaaacagccattccgattcatattactttaaaaaggggaggaggtgaaagttgtcagcggtcgcagtcatgggaaaattggaaatttttgggaaattcgggtccgtccgccccaattgatggcaaattttgtgatttttaatgaatttattacgaaaaattttcactccctctgttttttttgttgtatgtttgggtggaaaaagcctaattcaataagttttcgtatttaaactcgaaaacggggtgtaaaatacgaaaaattcgagaaattgttaccatggatagcttttaatttcataatttgaatttgcccccaggtccgtgccgaggtgatggcctgtctgaagcgggacaccacgctggagaccgcgctcaacccgtacgcgtacaaacgcgtcaagcggcacacactgcgcgaggcgcgggtcaccgaaaagttggagaagcaacaaaagcaggagcaggagagacggcgacgccagaagcaccaggatctggttgcaggtctggttttgatgacgaacattcacgaacaaatttttttttttgaaattcgaggcagcttcatgccccctccccgaaaatttgaaaaa

SEQ ID NO: 51377 - DNA, 753 bp, Heterodera glycines
atggtgtgtcagtgaagaaaaattaattcgccatttgcttgaacttaccgaacgcggcgcatttgacacggacagagaaatttcactcgtaaaattaaatttcgtaaaaacattttcaatctcccagtacgattttaattgtagctgtttttcgcgctttgttcttttttgatgaatttgcatgtcagaatttgtgtcgcgttcaatccgatgccaaaatcagtgagaaagtgcaggaaaaagaacaatgtttatttattttattttagcttaatgaaacggaaaaagccgcaaagaaaatcaacaaatgtaacgaaaaggaaggaaaagggaaattgaaaaaaggtaattttgagagggaattttaaattaaaaaaatgattgataaagagcaaaaaggaagcgatttggaagagaaattggaagaaaatcggaggacaaaacgaaaagggaggacggaaacgaaagcgaaagagacaaagggcgaaagagagacggacagagagacagcgtattggaacgaatattgggacgaggagcaacgacgatggatatgtgagacacagcaaaagccataattggcaaattaattggccattaagtgccttccttaaggcgtcgaccctttccattgtctcgtcgatgagccgaaccaaattgagcccaatttcggattttcggctaatggcactcacaaaattctttacgttttggccatcgacagcggtgggtcaaatgatttaaacaattaaa

SEQ ID NO: 51378 - DNA, 841 bp, Heterodera glycines
atggataaagaaaataaaaagcgaaaaggtacaaaaagatccaaaaatcccgaaaaaacttcgaaacaaagagaggaaaaccaaaacaaggaaaatgacgatgaatttattcatcccccaaggagacgttcagcgaggtaaaatggaaactcctcgtatttattattaaccaaatataaattcaggttaattgcaatttcaaaacctgctttatcgagtgatttgtcggcttcggctgaagattttgttcatggaaaagggacgaaaaccgcaaaatcggaggtgtttggaacggatgctcttttcggtgtctcttcggcttctttcacttcgcctttcaattcttatttgacttcatcagttgaacccatcaaattgtcttcagatgaagcgactgtttcttctaatcggtcccttacaaagagacttaacgcaacaaatattcaaaatgcccaatcggttttcgaatttaaataagtattagttgatctttgatctactcagctcggtgaaggaacttcgaaggcgactttacctctttcttcggatgacgatggcgaggaggacgaatggggggcaatggaattattacacacggacaaaacggagaaaaaagtaattgaggtaacggaaaataaatgttaatttgtcactatcaaataaatacaatttttcaggtcgaacttgatgaaaaacactcaggcaagtgaaaaacaatgtcgtacaattagcataattatctgattgatttttcagatttgttcaaactgcagataaatccgttgaaagagagagacgcaaaagaagcggaggaaagggcaaaatgggagcacgaaattga

SEQ ID NO: 51379 - DNA, 884 bp, Heterodera glycines
atggcccatggcgaaaaggcgacgacatcaggcggaaatctgaaggccccgccaatggaggtctacctggaatggattgccaatgcatgggactcgcttccaaagcaaatgattgccgactcttttttgacgtgtgggattagtaaggaagaaaaaggccgacacgacgacaaaattcacgtttttaaggtcctcaagaatgttaacattttttgaaattcttatttttagccggacggagcaattcctaatgggctcgctattttgaagcaacgccgacaggaagaagatgtactgaaactggtggaagaaatcgatttaagcgaagacgaaagcgacgaagaaattgatgcagaagtttcctaatattttttttgttaatgttttattaaaacaaattgttcaatagtttttgcacgtttctgacttcaaaagttttgaaaaaaaatttttttttgaggggggcttatattcgaagggggcttctactcgaggggggcttctatttttcaacccccctacaaggggggcttatattcgagggggggcttccattcgagggggggcgtataatcgagtaaatacggtatatattttttttaaaagaaaatcaatgtcattatttcggtatgtttaacaattatattctaaaattaatttttgattttaaatgttaaatataatgtattgagtcaattttctaccaagttaatacaaatataattctttaaatacttaatcatcgataaaatttctaatattttttatttacttattccaaaaaacacaaaattaattggctgtttaaaattcatacgtgaaaattggattatgcatcgcaaaaatgttgcttcagatttttgcatttaaaaaaatcattgaaa

SEQ ID NO: 51380 - DNA, 159 bp, Heterodera glycines
tgattaaaaaacgtacaacaatgattagaagaggtgcaacagtgattagaagaggtgcaacagtgattagaagagttacaacagtgatcagaagaggtacaacaatgattagaagaggtacagcagtgattagaagaggtacaccagtgattagaagag

SEQ ID NO: 51381 - DNA, 212 bp, Heterodera glycines
atttagaaacgggcgcaagcgcccgtctgaggccgcgaagcggccttaatagcccaacaaatttagaaacgggcgcgaagcgcccgtctgaggcctcgaagctgccttaatagcccaacaaatttagaaacgggcgcgaagcgcccgtataagcccaacaaaatttaaaaaacgggtgcgtagcgcccgtccaaggccgcgaagcggcctaa

SEQ ID NO: 51382 - DNA, 869 bp, Heterodera glycines
atgaaaaccggaataatattaacgttattaatcataaaaaattcatttcatcaaacttttttctctaaattagaccaaataaaatcatttaatgaaatatttggccacggatggtccgatggagaagagcaaattggagaaaatcagactgaactggccggcacaagtcaaagtcgtcgaaatgatctggaaagaaatgatttacaatcgcgaattgatcaaagccaaataaatggacatcgatacggtaagcgattttaatcggttgagccttggcccgcaacagtcggagggataatctttggacataaggtagatgctcttggatcagcttgaatttaatggattgatttgcatgatcaaatttaatgcttgatttagcgcattcggttttgaatagggttggcaccatgggtatctgtcatccggcacccggacagatttggaaaattgagatattgggactccaataaatcgtaaaattttaatcattcaataggaccaacggaaatagactaaatttgttaaataaatggttgtattaaatagtgaaaaatggcctttagataattccttctccaatcacttcgaaaatgtaaagcaaaaatattctgacttggaaaaattggaaattgtaaagaaatttttcgaattaaaagcaaaacgagtagcagcgaaagataaagcaaaattaaatgagcaaattaacaaagaaattgccaacgaattgggcacaggagtgacaacaatttacaattggaaaagagaatttaatattggtgagttaaatggaaaaaaaatcaatttacttagtagtaattaatgaatacattcgatttatttagattaaaaatatttatttaaaacaa

SEQ ID NO: 51383 - DNA, 836 bp, Heterodera glycines
atggaaaattttgatgaaactgagaaacaaaaggaaattgttaaattgtttaaaaaatataaaaagcaaaataaagaaaaaacgaacctcgaaattgctaaagaattgggaattcatcaaaataaactgttggaattcagaaaaagatttgacccaacctataaaagtaaataatttgagtaaaataagggaaattatgggtaaataaataataaataatttttaaaatgtaaaaaattaaataaataaatattaaatttaatttaaaaaatattcccaaaaaacagaaaagcttcttgcgaactcagaaaaaattgcattagtgagaaaatattacaaattgaaaagaaaattcccagaattaagccaaaacaaaatagccaaaattttgaagattagtaaaaatgcattaattaaatggaagcaacaatttggcaatcaatttgaagaacaaggtgaccaaatttaaaagattacgatgaatacagtaacataaaattacagtaaatgcccgggaaaatgacggtgaagcgaattccgaagaagacaggcattttttttatttgacagcaaaaattatgtaaattttattttaaacaattttattttttatttagtccaaaaaatgtctcatccaaaaatgctgatgagacaatttgggcatggaacaatgaaacacaaaaaagaagtcgaaaatgaacaaaacttattgctaaaattggatgaataaaaaagaagggatttaaaaagggaaaaaatgagagatattttttcgttcataacaaagtattttgtcgaattatttcatagacggtaaaaaagaaaaaaaagcgaca

SEQ ID NO: 51384 - DNA, 550 bp, Heterodera glycines
tgtccatcaacaacaaagtgccaccgctgcgtttgctgtcctccaccaaacgcagcaaatgcaaccgcagcgcaccgtttgcgggcatggcaacggcggcaccattcacttgtggcatttcattcgcgaattgctcgaccagcccagggactacggaggctgtgtgcgttgggtggacagaaaggaaggtggaaaaagagcaatgataatttgaaatgggaccaaatttgagagagaccgttaagggaccttcaaaatcgagtcgtcccaccatttggcgcgtttttgggggctgcgcaaaaatcgggcggcgatgaattacgacaaagtgagtgggaaaagcctttgccatttgaaaccttttgcaattgttttgtctgatcagttgtcgcgatcacttcgccaatattacaaaaagggcatcatccaaaagccggagaagaagcagcgattggtcagttcgttaaggaaaggggaaattggcacaatcaaacaaaaaaatgaaacgaaaccaaaaaaggtgtacaaatttctgccaccgtacaatcag

SEQ ID NO: 51385 - DNA, 602 bp, Heterodera glycines
atgccacaggtcgacgacagcgattgttgcattgaaatgcgggtacttttcgcttcattttaaactatcagatttcaggttgagtgtttagttgccttctcagtgcctttatttgtgcgattttcgtgtgcctccgacaaatcttttgccgccaatttgcttaaatcacatttcctcagttgaagtaagaaggaaaaacagaataaacattcaattaacaaaaaaaaatattttaaacaaattttataaaaagttaaaagtaaaattattataaatataaaaaataaaaataatatataattctttatttataccttgtttatgatatattaatcagtgaataaaattattcattttagcagtgccgcctttttggcactcaaaaacggccaagttcagtacgcaatttgaaagtggcggcagaagttggcacagtgtcctcctcctccattctgttgcgctgggacactgccgatcgtgccgacatttactacgtttactggcgcggccgaaacgcggcggaatggagcaaccgatcggcacggaacacgacgctaatgaggattaatgtggacgcggcaatggtcgatgaggtgcattaa

SEQ ID NO: 51386 - DNA, 379 bp, Heterodera glycines
atgagatcgacagaaaatggaaaattttgtgctatttgtcgacacaaatgtgcagaaaatgaggaaaagccaagaaaagaaaatgcgatgtgttgtacaataaaaacaatttgcatattgcagcaccagaagaagccagccccgtattttgtgatggaagggggggggggggagagaaggtgaagcccgataaaagtgagtgactcattttggaattaaaaaagcaaaaaccgaaattaaaaaaaaagaaaataaaatatgattattttaaatttacaagtttgtataaatatgtccttctgcttattattaaattgttcttaagaatatggtatattttgtcagaaaagcattgaaaatggattcgatactcgtttaa

SEQ ID NO: 51387 - DNA, 3409 bp, Heterodera glycines
atggacacttatgttgttgcattaacaattttaattcaaggtatttagctataataatatttaattttaaattgattgactaattatacacaaattaaagaccaaactttgacgtgcaaaacaaattctacaaaatgcagacgatcaactacagaagaaatgctgcacaagcaaatcctttctggcgacctttttgcaaagtttatgctgataataatggaaaaacatctgaaggtcgaaaacataaattacatataaataaaaattaaataaacattttataacgacactaaaaaaatcagaattcaatgaggaagctcaagagtcagcggatgggccgcagctcaaaaatgccgcggcatcaccaaaaattattgcggcagcaacaaaagcaattttagtgccaattggcactttttttgtccaccaaacgcagtcaaagagagcgatggcatcggaatgcggtgacggagagtgccaacagtgtgacaacattggcaaactcgaaaacaaaatttcaatgatcacaagcaaagggcagaagaatattatacggtatttgtgtattggtggggcgttgattacattataagggggttgatatgattaaaaaaagaatgggcgggtgtgccttggtagctcaatggtagagttgcacatggaatgtgtgaacgagtgggttcgattgccacccgaggccaaaaactttagcatttcttattataggatgtatttacagaatataattaagaaaaaagcagagttaaacataatagaatatttaaatcattattaaaataattggtaatatttcagaaattaattaaaaaggaatatttcgagtgaaatcataacttatcagcagctattcagtgatcattttgcgatctgggattgaaaaccccaagatttgaaaccgatttttgccggaccgcaaaaatattttatgtgccatttaatgtattaataagtaaaaactctgaataaggatttatttcaggcagtcattttttgatgcctgcgaacaaagtttcattttacggacccattaaaatgtttaaattttatttatttaaagggcggaagaagaggaggaagaagaagagaaaagaaaaagtgaggaggaagaggaggaacaacaacagcaggatgaagaggaggaggaggaggaatcggatggaacaaaaaagggaggccaatgggaaaagcattacggcaaaggcgccatgggcggcggaccgtgcggcgccaactgcggcaaacagtgcccgcgccggtgctgctgctgctgtgtaaatttatcaagaattattttggaattactttcaccgaataatgtgccagttatgaagtgccaaaagcaattttcattgtccgttaagggatgcgcgaaagaatgcgagcgaagcgaaaaaggagcagacaaaagcattttgggtccaattaataggcagcaaagcgcacagaaaaaagtgccgttacgggtaagacgaatgccgatgttgaaagagaatagaattttatgtattaaaattaaacaccctcataagtttttttttgatcattccgtccaattttttcaaaaaaaaatcaaccgtaatttttctgttatttaaacctgtgcggtcatcgtttattttaatcctttaaccgctgatttttgcttttccttttcgtctttaatttttttgatgcttttctatgatcttatcctagtgatcgaaccgaggtttttcaaaatgaaagaaggcatcgctggttaaaaaaaaataattttttggtcaaaataatgaagttattaaaaaaacattttttcagctgtttaagccgttctttgcgaggaatgccaatttcggcgtgtttaacagcccaccaaaacttatcggtttcaacgacaaagtggcggagaagcaacggtcatcagtggacgaaagtttggaaaatttgaaggagagacttggcaaaatttcgaacaaactcgacttttggaagacgaatttgttgcgaaagcctttgcaagcgattgacgaaagcattccaactgctgctgatcaacagcaaaaggaaacaagtcgagctgatcagctcaaaatgttgaaggaaggcgagtgatcagaagaaaattgttcaattaataacccaaaagagagacaattacagtaatcagcaaggaattggcagcgattacggtaacggaaaaattgacaaaaacacttttggacaatggcgacgaaaatgtagcaaaggatggagatgggcggaacagcacggcgacagcacaaactgtggtgagagataaacaataataagaacaaatccgatgaacaaaaattggtggaaagctaaattaaaatatgacaatttagctgggcataagcaacatcagcattacatcatcaacttcaacaagcacttcgaccacaacgacgacgacaataagtacaacaacaccaacagcaacagtgacgagcagtaatagcacggagggaacacagcaacaaaaacaacaaatgccgatggaaataatcaaaagtaaaaggaaataaaaaataaaatatatttaaaaataaaaaatggtatggaaaataaaaagcgagattgaaagcatcggcaccggccttttcctcctcatcggccacgactctctccacaacgccaacagcagaagggggcaaggcaataacaacaacagaaatgccatcgcaaaatgggacgaaaaatggcaccactgctgcacagcaaattgaccaaattgtcacttcaccagttcaactgattcaaacaacaacaacaacaacaacaacaacaattagtggtccaaaatataaacagttataaataaatatttcgcttaatttgcagacattgatttaacaacgtcatcaacaagtacaccaacagctgctgtcaatggcactcttttcacattaacaacccgccaacttcaaacggcgtctgctgctgaacttccgacaccgccgccatatgtcccagcaaatgaaccgtcgaatatgccggtaagaaaaaagaagtgcaaacggatgggccgaaactattaaaactttgataaaattaaacttttttattgtttggtgtgatgaagatagttaatgtacgttcggtaattgtgcaagaaatggcgccgacggagaatgccacaggcaacaacggaacggcaaaatcgacgacattaatgtcattaacacaaatggaccaaaatggcaatgtcaaggcaaacggtggagcatttattggcgattcatttaaattgagattctattagcatttatatcgccaacaacaactccagtaacaataaggacacccgtgccacaaactgttgtcagttcaaatgaaaaaacaataacagagcaaaacgcatacagtatgaaaaccaataattaataaa

SEQ ID NO: 51388 - DNA, 785 bp, Heterodera glycines
atgtttaagtgtgactgtaatgatgccgaaaagaaagatgaaaaatttaacaaaatatccggcaaagaggaaaatgacgaagaaagcgtacaaagcgatcagaatgttgcattgggagtggatggttctgatcagcaaattgatataaaaattaaatgattttatattaggatccggtcaattaaaaaacccaaaaaaatttgcgattttattaatttatgttaatgaaatattaaattataaaacctacttttggtgatgcaatgagggaaatgttttgctttccatttaattttacctgctgctgatagttgaatatgtttacataatttaagaacggattataatttgtttgatgaaaaatggatttattaagataaagctgaaaaagtgatcagagttcgggaccggattttcaatttttgcttacaccataaacattcaaaaattgtttcagtttatttgcttgaaaattaaaaaaaattattcagtgatttcattagaatcttttttcatgttaatttataaatttatgtgttttcgaaagtttttgggaaacgcactacgtttaccggctcccggacaatcggacagtggacattccgacaaatggacaatcctacagtgaggatttgtttgatgctcgttggtctcgactcgagaaaggtcttctcggttcgtggtttttctagctcggtctcggtgttcgagactcgagactaaagatttaattttttcacattagtaaaatgagatacattgaattaaattaattcgacatttta

SEQ ID NO: 51389 - DNA, 682 bp, Heterodera glycines
atggccaaaatgcggcaaatgaatgtaaaatgaccatttacacggtggccacattctttggccaactgctcatggcgttatttatggtcacattaattaatgccaaaagatggaaatattgagcaattttataatttatatgtttcagttttttgtctgcataactgcaacaaattttgttgacgagcacaacaatcgcttttcctatgtccaagaatggtttaatgtctcatcggcccaaaatgacattctttttttcgcaaattttaaccagaacccatgggtaaatgacctttccacggtggtcatcccagcctggtaacaaaacaccaaagaccaaatttttaattaattttttcattttcaggttgcttttgtgggcttcgtcaaaattgcgcgaaatcattagcaaacaattgaaaattggaaacgaaaaatcgagaaataccattcatgttcatcagattatgacggtttcggcacgaactcagcaaatcaaaggaatttgccgtcgttgaaattcagaggaatttaagaaaattataagactgactttttgagaatccacttttttaattgtgaaatcttttttcaactttacaaatttgcacataacacaaaagtcaaagtgcactgaaaacatcatttcatttaaaaagtattttttcgctttccaaataaa

SEQ ID NO: 51390 - DNA, 891 bp, Heterodera glycines
atggacccggttaaaaacttggatcctgaaacagtttattgcctaaatatccggacccatgcgaccctattttaaatgagtttctaatattttttgttttcgagaaatttttaaaaattttatgaaaattttctccccaacgtgggtgtttgtttcctgcccgatctccgacttttctctccccgttcgaaggtcggggaacaacacaaattttaagaataaattttggtaaataaaaattattttttgatttaaaaaaaaccattttggaggtgctttttacattttttgtgaaaaggctagaatatggatattccattgtatgagaatttttgaatccccattttgacaatttttaaagcaaattttcttttattttattttgtttttgcgggggattttagttaatatcttggaaaacgcatatttggcgtttctaagtgcgtaaaagcactctctctctctctaataattaaataagccgccggtttactgaaaaaaaatcggcgtaagttaaataaaattatttcacaaattatggcattgaattgccgccgactgaacagacaaaatgccaaaacaataattaaaaaataatatgtatacctaattattaattaattattttcagtcattcttttatccctgttacatcacttccacactctctcccctaatgggctcctccgcctccgcgccgttcttttccgcaatggccatgttggccaattcgaatttgtgcccctttctcttcgctttggccattggcattccgtctgcagtgctgtactgctcgctgttgctggtcatcgtcgcgaacttcaaacacttttcgtccccttttttcatcctcattatcatccgtgctattctagtaggaaaataattaaa

SEQ ID NO: 51391 - DNA, 211 bp, Heterodera glycines
ggcgtttaatttgcaaaaagacactgtgataattagcaggtaatacattaattggctttttccttcctcaaatgataatccttttcttttctcctttcgtcttgcacaaattttgcgttttccgttggaattcgaaaggcactcattggagaagggagatcatcccgaaatccgagagggaattgcccacgcgcgacaatggttcgatcgt

SEQ ID NO: 51392 - DNA, 406 bp, Heterodera glycines
gtcgcttcatctcccagcaaagtgccctcgcgaaagttttgcgctgtgtgtggtctttttgccggttacacttgcgttcgctgttccgcccgcttttgctccattccctgcaaggacatgcatttggacacgcggtcggtgggcgaaggccaatagacaaggatatcttttggcccaaaattatcccaaattaataacgagaatgtttattttatgagaaaaagggaaaagaatgaaagtttttccttccgaatgcaaggaatcggctaaaacaacaacgatattttgggttacgccggaatccctcccccccccccccccctctttttttgatctcactcagtccaaagggtttaattttcaggtgtttgaaatggactgtatgacattgcgcatccaatttaat

SEQ ID NO: 51393 - DNA, 645 bp, Heterodera glycines
atgaggataaatcctcagatctgcgagccctgttttattgtaggtaaataaattcagttttattcagatcacagaattgtaaatttaaatggcaacgcaaagtaactttggaaaatttcaacagcgttcaagtcgacaatccagtaaattagtgttaggagtttgtttagtttagggaattaatgtattaaaggtcggatcatttctcaacaacccacgaaatgctttgatgaagcggctaaacgacggcgcattcagcaacaattggagtcacttgagaaagtccgtttattggcggaaaatgatgcatttcccgtttttcaggataatttccaagaggatccccacgcgaatatcacttggcacaaagcggcaccaaaatttgacgatgaaatggtttttggagacaaagaaaagaaaaggcgaaaacggaaaattgcgtcaccctcaaaagtcagcggagcggagcaagcaagtgaatggaagtcgggggaagagaaatgaatcatttgatcattcagcgaaaaagggaaagaaaattgtggccgctttgacaaagacgcgatttaggaagacatttgctcaacttttggaagaagcgcaggtaaaccaaggcaaaataggggcgcgaattgttaaaataaa

SEQ ID NO: 51394 - DNA, 1004 bp, Heterodera glycines
atgaatgttatacccacttacaaacaagcatgtgcgtctgcagccaaggatattgttgtgctccgccctttcgaccagtgggtcaatgaaaatgacccgtgagtagaataacattcctcggacaaaaataaacccattatgtgttttttagtgctgcgttgttcgacctagaccatttgagagatcaattcggcgaccgagtgctttttctcgcgagggtcatacgttcaaatggacgggcaatccgttgaacatgttcatgcacgtaagaattaaaatgaagcattgctttaaatgatgagcaaattgttggtgttttttatttaacattttagaataaacttacaacaaatattttgttaaaactaaaatagttcctgattcaaaaaatgttttgtgatttaaaagtggaaagatgggatggggggaccagcctggcctggaagtgtcccatttttaaacgatttggagctcaaaaaacgcatttctgcattaaaaattttcgattctgatgtcactatcggtcactagaaatcactattttggcgtatcgtcagtcatcatttattaattttgattcacgtttaggtgcgtcggctgcgccataaactcagcaacgaacacaagggagtgactgtggacaccgtggagcgttaccagggtttccagcgtcgggtgatcattgtcagcactgttcggaacaacgaaaaggaggacattggctttttgatgtcggacaaggttgtttaatccagttctaaaaacttggtgttaatttcaacgcttagcgtttcaacacaataatcactcgtgcggaagagcttttgatcatcgtcggaaatgccaaagtgatgatgagggactcgtcttggatcgttttgaaatatcatttttcctaccaaaatgaattaatttttttatccttttacaggatgatcgactattgccgcaaaaacggtgccacagttgacatgccatcggaagcggagcttttcctacactga

SEQ ID NO: 51395 - DNA, 66 bp, Heterodera glycines
atgaacgttatgaagactggagaagaacaagacatcaccaatttcaaacttgggaaaactcaaaag

SEQ ID NO: 51396 - DNA, 60 bp, Heterodera glycines
taaaaaaccaaataattttgtattattttcacttgatataaattaaaatttgaatttttt

SEQ ID NO: 51397 - DNA, 861 bp, Heterodera glycines
atgatcccttaccagacacttttctcagggacaaaattccaaagcgaaattatacacattaaattacttttcaaaaagccaatacaaattttaaatatatatcgtccaccaaattgtaacgttcacaatacaaaaaagctactcaaatttatttcggatcaaagcgattccgaaaatatcatatactgtggggattttaacatcccaaacattttatgggatggaaataaggtaaaacatataaatgatcctatgtcaaatatgctgattgagtttatgaaccaaagacaattgaaacaacatgttaaagaaccgaccagagaaaatacgattttagacttagtaatgactaatgaatcggaattaattaatgaattaattgtattggaacatttttcaacttccgatcacaaaatggtcggatttaaaataaaagaaaaattcagccgtaataattctaatgtttatagaagagattttaaaaatattaatttttcgaaattaagtcgggcgattcttgaaaatcgtattgatttatcaataaactcagtgtacaccgttgatcaaaaatataaagaattcttaaataaagtactgaaattatatgatacttttataccaaatagacctctaaaatcgataataaaacaatcgtatcctcaaaaaataagagatttattttcagagaaattacggttacataagcttgtaagaaaatttcctgaaaaaagtgaaatcattttaaattacaaaattatttctagggaaatgaaaaaacaattgcacaaattaagaaatgaacaagagtcaaaaattatttcccaggggcaaaattcagttaacaaatttattcgaaataaa

SEQ ID NO: 51398 - DNA, 401 bp, Heterodera glycines
atgaatgtaaataaagaagaggaacgactggaaaagaaagtcaccaaatgggctattatgctaaccagtgaagacaaggtgagcatgggcattcctcagtatgggattttgggtaatacataatactgaaaaattgcggtaaaaaggtaaaacagaaacccataaataattcgatggttttgcaaaatctaagtcagattcgcaatttagcaattttttttactggatttatttcagagaaagttttaacttggaatcgcaattctgcaatactaccgggcccattctgcaatattaccggattttgaatcttttcttatagattgaacatgccttgaggcgattggatcatgttgagattaacttacaacttttgtcttcgactggttggagttttttaa

SEQ ID NO: 51399 - DNA, 832 bp, Heterodera glycines
atgacccaaaaagcgaaagcagcgacgcatcatcagcagaagaagaagaaagagcgaatggaagccgcgggagaaataaattccatcgcttcgctttttagcggggaaccggcggatgtgaaagtgaatttttatggggcgattaaatgtggcatttttcgagacggaactgcgaactgtacgaagtttttgatgagttcaagaagtgtccattttttggtaggcttgctcgatagatagcggattagctctgctgtcctgtcttttcaaaaactgaaaaattgtggactgatttttcaaaagctttttccaccagcgaaaaagaaaaatcgttaaaaaatcgaatgttcagcggaaaatatttttttttcaataaaaaagattaacaattttttcaaccacgagcgagtcgctgcggaccgaacggccatctcaggcgttctcgatgagcttggcatcgagagcccgatcactgtttacagaatgggttccccggaccaagcaaagacaggtcaaaaccgcccgcggttgatgaaagtaattttcggctgctcaaaacatcagagacaaacctttggctcaatggaacaaactgcgcgctcaaatcagtcaaaaactggggatgagcaacatcaaaattcgcccttcactcagccaagaggaactcaaggcccgacgtgtgctgcaggaagagtgcagcagaaaaagaaaggaagatggcggcgagtgggtggtttacgctgacaaagtgatgctgaggtcagacattgcggcatttaaaaataacaccaattggcttgctgttttaccaaatcacattcataaaacatta

SEQ ID NO: 51400 - DNA, 129 bp, Heterodera glycines
atgagagagtgctggatctcagtcccagtcatacaaaacatttttgatgaaggaggtagagaaaacaatttcaatagagagcgcaatgggaagggagtagttcatgtctcttcttcgctgattcttttg

SEQ ID NO: 51401 - DNA, 1207 bp, Heterodera glycines
atgtctaaaataaagtccttagggtaattacaatccaattttatcaaattttccagcagctcttcagggtatttatttattttttgagatctgatctcctaaaatttttgcaccatcacctgatatgaattttttaaattaattccatagaacactttattaattagcatagttattaaggttttgtgatagctaatgtcgtacaaattcaattaaaaaaattttcggatgctttattcagataaaatattatataaggatttatccagtattaaagttggtaaataattgctatattttcttacaagggtcctcacaacaaataataaatttatataaagcatattgatttatattggcggatttataaaacgcgctggcggatttgtaaaacgtgcatggtgggggtgcgcatggtggcggatttataaaacgcgctggcggatttgtaaaacgtgcatggtgggggtgcgcatgggtggcggaatttataaaacgcgtcagcacgcatatatatgcgtagttacttaacagaaatatatttatttatttaatttttttctcaaaaagttctcttttcacgccaatttcctgttttcgtttcaataaaaattccatatatacctaaaatgccaatcacagatcaaaatcacggaaaattgaaaaaatccgtgatcacggccagccctgctgtgtaccctttgtcactgcattttgcctagcattccacggtgagggaaccaatcaatctctcaccgcttccctgattgactgccctctaccctctactttcccacactcactctcttttctctctttaatcaccgctaattcattagcccaatctttggattcaaaataataatttaatctttagaaactaaatgaaggaactcaagttacgcagcaacacactgccaatgagaagcaaatggcacaaatcattgagattttggatgatgaagaggaaatgggggaagaggaagagaaagcgaaaaacgaagaaaatgaaaatgaggagaaatcggaggacaaacggagaaagaagagcaagaagaaggacgactgctatgtttactacaatttttaagtgttgaggtcaaaattgaacaaagtgcatggatcggaacatagccttttatatttttgacaaagttttgcgtataaatatgcaacaaaatgaaaagtgcctttaaattctaataaa

SEQ ID NO: 51402 - DNA, 100 bp, Heterodera glycines
ttaacacggcgattcaattttgggctccaagtacaattaagttggttttttcgtcttagtggtctgtgagttagtcaacaaaaaggggtctcaggttcaa

SEQ ID NO: 51403 - DNA, 1090 bp, Heterodera glycines
atgtacacataccaaacttcggaaattgaacgaaagctgagacactacggtgttcgtgcactcacagttgatgcctaccaggcacaggagtgcgatgtcatcatcatagtgacaacaagatccaagtattccgagatgggatccggaagaacggacaacatgcacttctttgaagacgatcaacgggctactgttgctctctcaagagcccgccacgctgtcttcatcattggagatttggtttcaataagtgcaggacaagtgtggaagcgcttcatcgaaatggcgataacaagaacaagcgtagtccgagccgagtatgttttggcacttttgggacgaacactcgtgaggtcgtcgacatgcctatttgattcggccaaaagagaatcggtggaggatgaaggctttcttgaaagttgggcattgaagcatgggttgcgcctggaccgaacgaatgcctttggacaacaacaatcacagcagccgcgagctccctcattccaattccagaatcgccactttcctgcactacagacgacagggccctcagatcaagccggtccatctggcagcggtggtcaacaaagaggtgcgcctactttggcaccacagtatggaagaggtcaaggaagacgtggcccggacaaccagtggatgcactacggcggaaacccgaaacgacagaagggtggcagacgctgaactcacatgacgtcctgcgggtctcacttctctccttttcttcaatcagcacggtatgtctttcggtcataatttttattattaattagttgggtaattttccttttttgacccctatcatttaagcactttattttctttcattttctctgcactcacaagcttttcgatttcacccctccttagcttccggtgttcgcaccatttacactgtgattccttgactgcaatggcagaaagtgggatgattctgaaaaggtggcacgcctcaaggcatgccttgatggtgaaccaagacgtatctttgataatttaatgcctgcccacaaagcaacttcttcggaagccattcaaaaaatcaaggaaaaccttgacactccacaaa

SEQ ID NO: 51404 - DNA, 164 bp, Heterodera glycines
atgcccaagcctcaagaggctcttttaacagatcaaataatcatcctcaaaatgacagaagatggaacaatcgcacttccagaaatgacagacgatggaataatcaaacccctcaaaatgaccgacgctggaatgctcggccagtttgcaactactgtgggaag

SEQ ID NO: 51405 - DNA, 946 bp, Heterodera glycines
ttggcgaaatgtccgattttggctgagttggcgaaatgaatgtttttggctgagttggcgaaatgacaagttggcgaaatgtcatggagccccttgtcgctcgccaaagaagtcaggcccgaagaatcgtcactcgcccgccggacgtggaggaggacgctctcagacgccgcgcaagaagaaacaaccgctgaagaaggtgccgggcccgagcagtcgcactcctggtcgacgcgtgaagaaaccgtcaacgaagaagtcgcctgctcgccgtgccactgagacgaagaagaagccaacccgcaagactgccggtggacgtgccaacaaacagacgaagtcgcgtgggcgcaaaacaaccaagaagacggaccaggaggaggagcgcgccgactccgaggcggaagctgcaggatctccgcgcaacagtggacgtgagttgaataggggtgtgggaatggcacaatttcaattgtttaatcctaatgaaattgaattttcagattccgaagagagtgcctcggggacgaagaacaaaccaactcgcaagagcgctgctgctggacgttccacgaaacagaaggcgtcgcgcggaggacgtgcgggcaacaagaaggcgcaggaagaacgctctgaatcgccaactgaatcgggctctgatcgcgaggaggatgaagaatgaatgagccagccggagaaaatgctgcttcacgagaccaccgcgataataacactaacccccatttaaaaaaagagaaattgtatctctatgtatgtatgtatatattgtatgtccatatccctgtggcattgtcttgctgaatgtaattctcccacaaatggttgttgttctatttaaatatgccatatatatgtgtatttttaataattgtaatatgtttgccctgtttatgcatgttttatggtcatttattctcattgctga

SEQ ID NO: 51406 - DNA, 1719 bp, Heterodera glycines
atgaacaaggaagaatggaataatgaatggaaagttcaaaaaatctttcgtgaaaaacacgactaccttaaaaccattaaagaaatagatgaaattctcgatacattaaaagacgtaaatttggaggtaaaaaggagattaaaattacttaaagcaaaatcatcttcagactcagacccggaagatgaatcaaatgattatgaacatgaaaatgaagacgaagtagaagaacaagaagaagaaaaggaatatgaaagtgacaatgaagacgaatcgccagaactttccttgaatgaccaaatacaccatgatcgtataccatttgtcaattaccgatcaagaataaagcttccacctcaaacgcttacgcattttaatggcaaattctcccaatggcccagtttctgggatgacttcaaatcctcagtggacaatgacccaaatttagaaaatatacaaaaactcaaataccttagagggctcttacatgatgaaccgtacagaatagtgtcaccgtatccccttacaaataaaaattatactatcgtaataaaattactaaaatcaaggtacggaaacccccaattaatcagagaaaatcttcatagcgaattacgcaacctcaaaagacccactgaatccacaattgaattaagacgatttattttgttaattgaccgaataattttacaaatgaaatcacaaggggaagacataaatcaccctcaaatcaaacaatcaatcgaaacgaaactcccctataacattagacttaaattgagggaaaaattcaaaatttattcaacaaaagaaataatggaatttatgaacgatcatacccaagcacgtgaagacatagaaagaatggaagaatcgaatcgccaaatccggaatttcccctctaatagaccaccccaaaacggagtacagagacaattctatccaaatttcccacacaatcaaatgaaaccaaacccacggaatcaacagaacacatcttcctctccttttccatatacttctgcacttacaacgaaatcaaacccagtacgcctggcacagtttaaatcaaatccaacacaaactagaacccaaaataaaatattttgtcgcttttgcgaaagagaaaaccatgcaagtaaagaatgcaattttaattgtaaatacaaacataatactctcctctgtacccgaaaacaaactcagtacaaagcgaaagagcaaaaaaccaaagtgaatatggctcaaaattacgaaaatcatgaagagacacagacattcatgacaatggattatgataaaaatttctataattatgaggaagaagaattacttatgactactgaagtcaatgtcatcaatccagacaagcctaaaataaaaaaggaaataattttatttgataatgggtcacaaaaaagttatataaccgaagaatgtgttcaaactcttcaattaagtacaattgaggaaaaattattagcaatttccactttcaatcaaaataagccaaaaataattaaatcaagactagtcaaagttggcattaaaacattaaaaggtgaaatagagtacataacactacaaacagtggaaaaaattactgatgttacaaaaatggttaataaagaaactgttgatgtacttggaataaaaatcccgatcgctaatgcatgtcctcaaattctaattggaatcgactattattggcacttcatg

SEQ ID NO: 51407 - DNA, 217 bp, Heterodera glycines
ccaagtttgaggtcgacacaataaacatactcttattaaaattgtgcccaacttggtctatttgcctggacgaaaaccggcacgactcatcgctctccgatcggtcccgaccccctacgttcccccgaccggctactctgcgcgcctcgcccatttcatccccttcccgtccccttcaccccgcagagttcgacgcaaattttttgtcgccacgaca

SEQ ID NO: 51408 - DNA, 591 bp, Heterodera glycines
atgggcttggtgacccttatacttccggatgacgagcagttgcgcaacggtgaatttgacgttttgacgtggcaatcaggtgcagaccggacaggcagcacagtaagacgaatgggcacagcaggacaaacgggcagagcggcaggcacggcaggacaaatgggcacagcggagtggacaggcacaacagggcgaacgagcacagcgggacgcacggcaggacaaatgggcacagcgggaaaggcacggtcccgggtcgtggcaccaattcttgtcgtggcgacaaaaaatttgcgtcgaactctgcggggtgaaggggacgggaaggggatgaaatgggcgaggcgcgcagagtagccggtcgggggaacgtagggggtcgggaccgatcggagagcgatgagtcgtgccggttttcgtccaggcaaatagaccaagttgggcacaattttaataagagtatgtttattgtgtcgacctcaaacttgggtaattaaaccgtcccaatcgggacggtgagggaaacgaaaaatgggggacaaacatgataatgtgaacgggaaaaagggggcacaaaaacggtgacagtaa

SEQ ID NO: 51409 - DNA, 94 bp, Heterodera glycines
atggcaaaggaaagggagggcactcgagcaggcgcggacagggagggcactcgcacagacagagagcagcgaaggccgggtgcagtgaaaggcg

SEQ ID NO: 51410 - DNA, 102 bp, Heterodera glycines
gtcggaataaaacatcattcccctgcttgtctactgtttgtcccaatttctattttgccaaaatttttgccgggccgaatttgcctctgtttggtcccgaca

SEQ ID NO: 51411 - DNA, 324 bp, Heterodera glycines
agattttacgattaaccaaaatcaaccgcccgcctttctcagcacagacaacccggaatgaggcataagaaataaaacaacaacatacaggcagacttgcagcaactgaaccccccgacaactttgctgtggggagtgtcgcgactcacgtcacgagaaataaaatggaaatgataaattttataagcatgatgcaatttcattaaaaatgggaaaaaccttaatttaattggaaatgttccccctcttcgtcgttctattcaaaaaagatttgtttgtttacattaattcttattcatttctcacacaaaaatgtattaatca

SEQ ID NO: 51412 - DNA, 1162 bp, Heterodera glycines
  unsure (1)..(1162): unsure at all n locations
atgaacaggcggtaaagaaatttaaaattaaccttaaaaatttttattttccaatttttacccatatttcagttggatttgtagcgacgtgtggatggacattcttccatcttttgaccgtccccaactcgggctcaaaatggcactgctttcttatcgtttcgatgcgctggtggacacgcattttgatggcaaaaggacggaattaacgctttggagaccaatcgcaatttgcaaagagaagaatattggactagaagcgagactgtgtgtatgtatcgatggcattttgtggaatttccgatgccggaccgtccgctgcgcaacaaaatcccgattaacgaccttcggatgnagtaatttctagggagtccaattatatggaaatccatatttttttcctggactgtgggaggcctgaaacgcatgaaaaacatgtttttagcttggtttgaagcttctaggaaggatttctatatccatattttccatatttcgcgatttatgtccatatttccatatttttccatattttggcattttggtccatattttatgtccatattttggcatttttcaaaaaaacctctattagaacggcccccagcagctaaattagcctttttgagcccaaaacccgaaaaatttttcaaaaaatcattttttcgccaaaatttctcgagaatattgaataaatttaaattttcttaaaaattaataaattatgtcaaaaataagcaaaaaagcgaaaatttcgcttttgttgttgattttgcgctaaaaaattaataaattttagcttttatgttttttttcttttaaaatgattgcacgtaattgccgaaaaaattcgagaccaatttccgagtgttgaccgactaattgcaaaacgaaagccttcaaaaaatttggaaatgtatctcatatgcaatttcaaccaataaatttgaagaaattttgcactcaattttgaaaaatttatttccatattttgacatttttgccatttatttccatattttgagatttttgccattttatgtccatattttgcgatttttggtccatatttttggactccctagtaatttcaattacatatttatttgtttatattaaagcatttttatttattttttcagctacattgaccattccgtca

SEQ ID NO: 51413 - DNA, 110 bp, Heterodera glycines
ggaaacattatgactttgcttatcaccggaatccttcgcaaatttgcacttacaaaattcccatttactgcatcaaattcttctttgtcgtcatggtgtaaagctgagag

SEQ ID NO: 51414 - DNA, 51 bp, Heterodera glycines
tcccacagtccaggaaaaaaatatggatttccatataattggactccctag

SEQ ID NO: 51415 - DNA, 296 bp, Heterodera glycines
atgcaatgcgataccggggaagcaaatactcaagttttaaagattgtaggtaaagaagttttttaaacgatttctttagaattttttagtcaatatttaaaaaattaaaagatgagggagctgaaattcgcagttcacaaatctgcaatgtacaggctaaaaacatgggatttcacgggatatggacactaattgcgctaaaaaaattttctctatatttaatgaatacttgaaagtcggaattaattttagctttataaaaaagaaaaatacgcaatattttatatcagaataaa

SEQ ID NO: 51416 - DNA, 133 bp, Heterodera glycines
atgaatctgacgaatgcggggagtttgaagaagaatacaacggaagttctgatgccgttttttgctcggacgaagcacaaaatgcagaaacacaaatcaagcagcaaaacccgatcgaaaaaattcacaatat

SEQ ID NO: 51417 - DNA, 922 bp, Heterodera glycines
gcaaatttttgccaacaacagcaacaacactttccaaatccacgcgattcgtcaacaccaaaatcaaacagcaacggatcatcaccatcatcaatcacatccaataaaccattttcatcatcaaattgtcttggaaataaaagtattgaaaatatgaatgacatttgattattttaattgagtttaaattaattataaaaaacaaaaccatgagaaagcattaaatttttaaaaattcaactcacaaaatattttattaaaaaacaattttgttccaaatgaattaaaagaattttgagaaaaaattaataatttaattataatttaaataacaataacactccttggatgtgaagccaatttttcaattttgaaaatctcattgatgccttaaaaagcttaataaaaaagcctcattataggtcataaaaaattttattttcggcacataaatttgggattacatataagaaatatgttattttttaagcagatcgccatcataaaacttaaaataacttattttaataaacacacatttattacagtatacagcacacagtcgtccagtaatactgtggtggccaacggtagtggtgccaaccgttcaacagcgactacagcggcatttgtcgccgaagatagttgttgcaaccaaatgcgcggcgagttggtcgcgcgcaactcggtcgccgagcgagcggagaaggcgtccagcgtttatgagaatgtggcgaccggcgagcgtcgtgaagctgctaaaccagcagctccacgagaagctaattatgatgctaatgatggtgctaatgaccataattatgagcagcagcagcaacatggcccgccacaaaatgaccagggcggtgaacggagggaaggcccaaagggggagatttggtacgaatttggatgcgtctga

SEQ ID NO: 51418 - DNA, 758 bp, Heterodera glycines
atgaaaggatgcttattaacttcttcattatttgtgtttttgataatcatcttaattagtattaattatgttggatcagaaaagaaaaaattggaaaaaaaatcatttgacgaaatatttggagaaaaatgggaagaaaaaaaaaacgaagaacagaaaaaaagagaaataattggaaaattttataaaataaaagagaaaattaagcaaaaaggaagaaaatattcaaaaagagaatgggaaaaaattgaaagaaaaatagcaaaaaaattgggcacaaatcgccgatatatttatgaatggatcaaagaattgggattaaatcaaaagaatttttacaaatcaaaaactgacgaagaaaaactcgaaattatactgaaattcattgaaatgaaaaatgaatttaaggaaaaaggaagaacatattcgaaaaaagaatggaacaaaaattatgaagaaatttgtaagaaaatcggagttggccttttcataattaaaaaatggaagaatcaatttggaattagccgaaaaataacaatggaaaaagaaaaaacggagaaaatgaaaatgtattggcaaataaaaggagaaaagccgaaaatgagtgacaaggaaattggaaaaatgatgaaaattactagtagaacaattgcatattggaagaaacaatttgggaaagaatatgtaatgcgaaattaaatggatgaaactaagaaaattggaacaattttgccaaaaatgaccgaagattaaataaa

SEQ ID NO: 51419 - DNA, 765 bp, Heterodera glycines
atggcattggcacagcgtcataacaggtgggtgctgtggctgctgggttgggtttgtgcattgtgacaaggagcataattttccttaaaaattaatttgtttttattggaaaattctaggaaatttctaaaaaaatgaaaaattgttactcactcccgtcaaagattcactagcaattttttttaaaattaaattttattatttttgacgatgcttttccagagatcgtccgtcgtcgtcgtctcgtaataaatatgccaactacagtgaaacggacgaagacgatgaggaggatgaggacggcggacgttatgatgaggacgaggaatatgacagtgacttggccgacttcattgacgacagcatggtggacgacatgcagagggaggactttgaggagacactcaagtgggggcaagcccaaccatttgtggaatttaccaaaacataaaaatttagcggatttaacaaaaaaaataatcaacgattactttgctttgtgcctaggcaaaaactaagcgggattttttaatttttgccgtttttacctttttataacccctaacaaataaatgttgcaaatgttccaggatcatcaacccgcgctacaacaaggagaaatggttggcccgcgagcggatgattgacgaccgtcgcatggacgcgcgcttccgcgacgtggaggcggaggagcggcactcgtcacggcttggccttgtcgaggacttgcgggaggccaagcggggcagcaaagcgctcggctaa

SEQ ID NO: 51420 - DNA, 186 bp, Heterodera glycines
atggccataaaatatggaccaaaaatcgcaaaatatggacataaaatggcaaaaatctcaaaatatggaaataaatggcaaaaatgtcaaaatatggacataaatttttcaaaattgagtgcaaaatttcttcaaatttattggttgaaattgcatatgagatacatttccaaattttttgactcg

SEQ ID NO: 51421 - DNA, 155 bp, Heterodera glycines
atgattgcacgtaattgccgaaaaaattcgagaccaatttccgaatgttgaccgactaattgcaaaacgaaagccgtctttgtcaaagcgccttaccgagtcaaaaaatttggaaatgtatctcatatgcaatttcaaccaataaatttgaagaa

SEQ ID NO: 51422 - DNA, 835 bp, Heterodera glycines
atgcaaccacttcatgacgacgagtcgtcagatccaaaagccacccccaggcaacacttgaccacaagcatggccaagatgcgttgtatgttgtatcgtaattaaagcgtaatatagatgcatattatgtaaataattgttttttgataaaattatttacataatataaatctatattacactttaattacaatacaacatacaacagacagtgcgcgcaccgccggcggatctgaagcgggaaacggcgtcaacgagttcaccgcgtacgcgcgcaagcgaaccaatgagcttatgtataatgaataaaattttcggtttatttttgtgatgggatgtaaagaggggaagggaacattcatgtcattcattaattaagccccacgcgctctcgcttttctctcatttcttttaccttttctactgcactattttcttacaccgtctgtctggcaaagagaacgctcattaattaagcgtttttctctcgcttttctctcatttcttcccttatctattgtactattttctttcactgtctgtctgacaatgacaagaaaaaaacattaagcggggccaggccgttttcgtacgggccgttttcgtacgaacacatgtttttggactataacttttttctttgccaaccaaatccaacattgttggtatcattcgatagccctatgtatcctctattagcctgcaaaatttcgaaaaatttcgttaaggttcaaaaaaagttcgagccaaaaaatttggaaaatttggttttttgaattctcatctgtctgctggtacgagaagttcaaggcgttataatttttttctttattaa

SEQ ID NO: 51423 - DNA, 1519 bp, Heterodera glycines
atgccgttgttttcacgccaaattatttggttttctctgctgaaaatgttgtgccatccaaaaaggtaatgaagcaaagccaaatttatgcgagaaaattttgcgaaaaaatagcttggctttttgaatttctctgagcatttaactgtcataacgaatgacagtttcactgactgatctgaggccggtatttgatcaaaaagattgagaaaatgatcggcggactttttaacacaaatttgttcgaactgatggaattcggatcgccatgaaatttacaaattactaataagttaaggctattttttaactggaaagctttatcgttcagttgctgatcattctaatcagagctgatcagtgatcactcttctatcggtgatttaaaataaatttcagatattttcgttctctgtttatggtggtttttctgcttggcgtccatctgttcgcactttgtgcagccattcacaacattcgcaccgcattgcccgtgctggcgggttggaatttgggggcttgggtcttaaattccgcgacaattttttcgggaaatttggaattttctccccgatttctgacatttctctccccgaggattggagaggaccttagtatatataaaatcgttcgaggtccaaagatttccaagtacagtaaaaatttttcggggtggggcgaaagccccgaaaattgtcaaaaaaacactcctcgaggcgacccattcgtcaaattgtgtgaaatgcagtatttatgtaatacagtacttttcatcggtcatactgtgactgcctacaaattgtttcttcgccaacgacttgagccctttcttgtgcgaccatgtttcagtgctgtgccaactttgcacccatcaattatacactgtattcaaatgtacttatcttttacaaaattttgctgatacagtatccattgttgttacaattctttcagtaccgtacccacagcaataattgtgcttttcgtcgtttggctgatcatcgattcaaacactaaccgaattcgacttcgatcattatttggcttcctttctctgatcactttttgctatttttcatccgcgcatcgtttaagagtgatttttttttattttggcgttttgttttgatcaaaaatgcgaacagaaattaagtctcttctcatttttcaaatcaaagaaattcagagaaaatataaattttcaaaacaaaaacgaataatttaataattaaaataatatttttatatggaagagaaatgccaaaaattttttttgtaaaaaaactaagaatttcttaaaaaattctagtttatggccttgggtaacaagttttctatgccgaaaagacctctgtcccttctcggcagataaaatggcgtcctgtcatcagcggtatactgctccaactcgcgctcggctttctcatcctccggtggtctcccggttctgatgggttccgctgggtttcggaaaaagtaaatgttggcaaaatttttctgaaaattttaattaatttta

SEQ ID NO: 51424 - DNA, 1959 bp, Heterodera glycines
acagaatctgccattctgattgagccgtccattatcacaatgaccgcgtccgaaattcattgcatgatgaccgccggctttgcatgcattgcgggcgctttattctccgcttatatcgcacttggggtacacaattaaatattaattgatccgttaattacattattaataggtcaaggggaagcatcgatttttgttttatattttatgattaaaaaaaaaactaaaattatatctattgaaaagctctaactttctgttcatatacgtgttatttttcagtttttaccacgaaattcttaaaaaaaagtataaaaatttatatgtgaattataacgtatttcctctaatattgtcccctccaacaaagcccaaaaatgggaggttgaaaaacccccgaggcctctattaaatatcttattaattttatttaacaaaattctgggccatggattttgcgtttttcagggcttaatgactcggcacgaaaatcgaaaatatggcaaatgtcatttaaattaattaaaataattttcaaatttcaaagaattgtccaatccatctgttgtccgccactttgatgaattctgcaatttcgttgggcatctccaaattggtctatcccgaggtggaacattcacagcataaggaggccgaagtgcgtgtgtgggtttggcacaaaatgtgccactgatttgaaaattagggttaatcgccgatccgatgcgggggttgaaaatttttattttctcgacttttatgaaaactttactccccgatgaaggtgttgcccaccaacatttttgtctttaatttctcgagccattcctgacaaattttgttgtcttcctcgatccccaactttgctctccgagagtcagagcttatcccgtttgaattttaaatcggaatgccaaggatttcttgtaatcacggaatttatttcaaaaaaaaatcaaaataatattttatttaattcagaagatgaaatttgccgagcgagacaatgaggagacaattttggagtgcattacagcatcctcaattcgtacggtaacacagtgtcattcatttcaaatacagtaatcgccccccccctatcctgctgactccgcccggttcagtcccattttgcaattgccattggtgccaatttggtcacttacattgccctgttggcatttttgaattcgactattggttggcttggctcaatggttggaatagcggaactctcattcaatgtatgtattatattggactgtaatgtactgtactgtatttttcaaaataattggtcgagaattgtggatttaaaatttttatgagagtcgagactgaggaaaaatgccattttctattaaatatatttttcatttatatttcaatatttttcagaaaatcctcggcttttgcttcttcccattggcctgggccatgggcgtctctgacgcacaaaacactgaggtaaaactggacctgatcaatgctttatgtaatcataaaaagctgatcgacactgaaatttcatgcttctttgaccttcggggaagaaattccccccaaaaaaaaaaattgaaaaattttctatcgattttccatttttgtattaattgcttaaaatggtataagagcaccattaaaaattgatgttaaaaagaattatgctaatatgtctttctgctggttaaaactcatttttaggctattggaatctttttttataaaacagaaaaaaaatgaaaatttattatttcaatagtcgtcgaaaataaatttttttgaaaaataattttaatgagagcacattaaataataaaaaataaaaattcatgtgctaaggtaatgttggacgaaacgatgaaagtggctgaactgatgggcatcaaaacggcactgaacgaattcattgcttaccaacgattggctcaaatggtgaccaacggcacacttaatggg

SEQ ID NO: 51425 - DNA, 233 bp, Heterodera glycines
atgctcgtcgactctctccgtcccgccactctttcgtcttccaaaaaacgttcagcgcattccatggacgacaccgaccaattcattggccacagtcccccgcacaaaaaacaactaatggacgaggaaaatgaccaaattttgacacaaaatacaccaaatgattcattggaccggcggaggccaattgcctttgccacaaaagcaattcacgcggggaatcggccagaaca

SEQ ID NO: 51426 - DNA, 419 bp, Heterodera glycines
gtaatgcttcttcgtcctaccgtaccctttgtgtccctctcccttttcctactgttgttccttttcatcgcttttccttccaccgatggcttcggagtcgaaagggctgtacgtgataaacgcggatggccttgggattggatcggcaaacaagcatgcaaaacagcggcaaattgcaaatgcaagtgagtcgaaaaagtgggcaattgcgctaaaaatgatttggcatggaaatgggggaggggggggggggtgggtcaaggctgatttggcaaaaaggacgacgacgatggcacttcacttccctttttagggatggcaaaagttgggccaaatgtgtaaagtcggaaggctacgcggccagcaattgttgcgacaaaaattacgtgtgggcatgttgcgggaagaagcccaaacaa

SEQ ID NO: 51427 - DNA, 1203 bp, Heterodera glycines
ggtagacaaacagacaaagatcggacgcaacccagagttggtggacgtcgtcctgcattcggtgatccacaggtcgtcctttgctacttcataaatttgaccaaatgccaattttaaagtaatatgatttctcgcgatcactctgaaataactggcgaaacagacaacaaaggcaatttacggtattacattttggaccgttctttgaatgggacatatgtcaacgacacgagggtaacattacaatttttctttttcaattattcctttctgttcaacaggttaaagaaaaagttttgctgaatgagggcgacctgatcaaattcggccatgtcaatggggcagccataaatccgggcgaacacgcgcctcaacaatcggccgagttcatcttccgcttcgaacgtgcgctgccaaaattcgcctactttggctactcacaaaagggcgtccgagtccatccgcaccatcaaaatgagcacactcacaatcagcaacaacagcagaggagggcgtatatgcaggtgcagaagcgcaaatggcagggaaatggataaacaaccgctgggaagaaaggaacggcacaaattttaacaaaaaatacataactaatgaataaatattaaataaattcttcatttttcaatgagtttagatcaattccgaccgcattttgcccaccgaagtgtacgggtcattggctccaagtggtggcgcgagtgccgccgccgccgttgggggtgccaatggcccaacggtgccaagaccaatcgcgcctggcggtagctgtctcgctgctgtcactagcagtgtttcggtggttgccaccaccacggcttgcccctcctcgaccggtgctccgcccacttgcgctgccccctccttcccttttctcccctcctcttccaatggtgtaacaacatccgcttctgcaactgttattccaaggtgtttggccaccacttctgttcacaatagcatccaaatcgcccaattaaacgccatggcagcagcgacgacattagcaaacactgcggcggcatccgcagcatcaaataacgcggcgcaacaacaacagcagaggcatcagtccactgggggatcggccgacggcacgacaaactctgctgctaccgcctcagcattgaacgccttgaaccaattgggacttacatcggccactgaggaacaggtcgagttgat

SEQ ID NO: 51428 - DNA, 108 bp, Heterodera glycines
tcaaagccccaacttggcatttggaggcctggaactcaattccgcttgacccaattatcaatttgataaactctatgcctcgccgtattgaggctgtgatcaaatcac

SEQ ID NO: 51429 - DNA, 611 bp, Heterodera glycines
atgacaattcgacgttattcaggtcattcaattaaaattattcgtgtttaatacctttttaaaattctaattaaaaattattaattttataaattaattaaaagtcaataattaagggccccactaacaatcttttactttttggtgccgaatgtatctgttaaaaaatggcaatattctaaattccttaaaaactggtgacttttacattccttttattggattttattaagaatttgacagaaattaaatatataaactttagtttatttttaaacttaaatataaaattggccaaattaagtcaaaacactcaccgaaagattttttgtatcataaattttttttttggtttttatccaaattaagcatttatagtatgttcgatagctcaatgtgttattattattctgccaaactttttccaacgcccggaggagcaaaaattcattcttataattcatttcataattaataatttagctttgcttatttgcaaaacaatagcggtcaattatcatcagaagaatgctttggagaaaaggtatttattaattaaaccaaatattttccaataaatatttacattttttagatggtttataatttga

SEQ ID NO: 51430 - DNA, 636 bp, Heterodera glycines
atgccaacctccgctgcaactgatgaccacaagttcaagcagtttatgttccggcataaaaacggcagcctccggcagaacggccaattattctgacaagaaattttcaagcagtgcttctgaaaagaaagcaacggcacaacaacaattggaaatgaaagcggtgaaaaaggaggagaaagaggaggaggaggagaaagtacagaaaacagcaaaagaacgggggaaatgccaagcggcgaattctccgctaatgacggtaaagcatgagatttgtgacgaagcttcagtgcatcacacattttaattgttcaggagaagaagccaattatggccgtcaaaggcatttcagtgctttcgggcggaactacgccaccggcacaaaaaggagggccctctcagagcggcggagggcgtccgttgtcggcggactccgactcggagagtgccaagtcatcatcaatggttggcgaatcgcgacgcaatcaccacacggtggtcggcgtggtcagtccgatgcagcaccaacaggagacgacgttggaaggaacagtgagagcgaattgtaccgaagagggaggagaaacagcagagaatgatcagccgatcggagagaaacggcacaaaggcaattag

SEQ ID NO: 51431 - DNA, 791 bp, Heterodera glycines
  unsure (1)..(791): unsure at all n locations
tagtcggaatgccgtcctcattntgcgttttcagcttacatccgaatgggcaaatattgcataattggcgagggttcgatcattcgtccgccctacaaatatttcagcaaaggtaatgggcaaatgaattccttcgtcttacatatttctgattatttttccattttaggctttacgtattttcccgtccattttggtgattacgttttcattgagagggtaacacattaaatgagtaattaaatgcaaagaaatttttatttatttttccgttgggacatcattctgaagggtttttaccaattgtttgtcgaggagggtcttcttttcaactccccacccccatttagtacctattttattttccccttttcatttcttcagggctgtgtggtcgttgccgcttacgtcggcagttttgtgcacatcggtcagaacagcatcgttggacagaactgtgtggtcaaagactgctgctttattcagcctgacagtgtgctaatgcccgacaccgtcgtccccccgtaaaatttataaatttaataaatattcgataattaaaataacaattattcgtttattctttttataaattgatgcggaattctggcaacacattcgggaaaggatcacagattcaccaacttaagcacaaattaattgtttttagcttttccatcgttggcggtaacccggcccgcgtgttggccgaatggcctccgacgtgccaatcgctgatggtcgatgcttgtgccggcttttttgacaatttccagccagaaacgacgatg

SEQ ID NO: 51432 - DNA, 2267 bp, Heterodera glycines
cttccgtttttgatgcttccgaccatcaaatggctcaatggcccttccgacgactgtccctcctccaaattgtttctgctcgactccgactccttttcgctgtttcgtgtgaatgacaagccccccggtggttccgctgctcatttggccggcccttccgctttttctgtcgaccctttggtttcgtcttgttccccccttttgcagcggcaggaacaggtaaggagaagaacttatccaaccggtcttcaaccatccgttatttttgcaggaattggtccgtaccttctccttggaccacaccagggacaatcggctggccattggcttcaccagcggtcggataagcgtcgtttccgctaacacacaaccgggcgtaaagttggtgcaaattcaatgcatttggcgagcaaaagctctaattttaaggtatttgcgaggcgaagacattcgggaggcgcagaaaggcatcaattgtttggattggaattttaatgattcgtcacgactctgtgcagcctatgaaaggtaaatgcaaactgtgaattcagagttgggagaaatggggcgatgtacagttggggatgggggggatgtggccaagtagggtaacgcgactgacgaaatcaccattttccattttataatttgtgatctcatcatcaggaaacacgtccttttcccaagttaaaatattcgtttaattccatgtttaggaatcgtggtactgatcatgccgtcgttgtgtacgatttgaatcggacgacgcgcaatgtgcgagaagtgccaatgtcaattttcgaggctaattttgccgaaaaagtgctcagtgtctgttggttcaggttcctcccctgcttctagttccaattttctcctccaattggtttgctctttttagagacgacccaaatttgctgctgatcaacgcaagtcgcggaattcgaattgcggacattcgcgagcacggcaatttccacagcactttgagtgtccaaaatccgttgatgggcctttgcagtgagcccaactttggctttcggttccgaaaaatgaattcattcactcagtcatccattttcaatttagttttgcttgttttgctcacaatttggtttttgtttacgatcggcgttctttgggctctgcgccattgcacgaaattgaagcttgtgtaagtaaatgggtgttgttttgtctttaaatgcattttaaataatatttttattgaataatgggagtcggctaatataaacaaaagatggggaagcgacagccatgaagtaatggtttttggattatttagagttattctgttctttcattgcatttttcgcccttttagtcaaattccaaagtgttaaacaaattggcgtggcacaaccgccgtcttttccatctgacagctttggccaaagattgtggcaatcttttcaatttttccatttcatcctccgccttttctgaccgtcaaaaaaatttgactggcgctgccgacccatcgtcgaacatttacagtcaattggacccatcacaacggaagggactcgacattgatggtcactcatacggagttcatttttactcggtttggattgttttttgatttaacttattgttgtaaatcattctttgaattcagctgcccggaatgtcgtctttgacctccttcgactggcacccgaccatcagtgatcggttggcacttttacctgtccaagaaaagccaatggcttttgcccattcgattgcctccacgaaacgaattgccataattaaagtatgtcttgcttcttatttttttcactagttttctgttgtgtttagcttcgtgatgacgtcaattccgtcatcggtccttccggtgacttttgcatttcggcggggccgcagctgaactttgaaaacggcgagaaattgttggccaaacccaactgcacttctgacattgacactgaaacactgttcaaacgacgggtgctcgccggctacggctacggaaattcactgaacgcattggcaagtgagtgaaaggcattcattcagtcattatttgttccaaaaaagcactgctcgaatattcgaagaaggccattgagagagatcaattcgcttcggatgacttacgcttttgctgggattggctttggatgcaattccaatcggcagatgctaacgaagtgcagaagaattacgggaccatgtgcgaagcattgtttggatgtcctcaattaatttactttcattttaaggttcgctggcattaa

SEQ ID NO: 51433 - DNA, 644 bp, Heterodera glycines
attcttcaaattctcaaaattcgcccttcgccaatgtttccaaacacaaattccttgtcaaattctccccattcggattctttcaatagaaattcaacctcaaaaaggtgggaggaaacaattgcttgggtcactcacggaaagcgattgtcacggcgaattctaaatccgtcaaaggatttttcggacggaggttgccccggggtgccgatgggttcacccagctttctttgatcactttagcgcttgttgcggagattatcgctcaacatttgcctcgttatgtgttatctttgaattcttttccccaagttcattcgttggctttgaagaaatacaattgggagactttggaaaggttagacagagagagaaggggggatttgcctaacaatgaaattttaaaaattcaaacgaagtttatttttctcgacgcaaccccacctttttgaaactaatttcagttgtcatttgctatttaaggaccgttttacgccatttgggcatccatatctccacagagcatatcgaatctttggcaaatgccgaagagggaaccatccaaaatttccttcccattcttcgatcccaaattgacgatgccatttccaaacggcactttcgaccctcttccaccagcagca

SEQ ID NO: 51434 - DNA, 1046 bp, Heterodera glycines
gaatcgctcggctgctccgtcgcctcttccgccaaccttcaactccgctcgcgtctgcttgacgctgccttggccatgcacaatgccctcggggtgaaaggcgcgtctctttgccttcgcttccccaaattctctccacccccgcgttcgctgactgcgttttgtgttcagacattggccgtgtccaccacgtgccgctcgtttctcaacccggcacgactttgctggtcaccgtccgactcgtccccgaaggccaaagcgacgaggtgcaaggcttggccatgcgatggatgcgcatggagaagcttttccgccgtcgtcaggcgtgtcccgcgcttgaggtgatggacaccggcggttgggctgtgttgcgctgacaattgtaactttcttgaagttcctctcacgcgaattactcccactgctcaacttctacgaatgttcgttggttccgctggagcccggcctttacgtcgcttacctccgcctgcactcctcgctcaactctatccatgtgctggtgcccgacaacctcatctcctccctcccatttgcaagtataataatcaaccttttttactaattgccctttaattgtctccccaattagataatttcccttttaagacgtccgttcgaattcgcacgtcacccgcgaagaatgggcccttctcaagtcgctggcggaggcggacgatgaaaacggagtgccattggttatggaaaaagctctgccggagcagcggagtttctacgagcagctgagcaaggcgtcgagcagagtttgtcgttggcaaaccaacggatgccaacatttgcagttcagttggtcaaccatttggaattggactcagaccaaatcctcggcacgcgtctttttcggcatcgtctcgtccaactcaacaagtacgtctcgctcattttggtgatgccgcgtgcggaggaagtgtgtcaagtgaatgcctgtgcaaagggagcggacaacggctcggccgtcgcaactttccgcggttgcgtttctgtgccggtgccggtcttccaaatga

SEQ ID NO: 51435 - DNA, 828 bp, Heterodera glycines
taattaaatccattccttcgggggaccgtgccgggtgccgcggggtaagcagtgctggttcgtttcatcacggcaccgaaccttttggctagtcagcaatcgttgcttaacttgccagatcggacgggtgcgcatgattccactgttccaagcaccccaccaaaagcaaaacgatataaccaaaatataaggaaaaattttttaaaaaattttttctccatcttcctttttgatactaaagcatcagagtgctaaaattaagttgtaaataaaatttggtgcgctttagagcactttctgaaaaaaatatttatgaaacaaaaaaatcgattttttcaagtgtccgtttggggtactcaaacatttatggggagcaaaaatccaacgcagaattaaagtacaggctatagggaagctattcccgaaggattcggtctccccataaatctgggcgcatcggttcggggggactgccccgaaaacaaaaaaatcgattttttcaagtgtccgtttggggtactcaaacaattatggggagcaaaaatccaacgcagaattaaagtacaggctatagggaagctattccggaaggattcggtctccccataaatctgggcgcatcggttcggggggactgccccgaaaacaaaaaaatcgattttttcaagtgtccgtttggggtactcaaacaattatggggagcaaaaatccaacgcagaattaaagtacaggctatagggaagctattccggaaggattcggtctccccataaatctgggcgcatcggctcggggggactgccccgaaaacaaaaaaatcgatttttt

SEQ ID NO: 51436 - DNA, 428 bp, Heterodera glycines
atggagacttctttgttctcctcctcatcatgttcagcagcggttgaagatgatcagcagcagcaacaacctcctgcagctgatcaacaaccaacattggcgcccgattttgctactactgctgatcaacaacaacagcatccgccattgacgatggcacaggcgctgatcggcggcttccagccggctgtctcatcggcggctgatgctgctgatcaccaccacatcaatgaactgacgcttccgccacaccaattagcattgtcctcatcaccagcaacaattacgtcatcctcgttgatcatggcaccggactttggcgctgatcaatccgcagaacaacaacgacaagttggagctacggcagcaacgatggccaacggcaattgttcagcggcgattggcagcgaaatggcggcacaaaatcg

SEQ ID NO: 51437 - DNA, 768 bp, Heterodera glycines
atgcgcgatgcgcgatgcgcggccgcggtttttttctgtgcgcgctccagccctgctttgcatgcaaattatcgcctgcagcaatttgtttcgtggaaagcaaaggcaactgaatcatggcttgccatcgctgtaaaaaatgtggcaaatggaaaaattaatttaaagtttaaatatttttttaattccaggaagttgccagcgattcagaaatttttgatgccctcttcaaaataacattttacgcggaagtgaaaaggtaaaaatgatcgggccattgttaaagtgatcactgaccattgatcagagccaaaatcatctgaaaaaagtgatcaaagcccttagggaaagcattgcatatttcgaaagtttgaacaaaaatccctaaaaattccatttctatgctaaattccgatgctttgtcaaatgagaccttttctcgttcattcatcagtcattttggaatagcttttcgatcacatccaaaatttcatatatttctttttgttaataaaatttccaacaaaatttttcaggtggccaaatgggttggaagtatacaaatttcggcatgaaatggccacaatgggctggtcgctgcaaatcaaacaactcgacgtggacgagtggcgctaacggagcagagaaaagtggatatgagaatggaatgggaggggattaatgggaatgagcgatttgtttaaccaatttttttttttcacatttaacactttttgttgaaaaaacctttgcttttcatttttatta

SEQ ID NO: 51438 - DNA, 211 bp, Heterodera glycines
atttgaatgagaatagaaagagccaggttcgatgaagttttggtaagccaaaaaaaaatccaaacattttttataaaaaatttaaaaatgagaattcatgcgagattttctggaaataagcttaatatggcctagttaagctgtaaaaaaaatttggggcgatttgaatgagaatagaaagagccaggttcgatgaagttttggtaagcca

SEQ ID NO: 51439 - DNA, 356 bp, Heterodera glycines
gaccgcgagtactacgagatcggccgccccttcttcgagaaggccggtgtcgcgcacaaggtggacttccgcgagggacccgcggtggaccacgtcgacaagctcctcgtggatgaggccaacgtgtgggcgttcgacttcgcgatcggcgacgccgtcaagcccaagtacgttaagtaacacgagcagatgctgcgcctggtgtaggtcggcggcaccatcgtgtatgacgacacgctagtggtgagcaccgtggtgatggcgcccgacacccccatgtcggacctcgatcgcaggttctccggcgtcatcagggaccgtcatcgtccgtctctccgccgaggaacgcatcgagg

SEQ ID NO: 51440 - DNA, 825 bp, Heterodera glycines
atgtcaatttacgggttaaatcacgtgtcaattcacgggttaaatcacgtgacaatttacgggttaaatcacgtgtcaattcacggtcatgatttacgtgttaatttacggtcatgtaagtttaacttacagtcattattcacgtgtcaatttaagggttaattcacgtgacaattcccaggcatgatttacgtgttaattcaaaatcatgatttatgtgttaatacggtaatgattcaaatgttaattcccgggcatgatttacgtgttaatacacggtcgggattcacgtgttaattcacggtcatgtacgtttaatttacagtcattattcacgtgtcaatttacggcttaaagcacgtgtcaattcagctcattattcacatgtcaatttacgggttaaatcacgtgtcaattcacggtcatgatttacttgtaaattcacgggcatgatttacgtgttactttacgggcatgatttacgtgttaattcaaaatcatgatttacgtgttaatttacggtcatgatttacatgttaattcctgggcatgatttacgtgttaatacacggtcatgattcacgtgtcaattcagggtcatgtgcgtttaatttacagtcattattcagtgtcaatttacgggttaaagcacgtgtcaattttttatgtaacaattctttattaaatatatacaatagcatattaaatcattaggagtatgtttttagtgaaattaaagagataaaaaaattttacttttaattttccaaatttttaaatttatttgtctacaacccaatatctgtcttaagttaaaaatttaaa

SEQ ID NO: 51441 - DNA, 1046 bp, Heterodera glycines
atgccgaacgaatgcagcggagaatgtaagtggcatttgtcaatgtttgaatttctgccgcttttctcaatttgagtggccacggaatgggcgaacactcgcgcaaattcacttccaatgggaattccttctgcacttttgaaggtgtcaccagagggacacacaattcgaagaacaatttacgattttgagggttaatggaagtcgccgtggaaatcgaagtgaaagaaacgacggaaaacgaagggacagatgaagcgaatggcacggcaaattcaaagccgaaaatggcacaggaaaagccgaaacggcagcagggggaggaggaagagtaagcgaggaaaacattggcagggagtgtgttgtggggactgtccgattttagccttttattggtgccatctctctctgccggcgaatttggccaccaccaaaagcatttcgccgcttctccgattaaaacggatgaggtacgattaataaaatcaaattgattttcccgtcggttgttcttcttccattcttcgcttcttcagctgcgccctctcccccaatttcggcactcttttcgccacaattcgccctcctcctcttccgccgccgtcggttctctccgccaattgcttcgcttcgacccctgccaatgtttcgacattggcgaagtgctcagaatttgtttttgagttttaaaatgcaaattgcttctcattcttttcaacagtttcgcgttcgaatggcggcggctcagcagaaaattgagaatttttgttcattgaatttggacaatgtgaaattaaagcaagaaaatggacaattgagacaaaagttggacaaaagcgaacatcggtaggaaaaggaggacaattaaaacacaaaaagcacacaaaataattctgaaggatcgcacttttggaggcgtcgcttttggaacggaacgaacgattgaaggaaatgctaaaggaaaatgtgttcatgagagcacaattcaaaaaagtgcagaacgaattcggaatgcaaacgctgaacgaagtgttcaatcggagggg

SEQ ID NO: 51442 - DNA, 2385 bp, Heterodera glycines
atgagcgacgaattcgttgtggccaaattcgattacgaagcccaagaagaaagggtaaaaccaaaaactcaaataaattgggcattattttgatttttttggtctttttggtcaggaactttctgtgactaaaaatgaaaggcttaaattgctggacgacactaatccatggtggaaagtgagaaggaattcgacattcgaatttttaaaataatttttaaaaaacaggcgatgaacgcccgcggccaaattggctttgtcccaagcaattatatgcaaaaagagtcaattggtgagagaaggaaacggacaaaatcacttgaggaaatgaaaagttaaggcgagaaggacaaggagaaccttcgctcggcaaatcatttgagcaacggacatggaaaggttaattagtagccaattaaccctaattaattaattagtgtcccattgaatccgtccatgcgttttcctttatttctgttttccattcttcccctcccctttcagaggctccattccgtcgccgtcgttctgttcgattacgccccccaaagggttcgttttttccaaatttgaattcgcttggccaaattggcccatttgccatttgtccgtttaaggacgatgagttggcactgagaaggggcgtccgactgcgcgtgttggacaaatcggcggatgggtggtggaagggcgaggaggagggggccggggcccgccggggatggttcccctcaaattacgtgagggaacagccggcggacgacgaattgccggaactcagcgaaaacggaacgccaaaaatcaacggaattggcacaacggcggaggcaccgcaaacgcagcacagtccggacagagttttggaggtatcggcgggaaaaacaaatggaaaagcgcgggacggacagtgcaaaaacaaagggcaaattcggggcaatttcgaacaaatttccattcattttaatttgtaaaaaatttgaacatattttaacaatacgaaggaatttggccagaattaaaaaaccctccatttccataatggcttttaattttacattattttattaggattttatataagttctgtcaactttatcgaaaatttcatttaaaaattcataataaattcaaataataaaacaaatttaatcaaactttgcctgattattcccttatattagcaccatcttttcaccaattgattaggcttttcactttggcatcacaaagttatggcctttgatgaaattaaattcccatttattgaatgaattccctccaatcatcttaattgcactaatattcccaattgtttcctaatctttgcgccgatttgcttaataatgccgtgccttttcagattgtcctctgtctttactctttcgaagcacagaaccctcaggagctttcctttgtgaagcacgaacggttggacattctcgagcaccccgtggatgtgagccgattaatgggccactaattaattaatttatttattatggcaattaggatcccgagtggtggatggccaggaaccaatatggacagacaggtcggtctctgtctgctggtggccgttaattcgcttccccccagggctcgtccccaccaattacatcgaagtggtcgaccaaaaccccaacaggggcgccttcgactcccccggcgtaagtgccgcgcctccgtccgtgccctcctcttccctttcgcccgtccctccctcccctcggccaaactcttacattgacagttccgactggtggttttttttactagatttttgttaattagttaatgcattaagggaccaactgactgggccctacgcgcgacagccgtggcaagtgaaaacggagggagggaaacggcacatttagcaaaggcatagcccaggggtttaagccgactccccccgaattccgtccattctctgcatttgggcgtggcttttacctctcggcacgcccattctctaatggcgaaaaagtgcaggtattacggtcacataacacgggaacagtcggacactctgctgaaaacgcgcggcgttgagggcgattttttggttcgaaaaaatagaatgtttggcatttcttcgaaattttaatttttaggtgcgcgacagcgaatcgaagcccggagatttttccatttcgctgaaagactcggccaaaaacaaacacttttgggtgcaattcgacgccgcgagcgcccaatttataattggcaatcgccgattcgaatccatggaaaaattaatattgtgagcaaacggaaagccaaactgtggaaatttatttgaaattcactcttaggaattatatgagttcgccgatattcagcgacggaattgtgaaccttttcctgcggaaacctttaccaaaa

SEQ ID NO: 51443 - DNA, 2040 bp, Heterodera glycines
atgcttttggctttggacacttacatgccaaagttttctcgacgaaatctccaccattttgcccaaatgatcgtcattttctgtttcattgttctgaccgttctggtgctgctaaaatatgaagtgagtcattttgagagagaaaagtgccattttcaaaccaatcgatcgacgtgtaatgccgtgtttccaacaatacattcgccatttgcccattaatttccctctctctcccccccccccccccattattccattccttcttcccatatgctaaaaagggtcaagcgacggtgctggtgatgaaccagctgggcaacgttttcatccagttcacttgggatgcgtgctatctctccggcaccgagttgatgcccaccgttttgcgtgcctcggccatggcgagtttttcgctggtcgcccaattcggtgctttgatcgcaccggcggtgagtcactggcaattcaaaatcaaactgatcatgctaaaacccttggaagttcttttgttgctttgtgcgtccgttttgcttctgtaccttccctccaccggcctttgccacgcttttcatttcccctcgggcgattgtcactttcacagttttgccaattgctttctgagtgggcatcgactcggtgtgccaattgatggcaatttgctggtgccatcccatgcgttcgttgtaatttggcactctctctctctctttgctttccctatgttttgctatatttttaattaattgcccaaaatttggccccagggcccatggattcttttcatcaatctcttcggcgtcattttcctcgagttcacttgggatgccaacgttttgtcggcggttgagtcaatgcccactctgttgcgctcttccgcccttggcagttgcagttgcatcgcgcgagtcggcggattttttgcgcctgtggttggctttttgtttttttatttcttttctctttttgtttgttttgttaacattgccaattaattaacaattactaattttatttaattatttataattgtattagttcaaattttaaagaaatttaaatgaattaaaaattgaaaatattaaaagaattagacaaattcggttaaattatttataaattttaattaattttgctctgattgaattcatatttatgactccccccatttgtcagttggttttcttcaacgagcattggggtgccagtgcctatttgaccgtttcacttttgggaagtgccaatttattcgtctcgtggatgtggctagtggacacgaaagtaaaaagaaacagtttaaaattcgaaatttgaattgtcttagggcgtcgatttggacgcggtcattttggacgaggaaagcgccgaaggcgaagaagcaaagaaaagttggacgagagaaaaccaaaaaggacagaacagtgagggagaaatgttcttgagaaaagcgtaacgggtaaaaaaacgaacgacgcacgaatactgtattgttgtaaaaagtacgatacttacaaaagatagtcattttactcagaaatcagtcgcaatttcattccctcgggccatttgccaatcgctaattgattataagtggatgtactcacaacataattaatttatcagctttaaaatgtcaaatgttctgttgctttgtatacaaatattaatgaaggagcaaaatttccaattttcacccaaatgctctcgcaattccgagaaaggcaagcaactattaacgaaagtgctccctaattacacaattaagcagtgttaccatgttttgtcttgtctgttattttatacattcaaacggatgagtttttggtttttaatttgaaaatcaaaaaaatgaaaatgaattctttggccttttgtcccttttctttggcggttcattcgctgctcttttggtcagctgtttttccccctcacttttctgttccgtcgtttattttggtaaaggtttccgcaggaaaaggttcacaattccgtcgctgaatatcggcgaactcatataattcctaagagtgaatttcaaataaa

SEQ ID NO: 51444 - DNA, 513 bp, Heterodera glycines
atggaggagggaacggtcaaaatatgggatacggtggaggatacggtggaggatacggtggaggatacggtggaggatacggtggcggtggctataatcagtgtccgcttggccaaacggcggacggaagtcagtgaatggggcaaaaagagtgggggaattagatgggaaagcctacgcctaattaacccttaattgggctgatgactcactgtcattaaaatctcttatgaaagatttaaaaaatgtgataaccttcaaaccgttcactcattttcagcttgtgatggcctcaaattcttttgcatggatcccaaagagaactgttacaacggcatttgttgtgagtgcttccccttccctccctttggccccatttaaccgctttttcctttttaggccaaccttcccaaaaccccggcttttacggctgtccgttgggcactttcgccgatggcacttgcagcggcagcctcaaattttggtgcgccgacccacgagaaacatgcgtaa

SEQ ID NO: 51445 - DNA, 379 bp, Heterodera glycines
cattgttcccgtaccatagccgttcattgtttccataccgtagccgttcattccgtagggcattgttcccgtaccatagccgttcattgttcccataccgtagccgttcattccgtagggcattgttcccgtaccatagccgttcattgttcccataccgtagccgttcattgttcccataccgtagccgttcattgttcccataccgtagccgttcattccgtagggcattgttcccataccatatccgttcattccggtgccgataccgtatccgttcggtatgttcccgtaaggcgatgttcctcccgtaccgtaacctccatacggatttgtgttgctgctgctgctgctcccttgctgacctttttaaaaaaat

SEQ ID NO: 51446 - DNA, 290 bp, Heterodera glycines
atgaacggatatggtatgggaacaatgccctacggaatgaacggctacggtatgggaacaatgaacggctacggtatgggaacaatgaacggctacggtatgggaacaatgaacggctatggtacgggaacaatgccctacggaatgaacggctacggtatgggaacaatgaacggctatggtacgggaacaatgccctacggaatgaacggctacggtatggaaacaatgaacggctatggtacgggaacaatgccctacggaatgaacggctacggtatgggaggcgg

SEQ ID NO: 51447 - DNA, 680 bp, Heterodera glycines
ctatacatttattttcattttgctatggtaacaccaaatgggggaggaggacggtgccgacgaattcggcacctttggctgtccatgtttctgctgttgttggtaattgcaaccactgcggcactgttgggactgttgacacccaggtgaaaagaaaatctcattaattcaaattaaaataataattttatttatttatttaagttggcaagttgtttatttggaggtaagaaaatttaaattttagaaaaatgaacaaatataatactttaaatttaaaatattaagatgatagacttttgaccttcaattgcattgattctctatatttttccaacaaaatcttaaaaaaattgtgtgaatagcaaattttcatccattttattaaaaataaattaattaaatttttcaatgtttcattaaaatatttacgaaattattgtttattgtaaatattttggtcaaatattatttttataaattttttcgtcttttttggtctttttaaatattttaataaattttggtatttttcgtaaatatttatttaaatatgtatttaggaatcaattaatttaggatggtcgtactgaacatcatcatggtttgtggttggattgtaagcgcgacttttcatatgactacggcagacctcgtgaatactatgagacgctacacag

SEQ ID NO: 51448 - DNA, 1079 bp, Heterodera glycines
atggccacccaaatttgcgttctgttcccaaatgcgcctttgtcctttttgctatttcaattcttcgccatttattcgaaatggtaattaaaattaaataaaataaaataattttaattttattttttggagggattgggccaatgagccgataaaattggcccaattggcaccggcgactctcaacaaaaacgtgcgcaattggcgcccctttttgggacggagttcgatgacagtgatcactccgacattccctcaacaaaacgcaactttcaacgtcaacaaattcactctcagaaaaatagtggaggaattggagaacggtgggaaaatgcaaaaaaataattaattaattaattgaaattttatttagccaatgaaatattagcggaaaatccccaaaattggagcaaagtttttgaggaaataaaaatagaagaaaaataccggcactttgcggtaatcgtttgttcagctgttgattataaacggtactcaacaaattgtgcctttcaaaagagtaaaattcgccaaaaattatttgaatgggcaaatttggaaaagaattcctcccaattggacaattaccatttgatgccgcaatttgagcagaaaacaaagtgcaaaatgttaccaaagtgtgcccattaatccccaaattgtttgggattgctaattaattaattaatttagccaagggcccgctttttgcactttttggctcgtcggtctttcgctgaaagcgcaaaatggagaagatgataagcatttggtgccaatttatacactcgatttagccaattcacaacaatcggttgaacaatttttgatggattcattttttacggagggacaaacacttcaaaaaaggtaattaatcggacataaatgagagaaatgctaaaaaaatgcattaattaatgcaattaattgcttacaaatgaattaattaacgcaattaatcgctaaaaaatgctaattaaggcattaattaattaattaaggatggagcaaatgcaaagcgacggcaacggcagcagaagagacttttaaaaaggataagcatttgaaataataaa

SEQ ID NO: 51449 - DNA, 617 bp, Heterodera glycines
atggtaatactctcagggatcttaaaaatctgttccaatacaaaacacaatgtgaacgaatagaagcaatgaaggaaatgaatccaaaatccgggtccggtcgggaacccggacccggccaaccctaggagttttcaaattcaaaagttatttaaaaaaaactaatttaggctgaggatgctttgttgtccgaatttgtcaaaggactggcaacaaattttgacaagtttttacgattgtttttatttgagaaattccaaaaaaattattggcaaaaatatgcggcacattttggcgttgtgtatttgatgaaaaagtattggcaatgtgatgagaatattttaaatggatctgacgaagaatgtcaattctatggcaaatatttgcatattttgtacgaatatttattccgacttaatcttgaaggtttattttttcattattttagaaagaattgccattaaatatgataaaaccaaatttgggatccttcagtggaattggaactcaattttttttttttttgcgggacgggatcccgttgagattagccaatatctcgcaaaaacatcaatagtgatgagaattatatttattataaaccccgaaatatttaa

SEQ ID NO: 51450 - DNA, 589 bp, Heterodera glycines
atggcacaactgatgccgatgattccccaaaaatggcgcagaccagtgccatggacatcaaaaatttggcaccaagaaaataggcaggctaacagggatgcgattagcctgtaagcaagaaaaaatttcacaacctgccaaaaggaaaaccggaaaattcaaaaataaccaaaaaaattttttgtaatgtttttaatttttcaaagattttaagacagaaaagttgaaagaagttgggttgaacagtgaaattttttaatttttttgacaattatttaacaaaaatgattttgaaatgccaattttagcaattcattaatcgcatctctgcagcgaagcctaaacccaaaagacagagaatgtgattacaaaaatgagagctgttagttagcccatgcattcattagttttattgcaaccatttttattgtttccattgaaagagatttgttgataaaacaaaaacggcattattggacatcttaaaaaaattgtgcatcctttttggttttttgaaaaattttgagaaaaaaataatgatagttacgccttaaattttgaagaaaaatttttaaaaatgataaaaaaa

SEQ ID NO: 51451 - DNA, 530 bp, Heterodera glycines
atgccaattaatgagctgattttgcaattggcaattgacacagcgaatgaatggcaaacaaatgaaagtgccgaaagaataatacaagaaaattttgacaaaaatttaaaggaaatgcttaaaaaacggaaatcacgacaattgaggacggtcgatggaaagccaaggacctgagaaataacaagcatttgattatcgccctttcaaaattcgatgattcgctcaattgggaaagttattcaataaaataaattatatatattttttattaatttaaatttagattgatgattgcttatttactgaatttgttataggaaaaacgacaagtattgacaaattttttaagaatgatgaagaagattcagagtcaaaagtagcacatattggcattttgtatttgatgaaaatgaattggcaatgtgacaaaattgatggaaaatttgatgaatacgaacagagagaatgccaaaaataccgtagatatttcgacattttgtatgaatatttgagccgaatttacgttgaag

SEQ ID NO: 51452 - DNA, 561 bp, Heterodera glycines
atgactacagaggaagtttataatacaaatcatattttgaatgagccaaaacaacacattctgaacggtgactgtggcgtttcaacgtcgacggctgttaaatcgcagcaaatcaatgagatgacgagtaaagactactactttgactcatacgcacattttggaattcacgaggtatttacttggccgtggatttatattttgactcattttttaagtcactaaaatataattgagcaaactccaggaaatgttgaaagacgaagttcggacagtgacttatcggaacgcaatttaccacaaccgtcacctcttcaagaacaaagtggtgatggacgtcggttccgggacgggtattctttcgatgtttgctgctcgcgccggggcaaagaaagtttttgcggtacgcttttgattaatggacgacacattaatgatgagttttggccctgctcagggtggaatactcgaaaaatggccacccaatcgaaaaaaatcatcaaagacaatcagatggacggagtcattgaggtcatccacagcaaaattggaggacattga

SEQ ID NO: 51453 - DNA, 400 bp, Heterodera glycines
atgaagcccgctttattactgatatttatttttcttgtattttatttccaaatttattctgcaaattcgactgaatgcggtggcattccgacgggtaaaatgaaaacatttaaatatacttggcagaaactggaaccgaataaaccagtggaaatcaaatattctgcttccaaattaaaaggaaaagaagtgattttgcaacaaaaaaaatgccaatttatttcgaaataattacaaaagagtataagtttgtttaatggtgccattcttaggtgccatttttacagatttactggcaaaaatggtgaacccgagaacaaatgtgtgatcatcaaaatttatagcaacgacagggttcgccaacatttgcggaccgactttttgcgggtgaacctgttaa

SEQ ID NO: 51454 - DNA, 180 bp, Heterodera glycines
atggtaggtaaagctgattttctggaaaactaataagcaacaattatcattacttgagctgattaattgataattttaagattaatatttcagaattttaaattaataggggaaaagagaatggtgcgaagcagattcaatgagaaataatgtgcgaaaacgtgaaaagagctgaataaa

SEQ ID NO: 51455 - DNA, 1633 bp, Heterodera glycines
atggtaaaactgggctgctgaaaacacattgacatattttgatcatcaaaattacttgtttaataaacaagaaaaaaatacaaatgaattttacacccaaaatatttctatattacttaatattaatcaattatattaacatatttaaccaaaagatttacaaaaaaaaaaattaattatataaattatataattcattaatttgatcaaaattattaaaaaagccgattaatacaaataaattaaagaacattaaatttttatttatatttttattttgagaaagattttttatgaagaaagttttataatataatcgctgataaaaacaaatgaacattattattcatttgactaaaacatcgtctcccaacaataaaaagaaaaaaacccccaagaaataaaaaaatttcaatgacatgagcactgtgaaattaaggccgaaaagataaatattttaattaattatcaaaatacttaaagaactaaaggcgatcggtgtcggcctgttattttctaaaattacaaaatctttgatggcatataatttttttacatttattagaaatttagaaaaaatatttctaatgtacctttcgatgcagatcagcaaaactcaattgcaaaccgtagtcagacataatattattttacaaatatatttaggcaaaatcatttcaaatttaatttaagtttgattttattgataatggtggattttaaaatagttgactttcatatttttttgcttactttagcatcttatgcttttttgtgcttattgacattatttttttaatttaactaaaacatcgtcgcccagcaatgaaaaaaaaacccctatgaaataaaaaatttccttgaaaacttcaaggacaaacagcacgtgtataaaaggcatgataaatatttatttaatacgttttaaataattacccaaatgattaatgaattaataaagtcaaatacttttaaaaaaacttaaattatccagaatcttggtccttacaaattagcgtttaatgttttaatcaaataattttctaatgatttctatgaaaacttttcaaatgtttgtttctgagttgacaagcgaactgtgagaatttttaattttttaaacgaatccatagtcaaatcttgagaaagttgtgagcgtttccgtgaatcgttatgtcagtttccctttctgattatttcatattcgccattagccattataagacacgtatccatttttcttttgagaatgactaatgaaaaagtccaattatttccctattaaatttatttacaattttatgaattaaatacaaaatatttgtgaatgtgtttactttgcttttaattcatttaattttaacttttttttaaatttgctcacttaggggaaactgtcaagattacaaaaaaaatttaatttctttgcatttgcttttcttaatatttgaatattttacgttttacataaactatttatattcgttatttttattggataatcaatcttccgatgtttgatcaacatatcattatatttggctgaaaatcattcttcaaaaaacaaccattcgtagacggagtaccaattcattttcccaaattgcctttttgctggcaaaaatatcggtta

SEQ ID NO: 51456 - DNA, 312 bp, Heterodera glycines
cctcaaatgccagcacattcactgctacaaaaaatggcctggccacaagttcgacacgttcatgcacgtcactgtagccgaacagcaaaagcaacaacattccccaaaactatgtgctgcttctgagcatggaacaaacaaatcccactgcttttgtccaccattgacggatttggattcactgcacaaaatgttgcgggtgaaaggcgcacgccgagtaaccgtacagccttggctagcagtaaacggagaaacggagaacaacacgaacaacagcaacaacagagtatcaggaacaattgcagctgttgc

SEQ ID NO: 51457 - DNA, 1131 bp, Heterodera glycines
atgatcgacaattttcttctagtgaagccgccaaacaaatcgatcaataatgtgtccctgcttaaagcggtactccaaaaagatttccctgaagtctttgaagaaggactgggacactgctcaaaggcaaaggcgcatctcattttgcggtctgatgcaaagcctatattttgccgagcccgcccaattccacatggcgccatggaagctgtgaatgccgaattggaccgtcttcttcaaattggcgcaattaagccaatcgatttcagtcattgggccgcaccgatcttggccgtaaaaaagaaaaacggcaagacgagagtctgcatcgacttctcaactggcctcaacaatgcattggaattgaaccggcacccactgccaaggccggacgacatctacgcttcactgaatggcgcgaaatttttctcaaatttggatttgcgcgatgcatatttgcaaatggaaatggatgacaaatccaagcaattgtgcgccatcaacacgcatcgcggactcttccaatgccaacgcctgccattcggagtcaaatcggcaccggcaatatttcaacatctgatggaccaaatttgtgccggtatcccaggtgtattcgcgtatcttgacgatggattaatcgccacaaaaacgcttgatcaacacatcacggcactgtacactctttttggacgcataaaagaatatggtcttcgcatccaactggacaaatgcaaatttttgcagcccgaacttttgttccttgggcatattgtgtcagcaaatggcattcgtcctgacccatcgcgttcggacgctattcggaaaatgcccgcaccgatcgacaaaagcacgctccgatcattcttgggagctttgaattattatggcagatttgtgaaatgcatgcgtgaattgcgtgcaccgctcgacaaactcctccaaaaggacgtagtttggaattggacgtccgaacagcaaaatgcttttgaaaaagcaaaggaaacgatgacgtccgaccttctgctgacccattacgacccggcacgcccaatcgtcgtatcagcagatgcgtccaaagatggaatcggcgccacattaagccacacattccccgacaaaaaggaaaaagtg

SEQ ID NO: 51458 - DNA, 4641 bp, Heterodera glycines
tgacgacgattcagtgtacgttgaaaaaccgacaattcagtgtcagaaaatttggcaaaaaaaattccaagtcattgcttttcttcgttccaatcagcaaattttcgacaaaagaggcacctatttatatttgtggattccatcaccacacaacacggatggccagccaatttgggatgtttttgttagtgaaatttggcccattttttcgacaaacattcaccatttggacttttacaatggtgatcatttggaccatttgcttcgtcgcacttcgccgacaattttcactgatctcaatcagttggtttcaatcaattccgttgatttgttgcctgatgcaattgatgattttgatgtgccaaatgcaacggctggccaagcattgtccaaatggttgcactctccgagaaaagatggccaacccaagcgattgcattgctttgatcacaacgaacaagggaacaccaattgggtcaacaatttcaaggaggtgtggtccgggagggagcaggacattgtccaaatgatcaccatgggaaaagcccaagtgatgaatattttccaaaaaaattggccagatttcgcgaacaaaaatatcccaaatccgctggccatccgtggtgtgtggtgatggaatccacaagtctaaattggtgcctcttttgtcgaaaatttggtgatttgaacgaagaaaagcgatgacggagtgatcgatgtaactgcaaaaagggaatgaatgcttttattgccatagctcagatttttaattactcaatatgaaggcatttaaagcgaattttgctgcgcaacaacggtcgtcgggccatggaaatggcacaaatttgtcatccatctttacataaagtttcggttctggtcctttgtccttgcgaatttcgattgttttccaaattgtcaattcgcttttgccatcgaaatgttagtccaccaacgcattgaaacgtggcgaaagaagtgccaatttgaggccgagttgggcatgggcaaacgatgggaaaatgtccatccaaacgtcgttgcaaatccaaaatgggtgccggattcgctgcaaacaaagtgctggacacattaaggctgctaaatttcccgacacgagagtagtatatagcgtcaaaagcgagcgggttccgagcgggtgtttaccgcacaaacccaaacctacgggaggggtgttttcttttgaaggtgccgcccgctcacaaacccaaacctacgggaggggtgttttcttttgaaggtgccgcccgctcacaaacccaaacctacgggaggggtgttttcttttgaaggtgccgccggctcacaaacccgtgcctattggactacatctgaagctgccgccaagaaccaaaccctatgggaggggcgcagccctttgaagttgccgccccatcaaaacccaggaggggaggggggtgtttcaaaaccaaaacctattggaccactttgaagttgccgcccgctcacatcctgagcctatgggatattctttgaactctgccgccttgtggattttaatttacccaaatccgtgcgggtgttttttcaccccgcaccgcgcagcgccgcgggaaggtcatcaatcatcctcctgtcaccaaaagtgacaggtgaaggaaattcaatttttttcttttgcaaatttaatcctaatttctaaaggctaaatccaaactacttagacattacattattcgcaatcctgagatttttttttgtgatgctttttctgatcctgaaattaaaaattcatttttgaaaatgtgccaaaacagtgcgtggttttttttgcatttcctctccacccgccccgcgccgcgatgccgccgccgcgaaatgtaatcgataatggaatttggaagtgaattaattgatattggcagaaagccataaataattattgaattggacaataaaatccaatttaaaagtaaaatcgaaaataaagaaaaaacttttccaaaagtaggtcacctgtcaggtgattgatgggtttttatttctcttccattatttcgcaatacgcacgtgactttttgttcagttatttcgcaatatggccttctaaattaggtcaactgtcaataaaatgtgattgattggtctcttatttcgcaatttccccccattattcgtaatgtgcacgtgacttttagttttttccaaatatttcgcaatatggcccctaattttgcaaacctgtcacaaaaaaaaaaaaatgattgatgactttcgaaataaggaatatccaaccgatttttgcacggtttttgaataaaatgtgacagctgtctaccgaaatgattgatgacccccttaaattaaggcaaacccagacagtcacgtgactagacccctccccctttttgcctatttcgcacacccggcccaaattgaaaatcattcaactaaatagttggatttcattaaactctcttcgcgctctaattttaattcactccgctctattttaattaaattaattaaatcttctattaaattcccgtctttttcttttctaatctctcttcactctttaattttactgcatcaatttcgcggtttttgttttaaaatgccttcaaaacgcaacggaagctctgttcaatgcggaccgtcgaccaaaaaatgggatttccgttcaatcgggtaagcgttaataaaatattaaagaaaatattaagagacaacgtaatcgttttctaccaattaaaaaataaataaattttaggaacaattttactgaagaaatggaaaattataaattgctggattaccaatcgacaacttgcgaaaaaatttggatttacgaagaacattacggaatttcgtgtcaacccggacgggggacgccctgatgaagcaatgagggaagcgatcgacgacatgataaaggtggcttttaagactacggaagaaaaaatgaagcgaaaagtgcggatgtttggagtggcaattacgggtgccgggcttgctttcccggtgtgggtgccgtatcgggcgtacccccagaacaatgcggatgttatcatggaggagattaataagctggggcagagcggggacggggatgaaaataagaaaatgcttttattatcggaaccgattactataaaaattacttgcgtgaccatgcccagtggagaggggccgaggaatgtccacaaatttgactttggattcaaggaacaccagcggatagggtaagatttttccaattaataaaaataaaataaaaaaatagaaaaaatcaataaataaatttaaaataattatttctaaaaaatttaatgaagcaaaaaaaaattttttttttaaagaaaaaaatgaaaaaataataatttaatgaaacaaaaaaacagaataaaattaaaaataaagaaagtaaaaaataaatttaaaataattatttttaaaaaatttaatgaaacaaaaaaaaatttaaagaaaaaaatgaaaaaaaagaataaagaagatgtaaaaaataaaaataaacttaaaatatttatttttaaataatttaattatgcaaaaaaaaatataataaagtaaattttaggattgtgaatactgataaattttgccttttttacgcactgacgtcgtcgatgaattatttaattatggaccgttttgcatttaatcgatttatgaaaaatattgtgagacagagggatgcagctattgagcttttacgtaattgtggaattgatattaacgaatatagctatggtgtggaacacttgccgaatgttcagaattattgggtgggctttaaaaattgagaaaacggaaaattaataaatttttcaggatgagatttaccccggtaaataccgggtggtggcatttgagaagtctgcggatccgcggaaatcgatccgagttttgtggaagggaccgatgggacgcgaaaatgtagtgccgatatttttggagaataatcactgggatggtctaaagaaatacgtctgctttttcaaccgtgggaggaagttctgcgttgaatgtgaatgtttttacgatcaggatgtttatcatacttttgagtgccgggcgagatgttattactgcaatagagttggaggaatgccgtgtgaaaaggagagtggagtgaagattgagtgcccgaagtgccatcgctatttttacaattgggggtgctacaattatcatcagggacatcagacttgcaaattatggaggcgttgcgtgatctgtgacaagacatatttatttaacccgaagaaggatcatgaatgcggagagacttattgccagctttgtagtgtgagccatgaccccaagcggggttgttatattatgccgatcgaggaaaatgaggaaaaagatgtctacagaattgtagtttgggtaagatttaataaaacaacacgttaacaaaatagatattgattttcaggattcggaaacatcgcaggatacaatttacaagggggatcagaaggagcatgtaatcaattatatttcggtgagagttacgtgtacggaatgctgtgacgacaaacataggacgaattgtaaaatttgtggggaggagaggaccaaggattggagcgaggcagagggacatgacccaacgaaggattttgtgga

SEQ ID NO: 51459 - DNA, 497 bp, Heterodera glycines
taattaaatccattccttcgggggaccgtgccgggtgccgcggggtaagcagtgctggttcgtttcatcacggcaccgaaccttttggctagtcagcaatcgttgcttaacttgccagatcggacgggtgcgcatgattccactgttccaagcaccccaccaaaagcaaaacgatataaccaaaatataaggaaaaatttttaaaaaattttttctccatcttcctttttgataataaagcatcagagtgctaaaattgacttgtaaataaaatttggtgcgctttagagcactttctgaaaaaatatttatgaaataaaaaaatcgatttattcaagtgtccgtttggggtactcaaacaattatggggagcaaaaatccaacgcagaattaaagtacagactatagggaagctattcccgaaggattcggtctccccataaatctgggcgcatcggttcggggggactgcccgaaaacccaaaaaaaaatttttt

SEQ ID NO: 51460 - DNA, 1316 bp, Heterodera glycines
atgcttctaaaacttccgatatttttgtactcttcccgtcagtttttccgtgccgttgcttttgtgagtgtttaaaatgccattgatttttcttttaatttcccctatttcttcaacaggttcggcctcagcagcgtcttctgtccgtccgtctctcgtcgaccgccgccaaaacgccggtccaggagttcggctttgagtatctgaagcggcagatgaacctgggcaggccgttgtcgccgcacttgcaaatttacaagccccagttgacctgggtgatgtccggcgtgcatcggatcctcgcctgcatcatgtccggaggtgatgggcaccatgtaatttgaacatataaaattgaggcgtaatgagtacctggggtgtatatatccccaaagggtaaaaattccttaaaggcaagtcttatgtttttgtaaaaaaatttggcgctatattaaaaatggtcaattttgaaaattttttcaatttttttttgtttttttacacataatgatgaatattaagtattaacagcacaattatggtgaataaaatgtatattcacgatttttatccaaaaaaaaatttacaaaacaaaagggtcccccctatggtttttgataaaatacaaaatctatcactttataactagcgccaaatttgcttaataggcccaaataattgtcatattcgtgatcagcgacctttaaaacccccgggtatttggtttcaggactttttaaacaaaaaaaaattttgaccaaaaaaaagttgaaaacatttttcaaaattgaccacttttaatatagcgccaaaaattttattgtacgagtgccattgactcagcgcacccaaccccatttagtaaaattaaaacttaaaatcgtggttgcgtgtcgaatttgataatttttcccccaatttaagcgcttttggtcggcgttttcgtttttggcatttgttcggtcgatttcacttcgttcgcggaacggcttaactcgtggaatttgtggcgaccggtgaccaattcagtcaaatttgtgatcgcctttcccattgtctaccacatactcaacggaatccgatttatggtctcatttttacatttaaatacacataaattgaatttttactatccaaattactatcattttcaggcttttgacatggccaaaggcaccgaattggcgtccgtttaccgctccggctatttggtgatcggcttgtccacgctcatttccctgctcattgtggccaattcgaagcatttgacgaaggaacagttccaacagaagtacaagaaggaagcgaacaaatag

SEQ ID NO: 51461 - DNA, 1310 bp, Heterodera glycines
atggtggcggagggattgccggcggatgatggtgattacaacaacagtttcatggacaccagtgaggacagtcgggacggtgttggtggtggtggtggtggtcatgctgcaatggtgccaatggatgctgctgctgacctgttgatgatgtccaacggtggtggacagcatgcaaccaatgggaacatgttgttggttggcacaccgccgactagcacaacaatcattgatgaaccggtcggcgaaattggtcggtttgatctacataaatcagggaggtatatgggggaacgggggtgtcagatcctcaaatcacccgcgaaaattgggaattttggatatatattttttggcaattgggccgaatgacgcggcgatatcaatgaaaattgagagacttttgattgtgatgataaaattgcagatttggtcatcatcgatggtgtggtggcgggtgactttgcggatgagcaacaccaacaggaggacgctgtggcacagcatggtggcttcacaaatgcgaaggaacgggatcaggcaaatttcccaaaaattaattgtatacatgaaggaagatatatggctttcatatctccaaattttgaatttcacttttttttttactttcagtttgagcgctaccgaaatttgttggaatttggtcatcacatttcacaatttgcgctcaaaacggatgccgaggaagggccgtgccaaggctcggcaccactccgacagcgaatgaatgtatgttatttttgatgttggaaatactgttattgttttcgtcattatcaaggcatttgtagtcaagccggccaattggagtttaattcatcaaaaaataataataaaaattaaaagaaacaaatatgaattttctatgagtgtttcaaatattttaatgaaattgtatattttttcaaaataaaatttaaatggtttctttaatttttctagaaatttttaaaaaatcctaaattcggaagtgttttttacagcaactttttgtggtgcggcttaattggacctccatccccctataaataaaaatttttgttttgaaaattaaaaaagtaggtatacctatgtatggtacggtacgtttggatccaaaatctttgatatttactccgtatacaataatattttactgtataatcccgcattttcaggaggccttttcgttgctgtgctatcctgacccaactcaatctgctcatgccaatctgtttgatcaaatccaacgggatttggttgccaaggcgttgaatgcggctattttaggcatattttttttgccttcctaa

SEQ ID NO: 51462 - DNA, 403 bp, Heterodera glycines
atgtcatcattcacgacttcttcatcagcggacgaattttctcctctccaacgtaaaaaatttgttaaaattcataattaaaatacaataataaaaacatttttcaataattaaatttgctaaaattaatttttttttttttttaaattaatttttcatttttagcaatttttccaaatctgagcacatcggaggaaatgagtgttctgattgccagaattgctgagctgaatcgagccaaaacaacggagccatctgttgccagttctgaagtgtttggacaagacggatacggtagggaattttgtataattgagtggatacagtatgaaaattatacaataaaagaaatggttttgaaatttttaaaatcaaagaaattattttgaaatttattaataaa

SEQ ID NO: 51463 - DNA, 178 bp, Heterodera glycines
attcgcatttaaacgaatcgatgcatttcttttcatttttcccgtgccaattgtctgtttcgatgtcaaattatgctccgctatttcgatacagttgcgattctgtccgctggagtgagtgaaagaaatgctaacgagaggagcggactggcttgaacagacgccttccgctttgtgc

SEQ ID NO: 51464 - DNA, 708 bp, Heterodera glycines
atgccggaccggaccggactagtattttcaaaaatgaccggattccggatcctctctcataatccggtcaatccggtaatccagtcaatccagattttcgaattgccggaccggattgccggatccagaaaaatccggtaccggatccggtccggtccgatctttaaaaataagtttaaaaagggtatagtttaaactttacacatacatacatacatacatacatacatacatacataaattacgatgactaacttctaaatttacaggaaaatagaaaattcctgtaaatcttatttgaatcaaaaaaaaaatatatatttaaaatattttaatttaactatttaattttaaaatatttatcacttttatattaaaaaaatgttaaggattattcagcggccaaagccttgcacatcagtgacacggataaacgcaaatattttcatctcaatgtgagaaaatctgaaaaattttaatttaaattatttcccctcctaattaggcacattttgggtacgcctgcggcgctttggagttgggcacttttgcgtctcagcgaattaaagtaaaaaaatgaatttttaaaataataaaataaatatttacattattttttagattatttcaaaaccatccaagaagaaacagtcaatgaaaagctccgattgtaaatatttatgtgtcgggaacaaaagcaaggcatga

SEQ ID NO: 51465 - DNA, 540 bp, Heterodera glycines
atgaccaacagctccggtctgagaacctcggcgatgttgcggccaaagatcaccgtgcgacgggcggcgatacattgccgaagtacagcaaagaccaactgcatcagcgggcacaaaaaattggggaagccaaaacggctgagcaccaacaagtcagaataaaaagcggttatcatcggcatttctcgaacacacttaagagtttcatgatttggcacttttcagcagaatttccaaaatgctgtcgctgatcagcaacagcaccaagcagcggccccaagcgcgttcaaagtcgaaaatgcagttgggcatgataaccaagagcagcagcagaaggctgctgaacaccttgaaagcaaatttgtggcgagtgggaccaagtcaaaactgatgaacacagatgcccgaaagaatgtccatgaacagcagcagcagcaggcggtcggacagcaagcagttcagcaaagaacggatgaattgcgtcagcatttggaacagccatcaacgagtgcgattgaaggtagcagttggaccatgtga

SEQ ID NO: 51466 - DNA, 526 bp, Heterodera glycines
atggcgagcgaggagcaattctgctccgaatttgatgcggaggtcgcccggggggatggcaaaaggccgttgagaagaatcgtcatcaggtttgttgtgtgtgttgtgcgcaaagattggtgcgcaagatgacctttgtactgtggaccgacctcttttcagcgggcggagatgggcggacgaagaaagtgccgcgcgcacagccttccttataaatgggactcgcacagcgcaaaatatgccattcctcaccccattttctcacagtcgcaaaatgagattttattgctgtccaatcacaaagtctccccctccccgaccgatgggtaaacctcactcatccatgcattaaagcactcactcatcagttagcattttaaaatatggcaacgactattttttccgaaaaattttcctctgtgttgttttagctttctaattacgattaatttttcaatatgcctatataaaaaatttaattgtcacttatttcagcttaaaaccaaactcgaaatttaaaaaatga

SEQ ID NO: 51467 - DNA, 1882 bp, Heterodera glycines
atgacaaaacgaggacagactgagcaggacgatgtggtggtggtgacaaagacaaacgacgatcggatcggacgatcggttggctgctattttcggttctctaatgaatcaagaaaagaaaagaagagaattggcgaatggatttcacaaaatgattttttgcaagaaattgataaagaaaaaggtcaaaaaataaatttgttttttttaaattaaatttatttttataaaaagcgttaaaaaggatttttaaattaaaattcaaaaataaaataaaataaatcattacagataaaaacaacgcaatcatatttattttaattcattaacaaattttatttatttttttaaaaagtgttaaataatcagagattttttggattaaaatttcattaaatttatatcattacagatgaaaagaatgaaataatattaaccaatgttaattatattaacaaaattaaactatttaattttaattatttttttgtgctttttaaaattcaggacaaaattgcttagaaaactttgacccttaggttttttttttaaattaatttgagttcgaattatgatcaatcttggcctcattttttgagtgggtgtttttgttgttgttactgctggtgattgttttgctagcaaaaattgattgccaaaatagcagcagcattttgcctgctgctggagtaaaattggtgacagccgcttcctgctgcaggcaatcggctgaattgatctgacaaccggtggaatgatgatgcacttaggaaaaggacaccttttgtcagcactaaaacatttttccaaaacatttcatctcaatattttaaatgataatcgcttaaaaattattatttgtaaaattattattttctagcatataaacattaaaaaataaagaaaaagtgaaaaatgcagcgtcgcagggaaatatttagtcggcacaaaacaattaaggatattaatgaggtgcgttaattgttttgaaatcaataattacttcacgataacaatgaggtgtgttaattgtttttaatccataatttattaattcatctattgattagttcaacggttaattaattttaagcaatgagcttacaaatatttaattcatttgattacttaaacctttaattaattttaaacaataattttaaaatattttaaaccattcaatataatcatataaattattatcaggattcgggaatgtcatctcgagatttgcactccgtagactccgattcttatgtgaaaggcatgcacgaagaaggccttagcgaacgagttcggaatatttgcgtacaatctgagaaagtaattaaaaattaattttaatatttttacccgattcctaattttcatttaagcctcctcattctatgccgcaaatgccgacaccaaccgccaatcggaggccgacgaccttttcattgccacgtatatttacacaaaaaaagaaggacgttatcccattggcaggttagactcgggaccgagattttgctcgggatataattcaagtcaacaaaaatgtcgggattagggtcaggaaggataaaattttcgggatgggattcgggacgtccaggaacatccctgtttggtagaaatccatctccaatttaaaagaaaaattttttgcgacccattaaccgggttgcaatttacccacgtggtctgagtcgcgctatatctctttgttacagtaccccatctaccatcagcagctgatacagttccagcgcctgtcaccagctcgtcggtggatgaacatcagcagcagccgcagttgtcaccgggcacaacaacaaccacaacatcggcatataacacgggcgttgacactggccaagatcaccgccagccacactaa

SEQ ID NO: 51468 - DNA, 639 bp, Heterodera glycines
atgtccaaaattcatatttcaggattagctaatcctctccctaatgtttcactggtacattttccgggagccattatatttagagccccaatctatataagttatccataaataattatatttaaattcattttattttttctgtaggatattgttgtactgccgctgttggttcaatgcctaaaggtaaataaaatttgaaaaaaaaaattaaattattttttttaaatagcggttttaccaatttcaaccaacaaaacaatctcaagcggcaacagtaataacattgccaagttggttgtttatcaaaaaaatacatttactttttattattgttttttatataatagcgtagaattttagcgtttttataatttttataattgtaaagtttttagaattaaaaaaatagtgtttagaccgttatctccaccatcatcaacaattgctgtctcagcttctgaaacagttccaccaatcccttctattctcgtgattgaactgaacaacaacaacaatcacaacgatgatgtcattgaatatgaccaattacgcctaaacgacattccatccactttaattgggcacatttcatcacattcgcaaccaatgccaacaatttttggtgattttttttga

SEQ ID NO: 51469 - DNA, 894 bp, Heterodera glycines
atgtcgtcgacgcagtgtttaatcaaattttgtaaagtggagcagagcaaggctaaatacgtcaacctttacggtgccccttttgttgtaaccgtcactgtcctgaatactgatggtttaccccgccgacgaacgaccaaaggaaatgcccctccaattcactcttcacaatcccacatcttcaaaattaacaacaatgacaactactgtcttttttatgccttggaactgatgcggtactattcgctctacaaacgtggaattattacgcggaacaaatggagatggactaacaacaaccaaactactgttctccaacaaaaagttcaacttttactccgtgatgctgggattccgacaactgaaccggaatacgatgccgagatttacatccatcaagtgcaggggttgtggagcacaaaatatcccggtgattatttttaaaaaggcatttataaaaatttatttattttcaaatgaaaaatagatttatatttttacaaattttcaggcgaatataaaatttttattttcaatgattaccaaactcgtccaatcacaaaatcagacgtcaccgattaccaattccctattctgctctaccaccatgacaaacacttcgatggcatcaaaaccctttccaaattcttcaataaaaattattattgcctctcttgcgaaagtgtctacgaacgaaaatcgagacactccatgaactgcacgtcactatgccacggctgccgggaggtgggcgttgactacccctgcgaagcccaacaaggctacttcaaaaaatgtttacactgcaagaacaatttttacaacaaggattgctatgaacgtcacctacacaaggatttgtgctccaaatttcaacgctgcgaagagtgtggg

SEQ ID NO: 51470 - DNA, 1682 bp, Heterodera glycines
atgaggccgtggacatttggcctggtcaagcccgacggggtggccaacccaattgccgtccgatggcttctcagcgcaatgcattgtgagggctttgtgatcacaaacggtgtgtgcgtgggatcagcaccgtcttttgaccaattcgtccaagttcccccttcgttttttgcaggttgtcgtctgacgctgacaccggacttggccggcgagctgtactcaagccatcaggtgaggaatgagccgggctcgtaatcagcaaaatttctgggtcatgtcagttcgtacaaagggttttgtatggaattttggctcttccagtttacgcgtccacaatgggtttaacgccgtccaatgagtgaccactctgacttttttagatcataacttttttcatacttggtcaacccaaacattcttggtatcatttgaaagcttaaagtttaggaaatttataaatacaagaaaagacaaatacttatactatgaaaaaattacaataagaaaacctgaaattcataaattttcacgtatattcaagaataattttgtgtctgatgcctttatccgggaattttgctatacaaaaaatccctaaactttaagctttcgattgatactaagaaaacttggattgaccaagtaagaaaaaagttattgtctaaaaaagtgagggtggtcactcattggacgcgtaaattggaatagagccggaattttttcaaaaaatttgagagatttgacaaaattttacaagtgtgcgagaaaagtccacgcagattttttggaagaaaattctgaaatttaatttaaaatgtaaaaaatgtacgaaaccccaaagtacgcacacaacgccgctaggcacactcggcaaaaatttaaaaattttttggaaaactccgtaatataatttaacaataaaaagattggcggggtgggtcctcaattctacattactctgaccattttacataatacaattgatactgacttgttttttttctaggctttttcccccgatttttaatatttccttgcacctttatttccatccagttttttttaaggatgccttttattacggacgtctcatccggcacatttgcagtggaccgtcggtggcaatgcgaatggaattgcgcaagttgaacccggcacagaacgcatttgatgaagatgatgaagaaggcgacgagcttcacggcttttcctcctcctcctccgctttccatcggtcggcgacggaatgccaagaaaatgcgaaaaaatttgacccattggaggcgatcaatcggtggcgcactttgcttggcccgtccaaactgttcgccaacatttatttgagcagctgtgccgagtttgatgagatcaaatgcaaaaatttgcgccaaatgttcgcagtgtcggacaccagaaatctttgtgaggaaatttttattatttttttacattttaaatttggggttggaatttgacatcctcacaaaattttgaaggccatggctccgactcgttggactcgctgtgccgggaattcagcctttttgaagtggacatgaagccggttgagaggccagaaattgaactgtttgcgcttgatgactacacattgacggaagcggactatcaaacagacaacaacagaaggaatcaagatgaggaggaggaggaagaaaagggaa

SEQ ID NO: 51471 - DNA, 57 bp, Heterodera glycines
atgatgatgttgctgacttgcagcagccggtcagccttttctcctttacaatccttt

SEQ ID NO: 51472 - DNA, 67 bp, Heterodera glycines
tttttaattttttcgacaaaaataaataaaaatattcatgttgcacaacggactcgaaccaacaccc

SEQ ID NO: 51473 - DNA, 1483 bp, Heterodera glycines
gaagttaccaaacagaaactcgacatatccagacgggttaccttatatattgattaagcaatgcgcagatttattggcacctatcataagtgaactctttcgaataatcttagattatggggaaatcccaaacttatggcgtacatcttttatcattccaatttataaaaaaggagacaaatcgaatccaaataattaccgtcccatctctctgacatgtactttatgtagggtttttgaacgactattagcatggaacattgttaaacatcttgagaaaaataaaattttaactgatgaacaatttgggtttttaaaatccaggtcgaccaccacacaattgttggtctcccttgattatttttataaatcaatagaaaatggacaaaatattgatataatttttatagattttgaaaaagcatttgattcggtgccaataaatttgttaattgttaaacttcagaacataggtatctgtggaaaaattttgaagtttctccaaaattttcttatatgcaggtcatatcaagttaaaattggagaaaacttttccgaaagctttagaacttattctggggttccacagggcagtgttcttgggcctcttcttttcttggtttttataaatgacttactaattatataccagctgcagtcggaattaaattatgccgatgatgttaaaatttacatttcgcatgataatgacacgaaaagggatttactctctttagcgttggctaacttagccaaatagactaaagacaatggcatagccattgcgcatgagaaatgcgcagcattatatttaggaaaaaataattctagacatgagtataaaattggcgagaaagtaattttaagcgtagattgtgtccgtgatctgggggttttggttgatcaaaagctctcatttaacaatcatatttcaaaaattttaaaggcggcctattacaaggcatatcaaattttaaaaatattaaaaacaaggaatatcaataccttaatcctagcatataaaagctatataaggcctcacctcgaatacgcaagcgaagtttggaatatctccttaaaagaacagagtaaaagaatggaaacggttcaaaaatttttcacaagaatcgtatacaaaaaatgtggcctcaaggctgcatcatatgaaaaaagacttgagatttgcaaattggagaaattaagtaatcgaaggtcgctcactgatatgaatatgactttcaaaataattagaggcttaactcatttagacccaaaaaaatatttcgaattttcaacaagatcgcaacgaaaaacatttaggattcaaaataaaagattcagtaataaatctcggaataacttttttattcgtacaattaatccgtggaattgcttacccaaaacagctatagaaatcggaactttagctaaatttaaaaattttgtgaaagaattttatttagaaaataagtcctgagtggta

SEQ ID NO: 51474 - DNA, 766 bp, Heterodera glycines
atggtttcgtctcatttgttttgtattggtaactttatggttgtttttctggtcatgtttctggttttgtcttttcttttgtctaatcataacaacggtggaaaaccagaaattaaactgaacagtttctggttcggctcatttctttgttaaccagaacaacggtggaaaaccagaaattaaattgaacagtttctggtttggctcatttcttttgtctaatcagaacaactgtggaaacccagaaattaaactgaacatggtttcgtctcacttgttttgtattggtaactttatggttgtttttctggtcatgtttctggttttgtcttttcttttgtctaatcataacaacggtggaaaaccagaaattaaactgaactgtttttggtttcgctcatttcttttatctaatcagaacaactgtggaaaaccagaaattaaattgaacagtttctggtttggctcatttcttttgtctaatcagaacaactgtggaaaaccagaaattaaactgaacatggtttcgtctcatttgttttgtattggtaactttatggttgtttttctggtcatgtttctggttttgtcttttcttttgtctaatcataacaacggtggaaaaccagaaattaatgaacagtttctggttcggctcatttctttgttaaccagaacaacggtggaaaaccagaaattatattgaacagtttctggtttggctcatttcttttgtctaatcagaacaactgtggaaaaccagaaa

SEQ ID NO: 51475 - DNA, 803 bp, Heterodera glycines
atgccaatggaatcgtcgtcgaaccggcgtgaagaatttttggaaatagaactcaaaaaggtccgtgaagaattggcggagtacaaacggagggaaatgtgtgccatcaccacgcccaaaaaggtttgacatttttgtttcaatttcaaattttgaaatttttttggttaaatagtgatttgctcacacaccaaagtgattgaatttattgagaaaaatgaataaatcccaaaaaagccaaaactcacctgcaaacaggagatttttatgggaagagaaaaaaaaaataaagtctgaatttgagtttggacggccaaaaattttcgggttggtattcgggactgaaaagttatggaattcgggcaccaaactctgccccaaacccaataacctctcacatgcacaggccaacaaattttggcccattttcctttatacaatacctaataaaaatgaatttttttttacaatttcatgtttccaattttatataaaattttattttacaattttaaattgcaaattttgttttttaagaaaggaatacttaaaaaaaagccctccgctgaatatcgaccgtatgttttcgacaatttccacccaaaacatcgtcgaaacaaagccgagccgacttcctcctccactgccgcactggacatttttgacggtcagcaggacaatgccaacccaacaacaacaacgcttggctcgtactatgatggaggtttgcttttgaatttgtgatctacaaaaaaggataaaattaataagttttaagttttttcgacgaattttaaaataaa

SEQ ID NO: 51476 - DNA, 284 bp, Heterodera glycines
attatgagccacccaatttggcaaatcggtctttttaaacgcattaaagaagattcagtcgattgcttggagtgtaagcaaaaaaacgttattaatttttcatcttcatcattttttggtttaaaaatatatttgaatactttgctatactttgaaagacttttttattaatacagaattttttgaaatttcctaaaatccgcaatcctgcgcaggatcctgcagattttaaatgcaggatttgcaggattgcaggatttgcaggattaatcctgccggatcct

SEQ ID NO: 51477 - DNA, 62 bp, Heterodera glycines
gttcttctcgcttggaaattgtcgtggattattttttccaattttatggcgaagcttttcag

SEQ ID NO: 51478 - DNA, 58 bp, Heterodera glycines
aaacaaatttaaaaaacggtcgcgaagcgcccgcccaagcccaacaaaatttgaaaaa

SEQ ID NO: 51479 - DNA, 1796 bp, Heterodera glycines
atggaaattaattttgtgattattttcatcttatttctaatcgtactaattgacggaattgatgaagatttgtttaatgatttgtggaaaaatcttaagccatcgacctcaaaaaacatcaaaaaaccgatatttggagaaattaatgcgataaaggaagaaaaagttgttaaaaatgaaaatgatgaacaaggaaatgccaatcaaattgaaatggaagacataaagccaaaattattacaaaatattaaaaaggaaaaaacattggaagaacaaaataataatttaaaaataaaaattaaaatgccaaaaattgaaatggacaaattaggcgaagaatcatttgaaaatgagtttaatgaggaagctgatcagaatgtttcgtctgctgatcacaacgattctgttgatcaagcgtattataatattatggtaattcaacaatcctgtaaaaaataatttaaaaattcaatggttctaagttttgcatttctaaaaattttaatgatttaattaggagtctgaaacaagaaatgaaatgaaaattttgaataaatttaatttaatgaaaacggaattgcgaaaagaaagtgtttataaaaatttgacaaatactcaatttgaaggcgaaattgcgaaaaggttgggcacaaatcgaaacaaaatttataaattgaagaaaaaattgggacaattaagagagagaatggaagaaagtgaagaaacaaaaatggaactgaccagaaaatttgataaaatgagaaaagaaaaaatttgtgggtttaaatatgacgagaagaaaatatcagtaattgaatgtgaaattgccaaaaagttgggcacaaatcgaaacaaaatttaccaatggaagaggaaatttggtaaaaaaaacaataacaaattcactttatacttactgtctcattaaggtataataacgaaatttttatttacaaacgaagaaaaaatagaaaaacttgagcaatttgaaaaagtgaaaaaagaatttataaaaaaattcaatttgaaaacaacaaataaaattgaaacaaaaattgcaataaaattgggcgttttgtggcaaacaatttttaaatggaagagaaaattcggtttaaccactcgtaatattttaattatttatatttaaaaaaaattaaattgcttttattttaaggaaagtccaaaatttattcggatgctgaaaaattggaatatgtgaaaagaagtaaagaaatcgcagaaagaaactcaatgttaagtgagagaaaaattgccgaaaaattgggcatttcaaatgacaatttaagacgatggaaaatgaaattcggcactaaatcgatccgttagcattggacaaaaataattttattcagtgacaattgggtcaatttgacaatgtagagaaaatcagagtactacagtatttccttgtttctttttttttgtaatttctctcactttcgcgtactatctcttcatttttagctgatcaaacgcaactgcgtttacctcgctttataaaattcgttttttttaaatttttataaaaaaatacatctattggcttttaaaaaagattatatttattttaactttttctactaattttgaaaagtaaaaaatttcgtccattcttgagccttgagccagccgcctatcttaaggtgtgcaaattttttaacagaagcccaacaaaaagcattcttcggatcggttttccgttagaaaaacaaaaaaaacgaattgttaattcgttaaattttgcggtctttagggattgtttttatatttta

SEQ ID NO: 51480 - DNA, 1262 bp, Heterodera glycines
atgccgcaaattaattttgtgattattttattcatatttttattcgtgctaattgatggaattgatgaagatttatttgatgatttatggaaaaaccaaaagccatcgacctcaaaaaacttcaaaaaacaaaaattcggagaaataaatgcaataaaggaagaaataattgttaaagatgaaaagtatgaacaacaaaatgccaataaaatagaaatagaagacacaaagccaaaagaattgcaaaagattaaaaaggaaaaaacattggtggaacaaaataataatttaaatagaaaaataaaaatgccaaaaattgaaatggaacaattggaagaagaatcatatgaaaatgagtttgatgagcaagctgatcagaatgtttcgtctactgatcagagcaactctggaaatgatgaggattacaataatatggtaatataatagacaaaacaatatcattccttgaaaaaaatgttgaaaattcgctgaattctaaaaaatttttctcttaaaaaggatttctttagaatacagaagaaataaatgaaatgcaaattgtgaacgagtttaatttgaggaataataaattgagaaaagaaaatgtttataataaaaggacaaatactcaatttgaatgtgaaattgccaaaaagtttgacacaaatccggacacaatttataaattgaagaaggaattgggacaaaaaagagtgaaaacggaggaaagtgaagaaacaaaaatggaattgatcagaaaatttgataaaatgagaaaagaaaaaatttgtgggtttaaatatgacgagaagaaaagatcagtaattgaacgtgaaattgctaatgaattgggaattaagcggaataaaatttacaatttgaagaaggaatttggtaaaaaaaacaataacaaattcactttatacttactgtctcattaaggtataataaagaaatttttatttacaaacgaagaaaaaatggaaaaacttgagcaatttgaaagaataaaagaagaatttaaaaaaaaattcaatttgaaaacaacaaagaaaattgaaataaaaatcgcaataaaattggatgttgtgtgggaaacaatttttaaatggaagagaaaattcggtttcagcattcgtaaatttttaatttataaaatttaaaaaattgctttttaggagaaaaaaaacgttactcggatgctgaaaaattggaatatgtgaaaagaagtgagaaaatgaaaataagaaatccaatgataa

SEQ ID NO: 51481 - DNA, 1338 bp, Heterodera glycines
atgcaaattgtgaacgagtttaatttgaggaataatgaattaagaaaagaaaatgtttataataaaaggacaaatactcaatttgaacgtgaaattgcaaaaaagcttgacacaaatcgaaacaaaatttataaattgaagaaaaaattgggacaaaaaagagtgaaaacggaggaaagtgaagaaacaaaaatggaattgatcagaaaatttgataaaatgagaaaagaaaaaatttgtgggtttaattatgacaataataaaagatcagtaattgaacgtgaaattgctaatgaattgggaactaatcggaagaaactttacaaatggaagagagaatttggtaatagattaatgccataattggatttaatcattgtctcatttaaggcataaaaaagaaattttcattttcaaaagaactaaaaatagaaaaaataaaactaattgaaaaattgaaagaagaatttactaaaaaattcaatttaaaaatgactaataaaattgaaacaaaaattgcaataaaattgggcgttgtgttggaaacaattcgtagatggaagagaaaatttggtttcagcattcgtaaatttttaatttataaaattttaaaaattgcttttttaggagaaaaaaaacgttactcggatgctgaaaaattggaatatgtgaaaagaagtgagaaaatgaaaacaagaaacccaataataagtgagagaaaaattgccgaaaaatttggtatcgacagactgagcttaagacgatggacgaagaaattgggcaccaaatcgattcattagctttagctgtaatttggaaaattaatgggcttatgtagaaaaacatgtacaagaaattttaaggagtttgccaatgtcaaaaaaaatatgaaaattttctcaaaaaatgggtgtcactcaagccgcctagggatttgttccaaaatatccccggttttaagccatttttctggttctcagaccactctgaaggagtgttctgattatcgcagcgcaactgacttttctgtttagcataaaaagctactcttacatgaattttttcagattttttgtggtttctaggaaatttgtgagttatcaaaaaagagtaattggaacacccatttttttttggaaaaattcataatttttttttggcatttccaatctccgtaaattttcgtgttcacaacagccttgttttatcgatacaagtgtcgctacagatttactgttgttataatcttcttcatacaagtgaaatttatgcggttatgctttgcgattcaactgctgatattccccctgcgagaattattgtttatccgaaaaccga

SEQ ID NO: 51482 - DNA, 1193 bp, Heterodera glycines
atgcctcaaccgttgccgctgagagacatgccgcaaattcaccatccaccgcgaaatgtgacatcaatttggatcaaattatggttgctttttctcagtctctgggtgtttcttcaaggaattcatgttcggcaaattcaacgtgaatacgccgtaccacaatttgccgatccgccgccaaacgtgccgtatcatccaccagaaaacgttccggtaatgttgggtcttgtttttcttgcgtttctcatatttccggatgctttttcaggcaattcaaccaatgcaacgaccgcggcagctgagagacgtgccactatacgaccacccgccgccaaacgtgccgtatcatccaccagaaaacgttccggtaatgttgggtcttgtttttttcgtgcgtttctcatatttccggatgctttttcaggcaattcaaccagtgcaacgaccgcggcagctgagagacgtgccactattcggccacccgctgccaaacggaccggtaatttcataccctgtcttacacctaacaccgaaacatcttttcttaagcaaatgcatgccaaccccccgagagtgatggaagcgatccgacggctgggcgagtggagaggaagaccaacggacccaagacgtccgcctcaatgaatgaatggaattccaatttgataaaatttgttgtttgttaattttttgaattgataagggttaaatcccattacctaaattgtttaaaaattattaaaattttaagaaattagatgctaaaccttaccatagacaaagattatgaaaaaacgaaaagaaatgacgaaattttcggaatgtttcttctttttgttatttatggactttactttttgtgttttattttcgcattaataaggtgttgttgaaacggttaattcttcatttattataccccattttgttgaaaattcgccaccattatgccctgcccactccccgccgaactgatcaaggaaataattgatgctcttccccctccaaaaacacatcggcttctgctcgtaaattttgtttaggcatcctttgttaaatgtcggttctattccatgatgagaagattgtttcgctcagatcatttattactaccaatggcccaaagaacaggaatttatttatttttcgatatttttattccccacacaactcaccaaagatataaaatttaa

SEQ ID NO: 51483 - DNA, 766 bp, Heterodera glycines
aagagctgataaattgagtttttatttgtcaagattggcgatgcttatatgattgtcagcggagtcccgcgcgagaatggcaattcccacgtccaacacattgggggacattgcgctaaaaatgcgatcggtgagtgcttttgcgttttattaccaaatttgatcattgagattttgtcgcattctccatttccttttcagtttgtcaccaacttcaaagtggcccatcgtccggatgatataatgatggtccgaattggcttccattccggatcggtggcggctggcgtggtcagtttcagaaaaaattaagaattaaataatgaggaacggaaaatgatcagaaagactaatcagtaagtgccggcaaaaccaaatgattgatcgatcgatcggtcactgatcagtccatttaaggtcgggttggccgcacctcgttactgtttgtttggtgacacagtgaatatggcatcgcgaatggttcgcggggaataattacaacgaaatttgacaattttcaatttaaggagtcaagcggagtggccaacaaaatccaagtcattagctagcccattagcaaataattacccaacattataatggaatgtttgcccgttcagataagcgagtcgtccagcaaccttttgaaatgcttttaccaccatttcattgtgatggagcgtggcaaaattgacattaaggcactaattgatgaaacgatttgcaaaattttaatttggatttgttaagggcaaaggcgagtgca

SEQ ID NO: 51484 - DNA, 1935 bp, Heterodera glycines
gcattttttttgccagggatacatgcaacaggcgcccgaaatcattcgcgaattcattttcaccaaaaatttgccgcaggggtgccaagcagcggatatgtacaggtgggagtggggaggatgttgattgatcccattttgtatagaacgatagccttgtaatcagcacacttcgatcattagggggccgaagggggggggggagagaagagaagcggacccgatcaatttcaaagggtcactcagaagccaaaaccccctttattaaacatttattcaatcaattcagttttgtttcagccttggcatggtgctctaccaaattttgttcaaattggagccatttttcgagcgcaatttgcccccttcaagtgcgtttttctcttttgtccgtttttctttttctcttttgtccgtttttctttttctcttttgtccgttttccctttttgatcattccataatgtcttctcttttgttaaattttcttttttaagaaattcttcaaaaaattgctttggccagcgaggacgaccaaatcattcggccgagtttccccaaccaacaacaaatcgccgcttcggaggaggcgtacaatttgcaattgctttcggcaataattataattaactattcgtaattttaattatgccatttaatggataggccctggaggcatgttggttggaattgccggagatgcgtccgaacatcaaacgggtcaaagcgatcgtaaacgcaaatttgaagtcgaccggaagcggcagtctggtggaccaaatgatgaaaatgatggaggatgtacaaaacttttctgctcataatccaactaattactattaattacccccccccccccctcccccggttacagtacaccaccaacttggaacagttggtcaaagagcgtaccgtacttttggaggaagcgcagcaacaagcggaccgtctgctcaagaacatgctgccggcgtatgtgctaaatcaagcaaaatgaagcaaaaacaaaaaagcgcatttctttagctacgctaattaattggggaggctatttaatagcggcataaattcaacggtttgaggcttaaaaagtcttcccgctgatggtcgtccttgaaaaatgaaattaacaaaagcattttgtaaatatgaaaacaatggtttatggatgggcaccccgcagaatcaggcgctgggtcggcaccattagagtctttcttaaccactttttcgtgcagttccgtggccgacgatttgaaggcgggtcggtcagtgccgcctttgctgtatttgggtgccaccgttttgttctcggacattcgcggtttcacgcgaatggcgagcagttcgacgccgctgcaagtggtcaatttcctcaacgatttgtttctccggttttgacgcgattatcgccaaacatgacgcgtacaaagtggagacggtaaggcgggagaaagcgcggggaaagggggcggagatcgaaggcattgccacattgtctaattaggaagggattgtcacattgtctaattaggaagggattgacacagagtctaattagtaagggattggcacagagtctaattagtaagggattggcacagagtctaattagtaagggattggcacagagtctaattagtaagggattggcacagagtctaattagtaagggattggcacagagtctaattagtaagggattggcacagagtctaattagtaagggattggcacagagtctaattagtaagggattggcacagagtctaattagtaagggattggcacagagtctaattagtaagggattggcacagagtctaattagtaagggattggcacagagtctaattagtaagggattggcacagagtctaattagtaagggattggcacagagtctaattagtaagggattggcatataatctga

SEQ ID NO: 51485 - DNA, 881 bp, Heterodera glycines
gtggactgccacgcgtgacagtcattgcttgatggcgtcaacgcgtttggtgttcgttcggcgagtgttttcttgccccaaataagctttcaatgtttgttctaataatttttttggtattttacggttatctgtactcagggcattttttggttgtgcgggtcatcctcgtgacattgtgaagcgattttgtgtataaaatgtgaattttttgaaaaatggattttgagttttttcaaatccgggattggggttcgaattgggtcaaaacagatgccagaatcggtttccccgaccttgaaaaccccctaaaacaagtttatttcaaaaaaatgttttttttcaaaatctgagtacagataaccgtaaagaaccattttttataatttcctctttgattatttgcattttaagcattcgcggggcatcattttcaatccgttgaacccgaccaaacgtattctcggcagccgttgtagtttggcatcaattcacccgccccctcaacaacaacattggtctcgaagtaacccatcttttctgtattttttacttgtaaacccccaaaaaacttaacaaattttataagtgcctgatcgcccgaccctttccgacttaatttttgaagtcagcagaaacatcgaccgacaagtggacgcagcgaattgagctcggaatttcgtgcactatgaaaattttgaggattcgatcatacaattctcttttttcgattcattcaatatttaaaaatatcattatttttcgtgaaaattgttatttatttatgcgattctggtaaagtattaatgaatttcgtatttttgaagccttaggaatgtaattttaagactttttcgctaatttttatttggcgggatttc

SEQ ID NO: 51486 - DNA, 1208 bp, Heterodera glycines
atgtccataaaagtgccaactttggagggtgacatcatcccgttgaacatcaagcacgtgaccaaacctggcagcacacaacggtgggtttcatttggatttctatcaaggaatttggctaatttcgagctcgatgtatgtgaacttaatttcctatcatttcaaaataacaaaaactcacaaaaacaaacaaaaaacagaccaaaaaaataaaaatacatttataggtttctcaagttttttaaaggtaacttctttaaaagtgttgaaaaaaggaatcttggaaaaaattatgtatcgacataaaaaagtttaaattgaaaatgtagacggcccaggtaattaactgacaaacaagcgttttgataaattttactgaatttatggacttaggtaaatgtaaaaaggtggacaaattttgtttactttgcagcgcccttatgagatgaatacaattaatagtggagtttccccccccccccatttttcgaaaaatttcttttgtttttaaaaaggacacgtatactttcccttatcattatttccttttttccagaatccacgatcgtggcattccgaaccctaaaacgggcaaacgcggcgacttggtggtggagtttgacgtgcgcttccccgattcgatagcgcctgccgcgcgggaactgatcgccaatgcattgccacccaactgatcggacgaacggagggccaaaagacgggaaagcgaaagaatgtgcatttgaaatgttcaattgacaagcgataaaagccttttccaatcctcaattccccaagaaatgagtccacttctccacattctgtggttctattttatttagttttattatggtgtttcgtttttcaataattttgtacatttaatttctgatggttgagagagacgtataccaaattctaccaacaatagatttgctatgcttgcggcgctgcaaaacatcacaatgctgggttattatttcgggacaattgaatatcttaaatttggtagtaaaaagagcaagaaagcatagaaattttttattttcagggtgggactgcattttttgatctgcattatttattgagtttgaattcgtcattgttgtttgtccgtcaatggtttttccgtagcgaatgaagtacgtacctttgccttgggcaatgaatgctttctttcgctcgcttttttgtctctttttggccaacca

SEQ ID NO: 51487 - DNA, 131 bp, Heterodera glycines
aaaagataggccactgtttttatgacttcgccaaattccgcttttcgccatgagagtccggaagacgtcgttttcgacctgttcaaattgcctaaccgtgacgaagcgtcgattggcaaattgatttcagt

SEQ ID NO: 51488 - DNA, 228 bp, Heterodera glycines
ctgtgttcatccgtgcattgcactgattacgcgtgccattcgcaatcagttgatcattccgaattggacggaattcaccggaaaagtccgagaactttttgaggaggtaaaaaatagaaagattattttaaaataatgtcaaaataagattttgttcagtgccgtgcagaaactggtggccaagtggccacttacattccccaattggcacgtgccgacccggaaaag

SEQ ID NO: 51489 - DNA, 525 bp, Heterodera glycines
atgtgcctgatcgtcgtgtcggttgaccatcgccctgcgcagcagacgccagctggaccacttgccgtgacgaactgtgtgcttcgcacgggtgacggccaccgcgttgaagcctcgggatggcaggcgcatgcgggtacgctggcggccttgtgtgttggcagtgcctactggttcaccaactgcttggcccgtgccaaataccagcgactggactgctggtttcgcattggggttggaggccccaatgcgcttgtggtgccgcacgtggccccagaggtaagttttttttttaattttaaattgatatttcttttgcaatttatgtttaagtttccggcaaacgttccaccaatgctgcccgttcaaattggcgcagggcgtgatgcggtccgggtgctgccaaacgtgaccaatgctggtgatgaacaacgcgcggacgcggaactggacaacaacaacaacaataatgtgaggaaatgatctttttattatgatttgtataattttattgctttacgatga

SEQ ID NO: 51490 - DNA, 2165 bp, Heterodera glycines
  unsure (1)..(2165): unsure at all n locations
tggaattagagagaaaaatgaccatgatgaagtaaagaatttatgnatgcgcggtatgtttgccgcagggaagcagtatggagaatttttgaattgcatatgtatgaccgaagccatagcattatgtctttgcctgtgcacttgcaaggtgaacagatttgctattttgatgagaatatggaagaagaagagattagagaacgtcttgcaaacggttctgagttaatggcttattttgaactgaataagacaaatgccctagcaaagactctgttgtatcaccagataccagagaagttttgtttcaagaaaggaaaatggactgagagaaagacacattttaacacaattggtagaatggtgaaagtgtcgccggctgagccggaacgataccacctgaggctattgttgttaaatgtgagaggagcatgctcctatgatcatttgaaaatagttatagatttgaatggcactgttaaagattgtgaaagtttttcagctgcctgtttggaaagaggcttgattagaaatgatgaagaatggaaaagagcattggaagaagcggagacttttgaaatgccatggaaattgagagaattttttgctttgattttagtccattgtaacccggccaagccggaggaactttggaacgtgtttaaagatgcattatcagaagattttagccggagatttaggcaagaaattgcatatgccaaagcttatagagaaattgtgctttgtattatgagggctggaaaaacgcttgccgattttccaaccatggaacagataaatgttgaagatgacgttgaacaagtgtttgatttagcagaagaattagatttaggacaaagaagttatgctatgatgtatgatgaacagagaaaagttactgatgatgttatgcgaagaatttggaaccctgtcaatgaacccgcgttttactttctaagtggaccgggcggaacaggaaagacgcatgtgaacaacactattgtacacatgcttagaggtcagaagaaaaaagtttgtacaatggcttttaccggtatagcggcaactttgttgcctaccgggaggacattgcacaatagatttggattgacattagatatgagtaattcaagtattggtccaagatccaaagctttgcaagaattgaaagaaacagatttgtttatttgtgatgaggcgcctatgattaataaacgggcgctaagaactttggatgagaaattgagagagattatgaataatggaattgcttttggcggcaaagttatgctttggacgggagactttcgtcaaacccatccaattcagaaacgatgccaccagagctgagttggtcaattcgaccgataaaaagaagtgagtattggagattagccaagagatatagattgacaaagaacatgagagctctcgcatcagagcaagaatttgcgagagatttattagaaattagatgtggaaatttgaacaatgaaaatgatgaattgattttgcccgagaattgtatttgtaatggagatttatcagaagagatcttcggcaattgcatcgtttctgagaattggaatgaaatggcaaaaagtgccattttagcaccaaataatgttgatgttagtgaaatgaataatagagttttggatatgttgcctggagaagaagtcgtttatacaagtatagatatagctcaagatgagaataggcaaagagtagatgagtatttggatgagtatttgaatgccttaaacccttcggggtttccacggcataagttgagattaaagaaaaatgctatagttttgttaatgagaaatttgaatatagacatgggtctttgtaatggttcgagaatgaaagtggaagaaatgcagccgaatttggttgtgtgtaagattttgactggagataaggctggtcaggtggtgtatatccctcggatcacattttgctgttccgaggagtacccatttgacttgcataggcatcaattcccattggtgttagcatttgcaatgacgatcaacaaggctcaaggccaaacacttgagcatgttggtgttgatttgagaaaagaagtttttagtcatggacagttgtatgtggctctttcgagagcaagagcttggaataagttgagaattagattagat

SEQ ID NO: 51491 - DNA, 1118 bp, Heterodera glycines
atgcgttcattaatgtttggcctgatgtacaaatcagaatgtgcctttttcacttatcacaatcagtactacgattcgttcaagtaattaaaaacaaaagtaaattatgtatgtacaatttagaaaaatgggcatattcattcatatgaaaatgatgaaaattttcgtaaattcgtcagatctttaacggctttatcttttgttcggccaaatgaagtcgagggtttttacgatattttatttgcaagggcaccattagaagcctatccgatttttgagtattttcgaaggtaaatctaaaccagggctcggatctgtccttatttgtaagatttgtccttatttcggactattgttcttattttgttcttatttcttaaatatattcataattttgaaattttatggcagaatttcaatattttataaagaaaatataagattttttggccttgatgttcttactttgaaaaattttcgatccgagccctgatctaaacccatctttcatgcagaatccccggaaatgaaaaatttagaacctatataatcagagataatggtggggaagctttatttccagtcgacacctggaatcaccatcagtctgttatcgataatatgtgtaggacgaataatgcgcaggtaaaaaataggtttctgtatttaattgaactaaaacttgtacataaaaaaaaaaattaaatttaaggaggcatttcatctgaatttacgtcgaaaatttcatacaatgcatcctgcattgtccaagtaattcttatgaaattttgtcttaaaaatttcttaggctactacttgtcctgaaagaagaggaaagaattgcgcaagaccgactacgatcttatcatcttgacccaacattgggtttaagtatgcgtccaagaagcaaaacgtacaaaaataacgatgcggctattcgggctttagtagtgcaatttgatttagtacctaacccaacgccagagcaagtgattaatcacttaagggccctacaataccgattagcatctaatgggtttgatcagtggaattagctcatgccaattattttgtagaattgtaaaaataggctgttgttggggccttcagcaagccta

SEQ ID NO: 51492 - DNA, 443 bp, Heterodera glycines
atgtccgtccgcaaatgtccgtccgcaaatgtccgtccgcaaatgtccgtccgcaaatgtccgtccgcaaatgtccgtccgcaaatgtccgtccgcaaatgtccgtccgcaaatgtcccactgcgccgagggataatcacacttcgggaggcgcgaatccgtctcccatcaccaccgccaccacccacttcagcgccagcacagcaaatgcttgttcttaccttaacttacctccccggaggtcgggagtaggggtgggggggggggtgatttgtggggggccaacaagctgatggacaaataaatatacacacaccctctccaccacaaatggagtgcaatttgtaatagattttgtccaaaaaggcgaccaaattttgatatttttagccaatttcttgaatttttattaacaaattttcagtaaaaaacaataattaata

SEQ ID NO: 51493 - DNA, 468 bp, Heterodera glycines
tggaagtctcctctctggactttccattaatttttcaaggttatgtgaacgacaattgcagttcactaaacctgatgaatggtcaggtatgcaatcagtgcatgcctgaacaccaagactgcaattgaaatcaattgcttcttgccgacttttacagttaaagtcaattgttaatggctctctggttagagccatgttgttcccgtcgaaaacaaaatctgagtttaagacgggagcgggcggaaaagttactccgatcggagtaaggctgatgttgttccatttcagtgttcttcctggatagaggaacacctgagttgacttgggtttttcgcccaaggtttccaggcgaattattgcataaacaataaattcccaggaattgcagcccatgatttcatagactgtcttggacttttcctgagcataccaacgataaaaaaggcatgcactgccgcctaagaggca

SEQ ID NO: 51494 - DNA, 1756 bp, Heterodera glycines
atggagttcttggccaatggcaagaaattgcgcgtcgtttacgacgccagtgctcacaccagaggaacaaacagtctcaatgcctgtttgtatagaggcccggtaatcctaccggaccttgtcggaatgcttatgcgtttccgatgcccaaaattccctctcctctccgacatccaagctgcatttttgcaaattgctttggaaccggaggacagagaagtcaccaaattcctctgggtgaaggacgccagtaaaccactggcaccaacaaatttgatcacttaccgattttgccgtgtggcattcggagtgatcagttcccccttcattttggctgcgactttgcagcaccatttgaggagtatgaatctccagtggccaaagaattggcccaatccttatatgtggataacacactccttgagtgtgaatccgcagaagaggctttgcataaatatgcagagtccaaagcaatccttaaagaaggactttttaatttaagggaatttgttacaaattccccggaggtaatgaaggcgattcctgaggaggatcgcctgaacaagcctaaggtaaaagtcctagggctcatttggacacagacaaagacgaaattgtctttgagttcccaactaatggcttagaaaaggtggcaacacgccgtcttgttctaagcttccttgcctcattatttgaccctctcggtctaatggggccgtgcattcagcccctgaagcttttcttccaaactctttgggaagaaaagaagggctgggatgatgttctttctgagaaagaacaaactcaatgggaatccttccaagaaaattggaaggatcagaccattagaatcccacggagatcaatgctacaagggaacccatcccttcaattacatgcttttgtggatgcttcgatccacacatttgcagccgcaatttatctaagagcggcagaaggtaaccaaatttcagtttggcttattttctccaaaaatagactcaaacctataaatgcctcaaaagcattaacaattcctagaatggaactcatggccattctaatagggataaggggtcttaaatttatcgccgatcaaattcggcgaccaatttctaatctccatctttggggcgattcacaaatcgctctaagttgggttgcttcaaaagaagcacaaccgaaattcattgagagacgagttaaggaaattcgtactctcaatgaatgtgcttttcattttgtccgaacagccgaaaatccggcggacatagcaacccgaggcgcaaaaccaggagaacttaaggataagtctctctggtggaatggcccttcctggcttaaggaagaccatgaccaatggcctaaagaaatgtaatttaaaataaaagatcctccagaaaatctggaggaagggtctctggataacgaagagaaagtgttcttcgttaataccagaacagaggaactgattgacagtcctctgattgaccccaaaaaattcagctcttggacaaagattgtccaagtgactctctttgtgttaagatttctccgtctgaaattgattcagaaggaatatccttccaagcttttcgagatccgtcgaaaagaaatcgcaaaagtgtccgaaaagggactattttcagcagaagatgttctcctagcagagaaccttctgatccgcatggatcatattaaaagtgctgaagacttcctaagctatccttctcttaaggatagcgaggggatttaa

SEQ ID NO: 51495 - DNA, 702 bp, Heterodera glycines
atgtacattgagacagcccaagaaaacttgggcaaagagctggcggaccaaagtgtccgtgcagacttaattgcagagagacaaaatctctgcaaaatcatttctcttttggagaaatacaatggaaaatgggaagccattttcctgagaataaagggaccagctcttcaggaggaagagcaaaattatagggactttaagccagaaggcaaagccttcatgcattgggtcgaccaagcccgagggcttgtcgacaccattgaaggggccttaggcctctcagagctgggagatgcaattccccagccaaaccagccagcacaagttgtgcagcagcaacaacttgtgcatcagcgtcatgatgtgacgcttccgccaataacattgcccaagttctcgggggaaccccgagattggcctttattttggaagctctttgagacttccgttgaaagtcttcagattgaagactttaaaaagcatatttatttgctgggatgcctcccagagaagtcaattgctcggagagcaattgacttgtatccgccatcagatgaaaattatccaagggtagttgaaattctgaaaaagcggtttggggatgaaaaaacgaatggtggagtccctccaagcggagttactccaccttcccaaaccagcagaatccgttcagtctctgagacaattctcagagtccattga

SEQ ID NO: 51496 - DNA, 556 bp, Heterodera glycines
atgattgcggacggaagtgaggactttgaacagttggagcgttcattgtcttttgaggtgttttttcgagttaatgcaagctaatagattcactcagaacatattatttcttgaaaaagttgtagtttattgaaaaagaaaatcgggtgcctttccgctgaagtatggccccataaccaaaaaaagtaccgaatatcgcctaaatagagtatcaaaaactgttatttctatggacagataaataattgattccaacaaatgtcttctttgctttgtatctggattgtaaataaaatatacaactttttaaatcaaatggtatcgataggcgtcgccatttagtcttaaaattgaacattttggttagcagttaaatattattaataaaattaaggtggctgattgcattgccgcagatatggatgacggggagggattcgtgttcatggaaatgcgcaaggagggcccttccgttgaacttgttgaagaatgaccattgactgtgagaataactggtgtccgataaatgaccaaacaaatatttaaaaaaattaaa

SEQ ID NO: 51497 - DNA, 850 bp, Heterodera glycines
atgtctaacgacaaaaaagacgaatcatcaatttcaacgaatacccttgttaacaaagaaaaggcttctattgttcaggaggttatttaattttacattacactcgcattttactcagttcctattccataatttttactatttaagtcatcatttgtcactcctggcattttccgtcgtcgtaaaatgctcacaggcagacaactgaatgatgaaggaaacaatgaagctaaggaaaaaagcgcggtgtttatttacatattatttaaatttctaattatgttttttataggatttcaaatggtcaattgaccaaatcgcaaagatacaacccattgaatttgatgagactgaggagttttcattgccacctgaaaattggtatatttgcgttagtttttttttacactaatttctgtttttagggacccttgtgcaaaattcaagactccacaatttgaaaatattgatcacttttggactcacaacaacttaattgctccttcaccgggactattcgccacaggtaccaaaacattttcttttaataaaaaaggctacttctatacctgctgaaaatttttccgagcccccaacccgagttggaacaaaattgccttttatttgagttgagaattcggaagttattccttttaatagatgtcacatagagttgaacttttatgaatgtacatgccaaaaaattttatattaacatttagcctctgctttacgtcgtgttcaaccgtccgccaattctccaaccacctcaccgtttcagctcgctctttctcctttcggttcgggtccttcctgctcatcgaaatgctctttgtccgaggtaaataaa

SEQ ID NO: 51498 - DNA, 1098 bp, Heterodera glycines
atggctttggtatttggctttttgaaaaagatatttgtttttctttgttatgttgggtaggtggtacacttaatccacaggctcaatttcacgcagattggcttacacttttgggctttaccctccccagcccattcgcttcatcatcaatttcacacgcttgaaataatggagaaagtgtgtatgagcaagaggacaaaatggaaaacgggcagagtacagcagccacaggtaaaaacagacggcgagaaaagcattgagagagagagcgagggagagagaagagaatagagagggagagagaaaaagtgatatatagcaacagaatagggcagacgagagaaaagcattgagagagagcgagggagagagaagagagagataagagatgaaatgcattgatagagagagtataagacagacagcgagaaaagcattgagtgtctgtgaagggttaaggacagacagcgagaaaagcattgggcagagaaatcgacagtcagagaaacaattttcaaaatcgatgaagcctcacttttccttggggttgcgtaattactactaagctgtggtcagtgtggccactgatgaaaagcggggctctggccatttggccaccctcggcagcagcaggcggaagcgtaacggaacacagcgcaaaattggatacataattaagaatctatttttggcacggcaagccaattatattttacaaatgaataattaaaatagtaaataaaggagtgaaaaggggaatttaaaatttaaaaaaataatccattaagaaagttcgaaacaaatttacgtatatttttctcattaatcgatttatcgtcgatacaattaaaaataaaaatgcacaaattttttattttaaatgatattttaccaagaaaatcaagtccagattttatttttattttttaaatttgcaattgcaggagataaattttatataaaaaaattaattagaaaattaaaatttatttataaaaattcatatgaaaattaaaaatttaattaaaaaagtagcccaattaaaaattaatatgcgcgcgccaattcaacaaaatgacaccgcaaatttcaaataaa

SEQ ID NO: 51499 - DNA, 271 bp, Heterodera glycines
ctctctctcaatgcttttctcgccgtctgtttttacctgtggctgctgtactctgcccgttttccattttgtcctcttgctcatacacactttctccattatttcaagcgtgtgaaattgatgatgaagcgaatgggctggggagggtaaagcccaaaagtgtaagccaatctgcgtgaaattgagcctgtggattaagtgtaccacctacccaacataacaaagaaaaacaaatatctttttcaaaaagccaaataccaaagccattttg

SEQ ID NO: 51500 - DNA, 698 bp, Heterodera glycines
  unsure (1)..(698): unsure at all n locations
atgtcttcttttcccgattcaacaaattatacatttacagctgatcaaggtactactgaaatgaccaaagcaatttgaaattccgaaactttggacaaaaattggggtgccatggcaaatcgtacaatttctaggctaggcttaggcttgcttggttgggcctaggcttaagctttatcttgtaaaatacgagttgatttttgtacgagttgccattgaccaaaaaattggataagcccaaaaagaaaaatttaaaaaaaagacaccaaaaaagaaaatttatgtttttaaatttattcattttaaatgcgcatattttcatgctcagatggcaaaaaaaggaagactgcaaagccggacattttggcagatcgaatgaaattgttgctgagcacggccgatttcgccgatgcgcattttttggttgggcaaaacgacaaaaaagaggcaaaaataaaatttaaaaaatatatttaaatttaactaaatttgaaataaaaataatatttgctgaattaaattttaagcttctgcacgcacatcgtgccattctttctgcgtcttccgacgttttgaggcgatgtttaaaaaggaagcgacgaaaaatgcgaatggcacggcacattcggtgggaaaagtaggaaaattcttaattttcaattatcaaataatattttttanaacagttcactcattan

SEQ ID NO: 51501 - DNA, 418 bp, Heterodera glycines
gaaattcgaatttctcgtgctgaactttcccctttggttggtgccgatttggtgcggcatttggcaaagtgtagcacggccggcgaagtgatgtacgaactgctgaagagcgccgcttatatgcaccacatcattgaacagtaagtccggcgaaaatacgccatgggttacccgcccccctcggggactaaccaaaatctcgccgcataaattaaaaaaaaaatcaaacttagaaaattttcaacgaaaaattcttagaaatttttttataagaaaatttaaagggaaaaaaaatttttagcagtttttttgaaattttataaaattacgttttttcgaaatttttaattccagcgccaaaaaaggaaaaaagcaggcaaaaggtctaatttttgcaatttttgtttcaaaaaactaa

SEQ ID NO: 51502 - DNA, 1335 bp, Heterodera glycines
aagagacagttgttcttgaaaatggtttggctttgtatgcaagaccaaatgatgaaagagaagttgaaatatttgcaaatggaagaagacatgaattagacaacagatgggttgttccgcacaacctatacctgttgaaaatgttcaagtgccacattaatcttgaaaaggttaatagtgttagttcagtaaagtatttgcataagtatgtgcataagccaccagatagagcaagattggaattagaagagaaaaatgatcatgatgaagttaaagaattcattgatgcgcggtatgtttgcccgcaagaagcagtgtgggaatttttgaattgcatggataaaattcggctaagacaactgttactttacgaattccgaaaaaattctaccccaacccaagctcttcgaaatatttgtgaaagtgagggcatgatgcactctctctttctacagttaagcgatggttcacaaaatttcgtgaaggcaatgagcagctcgaagatgaaccccgctccggacgaccacctgctctcgattcggacgacttggagcagcacgttcagcagcatccgtgttctagttcgcgccaacttgcagcagagttcggggtccatcagacaacagtgctcaattacctccatcagcccggcttcatcaacaaaaagggtgccgaattccccatgcactgacccaacaacaaaagcatcagcgagtggtcacctgcactgaacttctcgcccgtttgagtgctggaatgcagctttcccagctgatcacgtgtgatgagaagtgggtttatctcaacaacaaaacggcacaaaaacaatggctgaagccaaacgaattgtgcgagccgacccccaggcgtcttcaacatgcaccgaaggtattgctgtgcgtctggtggtgttcatcagggttggtccgctatgaacttgttccggtgggcaaaccatcaacgccgacatctaccagcaacaactgcagcgggttcatgaccaaattcgtcgtcctccattttctgcaaaattccgcggcggcgtactccttctccatgacaacgcacgcccacatgttgcgttctcaacgcaacaaaaaattgagcaacttcgatgggcggtccttactcatccaccatacagcccagacatcagcccgtgtgactactatctgtttcgatctatggagcacttcttgagagggaaagaatttgctgatcaaaacgaggtcgaaaatgcattggatgacttttttggatcgaaaaatgatcagttttataaaaaggggattgaaatgttgcccgaacgatgggggaggatcattgatcaaaatg

SEQ ID NO: 51503 - DNA, 348 bp, Heterodera glycines
  unsure (1)..(348): unsure at all n locations
attttaaaaagaagtaaaatggtcgatgcgcaacattttacccaactgctcatcggaatgatgaactccgaaaatgaaattcgaagtgtctactctttttagtgcatgagttaaatttttgtttaaggtgaggctgaaaaacagtacgaagcgattgcactcaaagacaaaggtttagttttgtgagtcctnnnnncctncgccttttnggnccccttttgtttnnnccttncttgntttcctctgcggatgttgnggttttgcttcnncttgtggcccttttcccgctttgttccctccgtttngtctcgctctttggctttggttcttctgcggcgtttgctgtcg

SEQ ID NO: 51504 - DNA, 677 bp, Heterodera glycines
atgacgatggacgcggagacgaacgacggggaaaaacgtaacggagtggcggccgccggtggtggcggtgatcaaaaaatgtgtgtgaagagaagcgcttagaaaattagaattcatcatcatatcattttgcccattttgttcacaaccgttatttcactttgtgcgtcgattttgtttttgcactttgtttgttttttgttttatttgttggcgcctcacacatacaaatgcttttaaaaaagcggcaaaggggttgttgagacaactcgaattccaacgaaaaattttcaaaattaataatgattcattcatccacaaaattaaaaattattcacacaataccaaaaaagtcatacatgaaaattgtgaaaaagtcgaaattttgagattttttcaatgttactttttcagaagccaaaaaatctttttgctttttgtatggctaataaagcatataaagaacgttcgaatgataccaacaatgttggatttggactaggtcgtttcggcgcgagcacaagtttttggcgctatgattttttctttgccaacaaaatccagggtccactttagaggctttttctaagctattgcttagcgattggacaattaccaaaaaagttataacatgaaattgcaaaaaagtcaattttttgaagttttttcttaataaa

SEQ ID NO: 51505 - DNA, 322 bp, Heterodera glycines
atggaccaacttatcagtgggcttctcggaggtggcggcggaggaggagcaaattctggtgataatcagccgcagcagggcggcggaggcagtggcaatcagttggcagatatggccggggtaatgaacaattttttttttaaatttaacatatctaatttttattcccccaggaattaatcggaggatttcttggcggtggcgggggaggaagcggcgccttgggaggaggcgcaggcggcggggtaaaataaccgtcgatttctaatttttagttcttagccatttcagctttaagcctaattgaaaatttaaaaataaa

SEQ ID NO: 51506 - DNA, 1610 bp, Heterodera glycines
atggatccggaaatttctgataattttccggctgaaaatgagcaaagcgaagaagtgtttattgatgaaaatgaaaacaacctttcaaagcttcaactgactgaaccctccgcttcatttttgcgttattaccaattcaataagggcgacaaaaccgcaaaatgccgaatttgtggagttcaaatctcacgcaaaatgggaaacactacaggaatggacaagcatttgaaacaacacaaaaagtctttaaattttcttttatttctaagttattttcaggtatcacaaaatgtatgcttccgcaaaagagcaaaaaattagccaaaaaagaagtgcttcagtattcaatgaggaatcttcttcccagcaaccattaaaacaaatgaacattgaacatttccgttcgaaggaaaaatggtccaattcacaccctaaatcccaaaaaattgactcattaattttgcgtttcatttgcctttcgtgtgagccaattttgtttccggaaaaaaatggaatgacagatttttgaagagcgtgtccaaggtaaattttttctcttttaatgaactaataaaccattattagttaccggttgaaatctcgcgaatttatgacacaattattagaagaagaataccgaaacaaattcagcattgtaaaggaagaaatttgcacagcaaaatttttgtcattcactactgacaattggcaaaatgtgcgcaaaaagaaaagttttttgaggtaaaagaacccatctaaacattattttaacctaatttaagtttgaccgttcatttcattgactcggattttaaccgaaaatggcgtattttaaccactcagccgatgccagagtcccacaccggtcacaacattagtttacgactcaatgacattcttacaaattttggaattgaaccaaaccaaattcacatttttcttcgcgatgcagcctcgtctatgatttgtgccgttgaagaacttggctacgaacattttgactgtttttgtcacaaaattcaattggtaacaaaagatgattaaattgtataatttttcttttaatttaaaggcactgacggacgcccttgaacatcggactaaaagagttggagaagtcaaagaacagctacacctttgcagggatttggtggcatttttcaaccgatccaaaaactttcaaaacgtttttcaaagacaacaggaattaatcggagctcccaaaaatgggctgatacaggtcttattaattagattgttatacttaattttaatcgtcggttcaggatgttacaacccggtggaacagcagccttttcatgattaatcgaattactgaacaacaacgtccactgagtttggctcatattgactttccggatttgaaaatgcccgattttgaaatgctaaagaatctttcaaatgtaagaaatgatcgaaattatgcttgtaaacaattttctaaggttctgacaccttttgacaccttcaatttgtatttacgttttgggggacgagttcgaggaaaattttaaaaattttgttttcagaggggggggggggttcttggaattttctgagtcccaaaattctgtatttttttaaataaa

SEQ ID NO: 51507 - DNA, 836 bp, Heterodera glycines
atggcgacagcagttgcgttgcgtggcaatgaacgaattgtccaggatgggattattcccagtcaaaaccatttaccatgttgcattggcaacatttgtttggcaacatttgttccatggccattgttcggggcagtggcattctcttttaacacgtcttctcggcgtaagcttaattagtttttttatgtaaaggattttatttaaaattttagcgacattgtctttgtcggggcattgatgagcgtctttgaggccaaggaagtaagtattccttcaacccatttcttccgcagaagaattcgctctaaatgattttcaatttattgaaaatataatataaaacctacgcagcccgacactcatggaaagcatttcattaagctttcctaaatttattaaattatgagatttcgaattgagtttgatatggatataaatttgggatttacactgtccgggtgtccttgcatcgcgcaatcccacaattgagccttaacgtataatttacgttaaaaaatcatttgatttaatacgatattaaaaataaaaattttcttcttatgtgtatattcatttgttatattctagcacttaaaattgtttaaagttaataatctaaattaactccaaatcaggaattaaggataagcattaaaaattttagtattcgcggaggcggactataaaatttcagaacaaggaacttaggaatgaatttcaaaaaatcatttaaataaatattttttcaaaattagtctaattaacagaaagtgttattggcaatattccaataaataattgcatctcaaattgttcagaaatttagaaccgga

SEQ ID NO: 51508 - DNA, 912 bp, Heterodera glycines
atgtccgattcaatttgggaaatcttcacaatcctggacaaaatcaatttggagtcagaaaaggcctacgtggcgtgagttcgagagatgtaaaacttttgaccaggcaacaaagctcgaggaacaatcgcaaaattcattaatggaagcccgaagattacatttcgagtcccggagggtgcagagccaaatgttaaattatgaaaataggctccaaacaattgtttgggagcatatgggtatataagaacaaaaaataatgatataacaaaatggaaaattgtgccataattgagacatattgtcataaagacttaaaatttggctttaaaaaacacaaaaccaagttttattttgtcaatccattttttgttaatgctgagcaaaattttaaactaatactcgcatcaatagtcgaaaaaatttataaaaatgaacaaggaaaattcaaaagcattctgaagctttcctttggttttgaatcattttattgccctcttagatgccctagcgaaaacacagccgaggctttgttccaacatgtcctattaaaagaagaattatattcgtttttctatcctttggatgatgtcataacactagaagtaactataatcccagatgtcgacaatagaccaagaaattaattttataaaaaacaaaattacaagaaattggaaaatcacaggaaagattgttaaacgttcacatttgttagcaatttttgcaaataaactttttaaacgggtgaaaaatttctacatagcggcatttagcgcgccagacattgaaaatttatatttttcattcttagaaatgcttgaaaaaattcaaaaattaccagggcttattatgcatgaatatataaaccaagccttagctatgcaaaaattagaaattggcctcaaagaa

SEQ ID NO: 51509 - DNA, 684 bp, Heterodera glycines
atggtctgtttttgaagttcaaaatttgcttaaaattctcaaaaaaatttttggcggagcatataaaatacaccagacccccaaataaaaaactgaaaaactttttattaatcctattaccccaaaatttttccggttattaccctgttttttagacaaattcgttctttgcttattaaattatcaaaataggtaatcttattttctttaaagaaccgccataccatcaaagtgctttctcagacatttccgaaagtccgttgcttcaaatcacggaagaggagcaatttccggtcgaagcaaccccgatgaggagtcttttggatgtaatataaataaatacaaataaaattttcagggtaacactcttctcccatttagcaactcgatagtgacaaatcggaacgttctgccccttctcaaaaaagcacgtgggcaatacaaaagcaaactcaggaacatgtacgacgggcatataaacgactaggaatcgaaagacctgaggaacgcgaaaatgctcgccaagccctcacagcatcgacgtgtgactcaatctcgggaaagaggagccacaacaaagtcagacaaaatgaaaaaggaagttgtgagaaaattaagagccaaatgtgacgataattgtgatatttgttcaaattttttgaaaaaatatcggcattgaataaa

SEQ ID NO: 51510 - DNA, 524 bp, Heterodera glycines
atgctgaaaattgttatgattggtggtacagttgtatcgtcagttgcctatcatcactcaattggttaggagtcgcttagcttgccagccttaggtcatatgggccttggcacttcaattcccaaaattttttttgtaccttttgcaagtgtacgactccgccttccggaaattattttttgatcagaccaaaacccggacctgtacagacacggagactcagttaatttgtttttcccacttcagtaccagttgaataccaggccagggtttgcactgagcgagggagtgccagcgaacttattatagagctcaatgagttggatttttccagtttttaaaattgcgaaaattttcaaaatttctcgagctaggcctaaaagtaggtttttcagtttctgaattttaggattttttaacgatttttctcgggaaaacggagagcagttccaaaaaatcgtttttggagttctatcgactggtatttttttcgaaaaaatttcggtttttttccggaaatagaa

SEQ ID NO: 51511 - DNA, 185 bp, Heterodera glycines
atgctcgcgagaaagagccgaggagcggtaagcaactgccagttaatttttcaaagaatttccaaagttctcggcgatgccataaaaatggctatctcttttttgtaacaaatttctagcgaacaaatgctcgcgagcaagagccggcggagcgtgaagcaactgccagtcaatttttcatataa

SEQ ID NO: 51512 - DNA, 1297 bp, Heterodera glycines
  unsure (1)..(1297): unsure at all n locations
atggcacttttactgcttccattgctcgcttatgtggctgctcaggacggcatcaaaaagcagcaacaaaataatggtggccaaagttttaccggcagcgtgaacaatgccgaaattcgtcgggcagtcaatggcactgaggtggaaaatgccaaaaaaaaaaatatgcatctaaatattttaataattattttttctaaaagtttagtttatgcttgagtgccctcgtgccgcgtatttggtccgtactcatatggcacccgattttgagcacccgcaactggtgagaaggttggattggcttcacgacggtgcactggttgccagctatcagcaggtgataagaaaatttaattataaattcgagaaaacgaaaaaaattaccaaaaaaattaaataaaaaatttatttttaaaatcgagaaaacgaaaaaaaattacccaaaaattaaaataataaaaaagttttttttttgtaagaaatatgctaaaaaattttgaatattcacttttttatttttttgaattattctttttaattaaattttaaactaaaccaatataagtaaaaattgcaattttttgttaaaacttttttaaaatttttttttaattatttccaaccctaaaataaatttaaaaaaaaaaattttttctatattttttggactagaaaacaaaattaaggatttttttttaaatgatgaacccattttttcaaaattcatgcattttcccgcctattttcttccaatttccttcgttttttgttttcccgtcttgtgccatggcattgagttttcccattccccacacacttatacaaacacacaataatattgtggtacaatgaagggcaatgcaacacaacccaacncanaatttgcatgccaatgccaacaaccanttcatcggttggggtgatgaaatttgagctgctgggacataattttttgaatattgggataaattgtgagttggagaataatttgatatgtgaaaaaaagggttttttgaagaaatattttagaaaaaatttccgattaaaaataaattttttgcttgaaaatctaagggattaaagaagaaaagagaagcaataaatagttatagaaatttttaaaaaatttagccaaaaacttttttaaagaaagaagggttcaggaaaattcgaatattttaaatgcatttgaatcgaaatcagtagttttttttaaattttataaaataattaaatttataaaattatttatatttagcattttattattaatctttagaaagtttgaaattcgata

SEQ ID NO: 51513 - DNA, 777 bp, Heterodera glycines
atgttacggcgatcaactggctcaaattggagttgggatgagcgacttccgtttataacattttgctacaatactacaccctctgaggtcaccggattttcgccgtacaaaatgctatttggaaaaccagctaattttcccggagaccatgacataaattggcagaaaaaccctgcctacacaatcgaccaagaaacgtatttgcaaattttccgcgaaaacataaaagacatcatcaatgttgctaaaaaaactgcagaaaattcaagagaaaagtcgaaaatgtattacgacaaacgaccaaatgtgacagaaaacaaatttggccaaggggaccactgtatggtgatattcccaggctcaaacagtcgttcaccgcataaaaagctgatgtggaacaattttggcccatacaaaataattgaaatttcaaaatcctcagcaaaattggttcccgtcgataaaaagaatgcagagccaatttcagtgcctttggaacgtttagtccgagtaccaccaggattaccaaacatttcgaccctcccaaaaggaagaaatgtctatagaaatgtcctcaacgcattgcttacacctaatttgaaattgacagaaaaggagccgaaaaaacggggaaataatggagaaattggtcgaactgacaaaaaatcgataattcaattagggacaattgaatttttaggcggcgatatggaattggacggagaaggcaattacgcactttcatggtcatcgatttgttgtggaaagggtcacgaa

SEQ ID NO: 51514 - DNA, 222 bp, Heterodera glycines
ctgaaaaatgtccaaatcagaatgtacaacaaattggttaactattagaaaataataggatttggaataagtaaaattgtaaaaaatgagcgaatgctaattaaacctaacttatgcaagtggcgagggatccctcaggcttagtttttagaatcttaatttttaaaaaagcacatttttctatttttgggttggggcccaaacgaccccggggcccaaaaa

SEQ ID NO: 51515 - DNA, 730 bp, Heterodera glycines
atgaatatgtcaactcatcctggtaaaaaaaacattttcaatggccttactttgtaattcaccccatattcccaggaatgtacgaatttttgccaatgtacaccaattttgagccgaacagaacatacgaactgattggaacttataagcccatcatcaaaaccgacccgccacagttcgagacaaactttgtgattatgcacaaatccgagcaaacgcggcaagtgatgaaatggtaaagaggcaataatttggaaattaataatttattcatatgaaattattcatttaatttagaattgaaaattaattatttctagagcccggacgggcccggcgggcttttaccgggcgtcccggtcccggccccgtttttttttggaaaaaaacgggcccgggacgcccggtaaaacgggcgttttttgaacgggcggcccgccccggtcaattttcgaagcccggtcccgggcccggtcaatttgaccgggctaaaacgggcttaaattccgccagcgaaactgcccaaaattgaatttaaataattattttggcgaaatgtctttaattcaaaaatttcaagatagaactttggatttttgaaatttttgggcaatttcaactgttaaaaagaccccaaaatccatatgaaattgaacaacattttcataactttctttttacaaaaaaaaaatttcaaatttcatgaaaaaccaaaaattttcttaataaa

SEQ ID NO: 51516 - DNA, 1216 bp, Heterodera glycines
atgtcgggcgagtaccgaaacggctacgccgcgccaggcgcgaccggcgctggtgctgctggtggcggaggcggtggaggagcgtacacggaacagcaacgcttctacgacgcggcgacaggcgcgcacggcttttctgagtcgtccagctgggagcagcgggagcattttgagcgcaaaatgcagaagggtgccaagcagcggggcttggtccgagaggggtccgcggcagcactcgtgcgggacgggtcgcggtcgcggattgttgaagggggcgcttcctacgcgaacgggctggccattgagagggtaaggatcgtgtgtgttggctaatgatcctctaattagcaacgtagttaatttgaacctaattagcattaaaaattttgaaatctcggcgagaaaaattggcatatgccaagcgatttttagccgcgcgcgatttctcgatttctctccatttctttctctcttttttctttatctttttcccctttcactctctcaagtcttcatctctttctcgagtcaccctctctcttcctctctcattttctctttcaactcttcattcaccactctatttcccacccatccctttgatcactcaacagaccaacaacggcacttcacaagctaatgctgcatctatcgctgcttctgttactgctacaacctctcacttggcattgctgactgcccgtgaagcattgctccaatgggcccgccatgttacgtccggttaccccggcgtcaatgttgccaacttttccggcagttggaaggacgggttggcattctgtgcccttctgcacttttatcgtcccgggctgatcaactgggaagaggtaatctgactgatctatataaaaaatgaatgggatttaattatttttttctaaaattttagtgccacaaattttagagttaaaggccgaattttggcatttatttcaaattttttgaaatttttttgaacccaatattttcaaaaaaaatttataatcttttccatcattaaattagcttcaacttttttttccagatcagtgcccagaagccgttggatcggctccggaatgcctttgacgccttcgagtcggagttcggcgtagccgaactgctcgatccggaggatgtgtgcgaggtggacacaccggacgagcgctcactgatcacctacgtttcaacaactgcacgatcgattggtggatga

SEQ ID NO: 51517 - DNA, 1412 bp, Heterodera glycines
atgttcattgacgggattggcaaagatcgtgccgccgctgaacaagcgttggccatggtcggcacacaaaatgcccaacttgctgaactgcttgccgccagtgctgcgcaacgggaagaaatgctcagcaccgagttgaagcagctggctgaattgcgtgaccagctggcagaagcggaagcaacagccgccgcccaccaagcaatgcttgttttccgcaaaaagcgtcaaaccaatgaggacggcgtacagctgaagggtagccaaagggccaaagtgattgcaaaggtgtgacgtacgatcaatggtggatgaccaaatcaacatactaatgggcaattaattagcattggcttagtgtgacactaattagggcgagcttcgagggtctgatggtggattattgtggggtaattaactaaggcggcgaaagcagacagttaaaagagatacccaaaatgccattatgagcaattaaaagttggcaccggaaccctaattttgagggagttcagttgggaagggatgagtgaacaccgcaaatgtaatttgcaacttaaacttgccaataaaaacataatttagtaagataatgtggcttgaattacaggttacacaactggaaatggaagcgcaaaaaattcgtggaatttatgacgccacccgattggaagcacaccgagcaattgaggtattaattactaatcgcaattaattacattgcttattaataatagcaatttaaataactgtaattatgtaattaaattttaataaattaaaatatttctaaaaatataaatgattatactaaaattaaaatttttctgaaaatatgttttaaaattaaatttttaatttcattgatggcactaattaatgcattttttaattgtccaaatgtaattaataatttaggcggcgaatgcgttcacgcaaattgcgcacgggttgctgcaggcgcgcaacaacactcgcaccgcacaacaactgatgaaggaaacgcacgggcacctgcgcggcgttgcggaagcggcaacaaacgcgaaaagtgcaagcaaagcgatgggcgcatcaattgacatcggctgcaatggaagtggctgtgtcgaggtagggggaaaattttagaaaaatttgaaaaattttctgccgtttttttgatattttatgatgattttttataaataatttttctcaaaaaatttctgcaaaaattgcttaaaatttttcatcttgaatgttcatataaaaaattaaatttttttccagaaaaaattttaagtttgacaattttttaagaaaattttgaagtggtgggaacaacaatgattttttgcttggtattcatcatttgttataaatgatttttgttttaaatttattatttttttctataaaatatatttgaa

SEQ ID NO: 51518 - DNA, 1177 bp, Heterodera glycines
aaaagaagatcgtatccaaaagtagactggacaacgaacattcgaatcctagccgtttctgttcccctaacaattgggaggcaaacagttccgtaacatttcacttctttgccatttatgtccacaatgcgcctttccgagtaggaaatgatctcatttttgtccaccatgtccataatttgtgcgaaaaactcagctgaaatcagagaaatttgggcacctccgtccaacattgcatccgactgtcgtccgtaaatagaaactttagcaacaattatcttcccgacaagaggactttcatttgaaacgacaaggtcactcaatttgtccgccgcgttgcggaagaaattttcaatttgtggtcggtgctcagcattcacagcacccgccagcaaatcattcggtttttgcggttcgttgttttgttcaacgaggtagttttggcgaagaaaatttctcgacgccgaaaactgtggtccgcttttggttggagcttgacgattccaatttaagggcgcagtatttgtccctgttccgggttgtttggaaaattggttttggttctcttggaagggtcgagattttggtggaaccatacaatttcgagacacgtgatcaattcggccacagttgaaacatgtgacattggttggtttgtttgtgtttatttctggtctggaccaattactggtatagttgtttgatggcacgttattggatgaatatgacgaattcggcatttgccgttgaaaagtttgatttgacctaaacgaatttctggcagccgattgcgttgcttccgctcgggctgcttgtgcaatgaattcatcaaatgtcgctctgggtctgcgtgtcatttcaagagtgattgccaactcgggattagaaatggctcttatgattgaataatcatcgtattgctgttcggttagacccggataagcgcggcggaccaaacccgaaattctgttcccgagctcatcgacactctcgtttggtcggcgccgaattccgcgcattagttggtcgaaagacgtcaattgtttggcgtctgtgtcgtccaactgtcgaataattatccgcctgattagctggtattcatgcgggttttcggcaatagctgaattgtaagccctctctgctttgccaaagcatttcgatcgaagagcgcgaagtc

SEQ ID NO: 51519 - DNA, 2877 bp, Heterodera glycines
aaaactttgagtttaattctcgaccgaaatcaaaggctggatatgaatgtcaagtaaaatcaacaaacggggcacagtaggaacaattttactgccattgaacgttgaacgaccacagccaaacagttaccgaatgaatcaacaattgtatgagaatgccccgggtaatactgaacggtaccgacctctccgagtcgaaagaccagttgttgccgaaaaccagcatcatttggttcgacaaaacccgccacctcatgcctacgctcacaatgacgattattatgctcagcgatttaaggcacaaaattcccaacaagctccccagttccaaaatcacaaccaaaatgtgccaattagagaaaatcatccgaatcagttcgaacaatatcagcagcctgtccaccccggactggtatttgacggcatgatggcacaggccattagaagcctagacagcttctcgtacacaatgactctgaactctattccgaatttggacggcccagcggatcagacgcagtgaacgcattttttaaacagtttgatgtagcgacagaggaatggcctgaggataaacgacttcgcgctcttcgatcgaaatgctttggcaaagcagagagggcttacaattcagctattgccgaaaacccgcatgaataccagctaatcaggcggataattattcgacagttggacgacacagacgccaaacaattgacgtctttcgaccaactaatgcgcggaattcggcgccgaccaaacgagagtgtcgatgagctcgggaacagaatttcgggtttggtccgccgcgcttatccgggtctaaccgaacagcaatacgatgattattcaatcataagagccatttctaatcccgagttggcaatcactcttgaaatgacacgcagacccagagcgacatttgatgaattcattgcacaagcagcccgagcggaagcaacgcaatcggctgccagaaattcgtttaggtcaaatcaaacttttcaacggcaaatgccgaattcgtcatattcatccaataacgtgccatcaaacaactataccagtaattggtccagaccagaaataaacacaaacaaaccaaccaatgtcacatgtttcaactgtggccgaattgatcacgtgtctcgaaattgtatggttccaccaaaatctcgacccttccaagagaaccaaaaccaattttccaaacaacccggaacagggacaaatactgcgcccttaaattggaatcgtcaagctccaaccaaaagcggaccacagttttcggcgtcgagaaattttcttcgccaaaactacctcgttgaacaaaacaacgaaccgcaaaaaccgaatgatttgctggcgggtgctgtgaatgctgagcaccgaccacaaattgaaaatttcttccgcaacgcggcggacaaattgagtgaccttgtcgtttcaaatgaaagtcctcttgtcgggaagataattgttgctaaagtttctatttacggacgacagtcggatgcaatgttggacggaggtgcccaaatttctctgatttcagctgagtttttcgcacaaattatggacatggtggacaaaaatgagatcatttcctactcggaaaggcgcattgtggacataaatggcaaagaagtgaaatgttacggaactgtttgcctcccaattgttaggggaacagaaacggctaggattcgaatgttcgttgtccagtctacttttggatacgatcttctttttggaacaaatgctttgaatcaattaggatttaaattgatcgacaaagttaacatgaatgtgatcgatttttctccactcgataaacaagcgaattcagcacacataatttatagagtcactcttcttccgcaatcatctacgcttgtcgagttgtcagtcctgcgcgagctggatgataaagaagtatctgtaatcggaagagacggttttcatgaacaactgaaatttgagccaactcttacatcaggaaaaaatggacaacttgttgtcccgattgtcaattattcggccattccgattactttggaggcgaaaagcaatgttgcgcaagttgaacttgtcgaagattggcatgaattagaaaattcgtttgtaacaccattggttgcaaaaaacgctagatattctgaaaaaggacgtgctggaatgattaaagacattctgtaaactcgcattgacaggagttacaaaaatgaacacggtcaattagagaatttaattctcgagttcgaacaaatttttgcgcttgacgacaacgaactgacacaaactgcgataacgcagcacatcattaacacgggaagtgcaccgccaattcgaaatcgaatgcgaccactcgcatttgcacatcgtgaaaaagtttcaatgatgcttcaggattatttgagcagaggattgattcggccgtcaaaatcgccatgggcaagccccattgttcttgtcccgaaacgtgatggaagcttaagattttgcgttgattaccgaggaattaattcggtcacagtgaaagacgcatacccgttgccgaacattgattacattcttctcgcattgggaggaaaaaaatacttctcaaccctcgacttcctttcgggatattggcaaattaaaatggacgagaagtccattgaaaaaacagcgttcgtcacagaatttggactgcatgaattcacggtgcttccgtttggactttgtaatgctgtagcaacttaccagcgattcatgtctcgtctttttgaagatctgatcaatgattttgtttatcttgatgatattttggtcgcgtctgagacgtttgaacaacaaggaagcattgaagattgttttgaacgtattcaggat

SEQ ID NO: 51520 - DNA, 2116 bp, Heterodera glycines
atgagcacaatggaatgttttgaggatgaggaccaagaagtgcatttaatgttgggcgacgaatgtgcgaatgaaacaccgaaattagccaacggcacatacaattacccaagagtttgtccaaaatgataattatccttataatgaattaatagccgtgaaaaattggggtgggaagagaagtggtcgaaccgctggggtcactttggtggttaattgtccaaggctcttaaacgatgagtcattccatgccattgttagcgggtgctttgttgggtcaactaattacatccatactctcggccgtaatggaaaacaaattattgttaatttttaaaaattaatcataattttaaagagacgaccaaagccaccacggctgaccaaagatcagacattcaaagtgccaccacaaatgactttggatatgccatggtaagaaagaatgtttaatgaatggattgtttaaattattatctttttgactaaattttatgttaaccgaatcagaaatagaatattgaaacactgaaattttttatccttttaatgaatatttaatgaagaatattgaaaatttttttggtttcgaagttatgattaaaaacttagcaatttcgaataaatttaattttgccatcatttttaagtaaggatgaagtgcttcaactgtacgaagaactacaatcgtccggcgtgccacaaataatgagccgctttgaagaagttgtaggcaatctgtgccggtgggcaaacattttgcgaagaaaaaataaataaatttcattttagtgaaattgatcaaaaacgtgacgaaaatgaacggttacaacaccagcaaaaagcgtgagtttgttctctttttgtaattatgtgggtactgcaataatacaggaacaaattacggtattcctactgttttagtgaacgtgaaagctacaataagcggatggcagcattggaaaatgaaattgatcaacaattattgatagctgagaagaaagcacgggatgaagtcggtgatacccggcgatttggtctcgagcttttagagatactgagtctgactaattaacatgactaattgacgacctgttctcgaaaaaacattaaacttaaatgaaaatttccaaatttaaaggaacgtgaaaaattggccaaggaaaaagaggagctgaaagagcgattggagcgcgaaatgggcgacctgcaaacgaacattgaacacttgcaaaaaatggaaaaagtgctgaagaaagaggcacaaaagaacggcaatcaggaaaagttgaaggagaagctggaggcaagaaaaaatttagaggaaaaattaaaattaacaaagattgatagcgattttaggcacaaaaaatcgcaaaatatacactaaaaaggcagaaaaaatagcaaaataggcattaaataggtacaaaaatcctggatatgcactaaaataggcaaataaaaatttttattacagcttttaggtaccaaaacacataaaaacttaatcaaaaaaataataatttggttatatttaaattgtaaatgaaattattaaatattttaaaggttttttcgaataatgacaaatttttaaaccaaaaattttttatcatgaaaaaaaatattttagggaatcaatttttgggaaaatttcttcatttcttaggggtgtattttggtttttattgtatttttgttaaggacttttccgaaaatcctgaaaattggcacattgagcataaaaaaccgaaataggcaaaaataggcattataaaagtcatcgtagatgctcaaagccgagcggaaaacgcgcttttcatgcttatctgtgcgtatcaagtgcgcaaaattttaggcatttgcctaacatcgcatccctagtgataaattttaatttgtttgtttttgcgcaggaaattgcgcgagagaatcgcacactgaagaacaatttggcggagaatcacttggagatgacgctgatcaaagccgagttggcggagatcaaaagcgagtacgaaaatcggacactgctcatgcagttggagcagcagcaggagcagccgagcgcggccgaagcacaacaaatccaacggcagctgcaactgcttta

SEQ ID NO: 51521 - DNA, 1879 bp, Heterodera glycines
  unsure (1)..(1879): unsure at all n locations
atgaaagaagtgccaattctgttggttggcaacaaagttgacttgcgcaactcgggcggtgatggcacgacgaaagatgagtcatcatcaacttttgtgtcaagaaaagagggcgaaaatctgtcggaggttaaattaaatttatattaaatttaaaacataattatttcaatattatattttttagacgctacgggagaataaaaatttttttaaagaattttattgcagctgttgggcactgatttcatcgagacaagcgcgttggatggcacaaatgtggagacggcacttctgttgcttgtcgggtgagcactccaaaaaaaggcctttggggatcaattaaaatggaatattatttttaaagctaaaaatcaaactgctgcttctgcttaaatataactaatcagttagttatttatttgtcttagaaaaggtaattttgagaattttaaacaccagcagtaataggcaaccggaatttgggtgcccaaaaattttcgtaaattcaaaaaagtatgttaaaatacgcattttgttgaatcttgataatcagtgatacgaatatttaagttctgtagcattagtattgtagtataaaagtaaaattctataaggagatcgttctgaattacgaaccccggaccagaattcgaacaaaaggtcgaaagtccaaaatttgaaattaacatttttggttaaaaatcactttaaatacatggaaacaaactgaaagccatcaatttttcaataagagataatttacgccgtttttgaactaaaaatgctaaattagaaaatttggactttctactttttgttcgaattcgggtccatgtttcgaaattggcaaaaatgataccgaattcgtgattagtgacctcgaaaacccaaggaacttatttttatgacattaaaattttcactgacgcatttctactgacgtattttccgggagccgaatgattccatattaattataggcacagtttgaaaatttgaatgtttggatgattgttttttaaggattaaattttcgggactgcgatttccctgattcttaggaccatttttaatggtactgatttgatcttaaggtcaattattttcagcgaaatgctcaaaacagaggatgatcagttgaaacagactgcaatgatgctgcaaaatggtggcaaatccaagaagagcaaatgcctgagttgtggcaactcatagatcagaagattatcaaccacagtgatcagcggcatcgatcggaaaatgaaactttgacttgngtcacttgaaaagattcagagatttctcccactnttttggtactaatttaaataatgctttataaatttaaattaccaattttccctgaatttcgtgattttaacttgtgttagacaggtccgggtacccgaccggctccagacccggaaaccggacccgaccttttgaaaatccaatactcgacccggtaggtccgggtccaaaaatacactgctaagaatgagggtctgggccagggctggacataactgattttcaattacggaaatccgtaattacggcgatttttaattacggaaacctaatccatcattagggagttccaaaaaggcgccgtatttcgcgtaatccttactcgtagcgattttagctaatatttatgaaaaaaattaggagtttttgggccgggcagtgcctcaaagtttagcatgatttgaaattttgctgtgcgcttttaatgactaaaattaggagatgggagtgattaagttcgtatttgaattaaatttgtgacttgtaaaaacttcgagaaaaagccatttggaaaaacgaacaatcaagtaatggaaatcatatgatatcagcaatcaagagatta

SEQ ID NO: 51522 - DNA, 660 bp, Heterodera glycines
gttttcggggcagtccccccgaaccgatgcgcccagatttatggggagaccgaatccttcgggaatagcttccctatagcctgtactttaattctgcgttggatttttgctccccataattgtttgagtaccccaaacggacacttgaaaaaatcgatttttttgttttcggggcagtccccccgagccgatgcgcccagatttatggggagaccgaatccttccggaatagcttccctatagcctgtactttaattctgcgttggatttttgctccccataattgtttgagtaccccaaacggacacttgaaaaaatcgatttttttgttttcggggcagtccccccgaaccgatgcgcccagatttatggggagaccgaatccttccggaatagcttccctatagcctgtactttaattctgcgttggatttttgctccccataattgtttgagtaccccaaacggacacttgaaaaaatcgatttttttgttttcggggcagtccccccgaaccgatgcgcccagatttatggggagaccgaatccttcgggaatagcttccctatagcctgtactttaattctgcgttggatttttgctccccataaatgtttgagtaccccaaacggacacttgaaaaaatcgatttttttgttt

SEQ ID NO: 51523 - DNA, 154 bp, Heterodera glycines
ctctagagtcaacgcagaattaaagtacaggctatagggaagctattctcgaaggattcggtctccccataaatctgggcgcatcggttcggggggactgccccgaaaacaaaaaaatcgattttttcaagtgtccgtttggggtactcaaaca

SEQ ID NO: 51524 - DNA, 408 bp, Heterodera glycines
atggccataaaatatggaccaaaaatcgcaaaatatggacataaaatggcaaaaatctcaaaatatggaaataaatggcaaaaatgtcaaaatatggacataaatttttcaaaattgagtgcaaaatttcttcaaatttattggttgaaattgcatatgagatacatttccaaattttttgacttggtaaggcgctttgacaaagacggctttcgttttgcaattagtcggtcaacattcggaaattggtctcgaattttttcggcaattacgtgcaatcattttaaaaggaaaaaaacataaaagctaaaatttattcatttttagcgaaaaatcaaccagaaaagtgaaattttatcttttttgcttatttttgacataaacttattaatttttaagaaaatttaa

SEQ ID NO: 51525 - DNA, 155 bp, Heterodera glycines
atgattgcacgtaattgccgaaaaaattcgagaccaatttccgaatgttgaccgactaattgcaaaacgaaagccgtctttgtcaaagcgccttaccaagtcaaaaaatttggaaatgtatctcatatgcaatttcaaccaataaatttgaagaa

SEQ ID NO: 51526 - DNA, 365 bp, Heterodera glycines
ccacctgcgccgccaccgcctcctccgccacccgttccaccatctccgctgcccgtgacagcgcctcctgtgcccgtgccaccgcctcctgtgtccgtgcgcctccgccgccgccggtgccaacgcctcctccgccgctcgtgccacttcctccgctgttggtgccaacgcctcctccgacgttcgtgccacaatttccgcctccgcccgtgccaccgcctgtgtcaccacctccgccgccgccgttgccaacgcctcctccgctgccgcccgtgccaccgcctcctccgctgcctgtgccaccgcctccgctgccgtccgtgccaccacctccgctgcggtccttgccaccgccaccgccagta

SEQ ID NO: 51527 - DNA, 819 bp, Heterodera glycines
gtagggcatttgaaaattcaaaagtttcacttgtactttctgaattgcttcttctttccatgctcaggtgttcttcttgggcattgcccttgtgcttttctccagcggtgtttattttgcggagcaaagcgaaccgaacacaaagtgaagaagccgagggaaaaagggggggggggcaaatttaaataaaaatgtaaatccaaaccacattaatttattaattaaaatttcaaattcccatccattttttaaaattatttattattattcaattaaagctgttaattccaattcctaaaaaatttaatttttcgatcacccaaaaaaaataattatttaaatattatttaaaatcacatccccttaaagtttaattttgaattttaaaattactctcccttcagattcacctccattcccgcttcgttttggtacgttttggccacaatgaccaccgtggggtacggtgacctcgtcccgcacggcgtttacggcaaaattgtgggttcatgctgcgcactgatcggcgtgctgactttggcactgccggtgccaatcattgtaaaacgatagttaattaattgattggtgaataatttactaaatgggggggggtcattagtgtttttgaataatccaaaatatatcggcttttttaaaattttgactcattaaaagaatagaaaaaattacgcgactaaacatttctttttctccctttaaaaggtggccaatttcaaacgtttttatcgccaagaaatcattctggccaaaatgtacgagcagaatccaccgccaaaacaggtgagagacattaat

SEQ ID NO: 51528 - DNA, 459 bp, Heterodera glycines
atggctgaagcatcttcaaacggcaccgaaatccacggcacagccataatccgcggcactaccattttcgctgcttatgccatggcatttttggaacttggcacatttattccgacaattccaattgtggcattctgcgcttcaatagtgtacaaaacttccattcttcaccaaaaccttaagggcattctgttggcccaactgtttggcataataatgaatttgtggccacgtgcctttatgttaattgcccaaattttcgtgacgaaaaatatttttttgttgccaccaaattttatctctggcgcttcaactgcggcattgacattcaacaacatggcaggccatgtgctgattgtggagcgaatatgtgcaactgtttatgtgggcacttatgagagctaccgtagttggacatttacggcactttggctgccaattatggtaaaaacttattag

SEQ ID NO: 51529 - DNA, 480 bp, Heterodera glycines
gaatttaagtataaccttagaaaattcaatgccgcggttatcaaatgtacaactcttatcaaagccacgccattattatgggaatccggaaaaatgatatgtctggggacgaaaagtctgatagactgtgaaaatgctattaaaaaatttatagaaataattaagggctcggggtgtccgggggcttcttacaccggacacacggttgaaaatattgtttcgacctttaaattcggacatgaaattgaactgaacgagtttcgaaaaaatcgtcgtgccttttatgaacccgaaatattttgcggtttaaatttcaagcggggtaaaagcatgacagcgttaattttctggaccggtaaagtcgtaattacgggaactaaaaacaattctgaaattgatgaaatgtatcattatattcttccctatctgaaaatggctcaaaagaagttagggagacgataaaaatttttatttattgag

SEQ ID NO: 51530 - DNA, 1414 bp, Heterodera glycines
atgaattgtggcaaaagagtaaaactgattacagcagtcgagaatatcacagtaactgatcaatgatgccaagagaaaagtgatcagaccgagcatttatctcatttggacacgcaaaaagcaccataatcaaaaagagatatcggaagaatatcaggacaatgctatgcgatcagtcgggcggatactgatcagtcctgggcttctgatcaatccctaccgcttaaaaaatgaaaataattattgcttttacagccctacctaaagttggcaccgcacaaagtcgaaattgttcattatgaaccgctggtggttgtgttccgcaatgtgatcagtgacgaggaaattgcggttgtcaaacaattggccaccccacgggtaagacgggatctgatcagaatcagataacaaacggactgatcagacaatttatcaaatcaattgggacagaaaaaacttaaaagattgaaaaaagaattggagtaacggacagttataaaattaacctaattaattgggccaaaaaaacattgaaaaaatgattagacaacaaacggactgatcaaacaattaaacataggcacataaaataccgatcagccagatcaaccaaataatcagaaaatgtaccattgagataatgccgtcacagcaaatcgacgacaatttaataattaggggagcaattaagcaaaggttccctgaatcgaaatgcaagaactgaatattcaatcaaaatattgtcaaagattcaggaaaatattgaaaaattgggacattttgccaaaaaaaaaatttttttaaataaattttcagctccgtcgcgcgacagtgcaaaattcgcgcaccggcggattggaattcgcttcgtatcgcatcagcaaatcggcatggcttaagggagatgagcatccgataattgagcgcattaatcgacgaattcacgtgagtggcacaaaatgtaataattaataaatgggcaaaaaataattaaaaaataaattaataattaattaatgagtaatcatttgtttgaatgaatttcaatgaaataaaggataattaaagtttaaaaaaataaattttcaatattacaatatataattaataattggacgcgaattaataggcaattagaattagttgtaattaattgaataattaatttaaatgaattttaacatcaaaatttcacgtgaatagggcaaaacgtaattacaataaaatggcaaaaaaaaaaaaaataattgaataattaatttgaatgaatctcaaagaaatcaatggacaatttaaataaatgttttaatctgttcaaaaaagaaaagtaattttttttttaaatattacagtaatacttagttattgaactctaattaatgtgcaattaggtttcattgttcaagccaataaa

SEQ ID NO: 51531 - DNA, 2378 bp, Heterodera glycines
atgctactgctttttgcttccgcttcggtgctccgtgtggcggttgcggacgtgttcaccgccatggttgacttggagaatctgttggcctccgagtcggcctcgacttccgacatcatcgagcagtacattgaggcggagcgggcacggcttgtccagctcagcgagtggggggatatatatattttgaaatttttaaaattttacgcaaggattaagcttgggttcaaaccaggacaaaaatttgagtgccaacatttggagacccacaaattctaggggggcaaattaagaaatttctcgggttttttgggtctcgattctcgagacaatttctcaatctaattcccgattctaaattgagaaaatttctcggttttaggtcaattttcggtgtcaattctcgattcacgaaatttctcgggttttttgtaccttggttctcaaggttttttctcggtccaaattgagaatttttctttttggttttcagttttttttagtcaataattctcggtctctgttttaaaatttctctgtcttttggatttttgtttccgctaaagtctaagcctaagcatggccaattgcaggttcgccgagcagtacgccaagtcgttgacggagtcgaggcacaacgccagcgggcaacagcacagtgtgcagctggagcccggcgaagcagatgtatggcaggcatggcattgtgccaaaagtcatttcgatcgtccctaatattggtcttgggattctgaactattggtttctcacggcctattccatttctagatcacacagattttggcacaaattttcgatctttgctctcttctactcgtttcccttttcgatcactgatctcgaccctaaatcaagggactctcgaacgctaaagaatcggcccaggcaaaattcgggtttttcctaaaattcttggccctaaaattgatctggatcactgactttggttgatcaaatttcaggctacaccaagtatattggaaccgctggaccctaattcatcaccaaattttcataatttttttttaattagccaaatcctgatcactctgatcccgatttcccccaccataaacacaggaggactcggtgatgaacccggtgaacgcgtatttgctgatcaagcggctgacgcgcgactggcaacggatcaggcagctgatgaatgccaacccgggcgatcagttcatcaaaaacatcaccggcgtcagagaggcgaacgcggttagagaaatcgaaaaaccgagatttaaaaatttgaaaatcaaatttttttccaggtaaaatacccggatgacgaggacctggacggagcggcacagggactgctccgcttacaggtaaattaatttgttaatttgattgacgcgctaattatctaccaaaacttttttttgccgggacgggtgtcggccgatcatttaaataatagtaacggtgcatcgacatttctgatcagtgctgatcggaggatttaatcagtttttttgtggaccagccgaacacttaaacaaacgggtcggtcggtcgaatttctgatcagttcattgttgatcaaaggcttcaaatcggttgaaaaagcatgtgatcggttttggtacgaccatctgattttagacgatcaaactgatcaacaaatcaacaattaagtggactttccatatactgatcattcatggactgattaactgatcagaaagcctaaaatttccacaggacacctacaagttgaagacgactgacctggccaacggatttgtggatggtgaaagtgtggccaaggagctgaatgccaacgactgtttcgagattggacgagccgcttacaaccaaaaggtaatcagggcccactcagttacgtcctgtccgggtcaagagtctcgaaaacccaccacccaattatctgttttcacgctacaatggatcatatggattatagatttccgtaattgaaatcatccatgttcagtactggttttcgcccctaattacacgcattacggcggattaattgcgcctaattaggactcacccagttaggtcctacccgggtcgagaatctcgaaccccgcgattttccaatgataatctgctatttttcaaggactactactacacgttggagtggatgcaggaggcgctccgccgcgacccgtccgccgcgctcgaggcggacattctcgagttcttggcctacgcgctctaccagcagggcaaccagaagcgggcactgaccatgaccaagtggctggtccggctggcgcccggccatccgcgtgccgccggtgggtgcggcgcggtggtgccaaaattgggacgtcaaaacacaatgccctggcaattagtagggtgggggg

SEQ ID NO: 51532 - DNA, 532 bp, Heterodera glycines
atggtgcagatcaccttcaaagaggttgaccgactggaccgccgcagggaagagattctgaatacaatagtctcggcagcgaatattcagggatattttggtaacgctgttgttgagcctttgcaatacttccgcgccgcttcactgacaacgatggagtttgtctttatgcccaacgattacatcgtcagaggaccatcgatacgggacaggatggcatcattcctgcgcccgggacaaacgcagtggggagttgaaaatcctcctgattacggcacaaaacgaccgcggtcggagatcatcggcaagctgaaaaaacgtcttgccagcagggtgagctgtggttggggggaataaatcccggcatcgccgcttggcatcgaccacctccggtggggtgtcaaatagcggtgcgagtccatttaaatgtattaaccaaatttatatgtgaacatagtgtttggtcaacttctatctaaatgctcaggagaccgtatggactagacttctcgaagaagtccagaaggcctga

SEQ ID NO: 51533 - DNA, 753 bp, Heterodera glycines
atgatagtgcgaagtccgccattaactaggcagagagcacagaatgcgggaatcattcttaaccaggaagggcaggaaatctttagagaaaacagaaacaatgcggaaaatggactgagacaaaatgaggacgggatgtcagagcattcaaatttttcagaaccaatgatgaacactgaacaaatccatgatgcattgttggacgtgggacaaagaaatgttcgtgatggtgaggaggacaaaggaaacgaaaacgaacaagtggacaatgcaaacggatttggaggtttgaatttcgaaaactttgaaaatttggaagagcgaacttttaatgttcacaacagaaatgtgagtctaacagattttgacgctgggcgtatgtttgaaaatgtgagattagaacgtcagcaaaatttactcccaatttcttttcctattgcgtcgaccccagtggaaaacagggtagcaaaccaaatgggtatggatcaagttcgagaaaattttagtgttattgctagattggaaaaggaattagtgataaacggagaaccgcaaattgtaacacgacagcaacgcaatcctacgtctgtagcacaaccacagagagttatccatcaaatgaatctgggacggcagaatgtacagcatcagaattaccaacatgagtatggtatgcgacagcgtgtagcgccagctccgagcgcaccgattcaacaatatgttcagtttgttgaacaaccaaatatgaacacg

SEQ ID NO: 51534 - DNA, 550 bp, Heterodera glycines
atggctttcgactgccgcccatatgcccgaaaaaaatcagcggatggtcatcggcaatttggcgaaattttttgtttatccaatagtccatccggcgcagatggaccaccgtgtcgtcgtccaccttcgccacccattcggcaccggcacagtgccgttgttgccaagtcagggcaccgaaccactgcaaaaatgtttataggcttatgtaaatccgacctattaaattgcgccaaagaattgccaaaacaaaggctttttttctccgtttctatcaattgaaagcaattaattgtaattagaaagtataatatattttgaattaattaaaattaatttttgttttttaataaaatcactttgagatgtaaatgcttgtacttatccacaaagccgtgcaaaaacacaatgtcaccatgctttttctgctcctcttctaatttgtgtttcacatctgccgcttctcctcccgatgggtcggcgataaaaaatcgttgtatttcgcccggggcctaattaaatccaaaattatatttatccaatcaataaa

SEQ ID NO: 51535 - DNA, 1572 bp, Heterodera glycines
atggttccttggtggagttccaacccgtccacattgaacagttcaatggagagcattgaagctgctgctgctggtgaacaacatcgtcatgttcgaccagtgcacgcaacaccaccaccagccgatgaatttgacggaattgttattgttgggcaaggagtaacagcagatgcaacggcagcaggagactttgtgccatgttcaacctctactttggcacaatcaattgaacgcgtttttggcaatttgcaacaccagcaaatgtatgtatatgagctgctgggatttttttttttatggctcacggataattctacaaaagggaactcgtacgatactataaaaatattttactaaataaagtcgaagcttatgcctaggccaagcctaaagcttaggcataaggcttaggcctagcctaagccattatacgagttgccgtttctacgaattgtcgcgacatcttttttttgagcacagctatgtgaaacatgaaaattcatccaaatcagaattaactgtacccttacggcaataatatttgaatttaaaaatatcatatttaaaagatttccgtgtgtagataaggccatcagattcacaatttatatttatacaattttaatcttaccaatgcaaaatttatttcaatttttattgtttcgttaaatgaacatttattggtcatccttcttccgtttaatattaataataattaatttcacattttaagccatcctgaaagctatgaagaagcgaagcgactgttggtctttgctggactgtttttcctgctaatgtgcgcatttgtactaatcaaattccaggttgaattagggaaatttttaagaagagaaaatcatcaaaaaatggttctgaaaataccgaaatagtggcgaaaaattttaaaaatattttcttctttgaagaaatcattaaaaccagtgctaaggactttttattcactttatgcaattaaaaaatgattaattttttattataagcgataaaaaaaattggttaaaaaattaattaaagtcaatgcgaaggactttcactttaaccaattcaaaacgattaatttaattttttaagcgataaaatttaatttaaaaaatgaattaaattgtattaaattatatacatttttaatttaaaatgcaattaaattttcttttggtggcattcgatgatgtctttcgctggtcaccagcagtttggctggtcggcgtaatcatttgtgctcttctgatgaatatgtctgtgcaaattaggcgatttgtgcaacgcataaaagaaaatcgccttcgggaaagggtgagggaaaattattttaagaaaatcatcgatttttaggggaaaaaaaaatttttaattatttataattaaaaagcgtaattatttattgaatgtgacataccgtatttcctaaaatagtgcctccgggggctctgtttttcaactcccctgaaaagggggattctattttagggggggggggggctctaatttaagggggaaggatgtattttaggaaatacggaattctttctattcaatttaaaaaataaa

SEQ ID NO: 51536 - DNA, 388 bp, Heterodera glycines
atgccaaaacaaaacgaaatcgttttaaaatattcctttctggacttgacttggtttcttgatatcgaagctgttttctacgctatttctaaaacggttataccaaaccccagatttttgaatccggttttcagaaaaaatgccttgtggtgaaaacaatatttcacatttcactccataactttgtgagttcggcacggatcgagaccgggataagaccattggaaagagcagctcgagctctacaagaaggtatggaaagaaaaaatagttatttctgggactttttcagaaatcagaattaattctccaatgtggcccaaattttaggcccccagccacagccccttgcttctcccagttttaagtcttggatttgtcaaataaa

SEQ ID NO: 51537 - DNA, 1353 bp, Heterodera glycines
atgaccaagcgtttgttgcctgaccagcaacagcagggcttccatccgcttcactcatcagtgccaatctacgcaaacgccaacctgcgcggagacttcaatatggagaagcttgtcaagctggaaagtgaactcaggaagggcactgaacgacaccaactgcttgtcaaaggcatcctggaaatgatcaagtcgagcagcactcacccgttggacaacgaattggcacacaacgcgctgacattgttgcttcgcctcgtttcattggatgggatggcgcaggagtttctgaatgtaagtctgtctaaatgcattttcattttgaacattcctttttaaggaggatggagtgaaggcactgctggagatgaagcgcaatccaatttcggcacaaatggtgacaaatggcacgacaacgcctccaacactgaacacattggcaacgcttattcttcgccagtgcatcgactcggacgccgcacttcttcagtcagccttcgaacaaatgatcaccgcaacttgcaatggccagccaatttcgatgcaggaaatcacttcgcgcccaatgagaacgaagcgttatcagaaggatgttaaggtttgttaattttcattcaaaatctgtaatgtaattcactcgctttcagagagttgtgcgcatgttggtccctttggcggtgcggtcgccctcactttacatggacgcggcgaagaaatgcttggccatcaaacaaaacgaaattctggtcaaagaacagcggggtgacgtcacaggcaatggaaatgcagcggcggcttcagaccaatttcttaaaacggttattttcattcgtagtgtcaatatgtaaatgtgcgttattcatattttagcttctgagtcaaatcgtgacggagttgacgcaatttgacacatttgcggacgcagacaaaaacactcgtcttatgcagcctccaaacctgctcaaattgattgccgaagtgcttcacagttatccaaagatggctgttccaattttcatcgagcaatccctgggcgaaaaatcggttcttcgctggatcgttgaacgtttccttctgtccgctcccgtcaacgatttgtccgacaccgtctactgggccaaagccgtggtcagcgagctcgtctcaaattcgtcaagtcagcgcatcaccgatcatgtcgtgggcaacatcaaatcacttctcatcgaatgtggcgactttgactgtacggttgtaacttccgatgagagcaacagcggtgcacatgcgaaatttgcggacaaagtgaccattttggcaaagctgacaatgcatttgagggagtgtttgcaggtgcgcgtaattaaatcgtaa

SEQ ID NO: 51538 - DNA, 186 bp, Heterodera glycines
atggagctgaagatgaaaagtgccggtgccaccaccagcagccccaaaaacagcatctccgtcatcaacaacgacagcggtgccgtcgccgctttcgctgccgcaacgccgccgacaaaaattgtcgctgccgccaaaccgtcaccgccgccaccgtcgcagcagcaacagcagcagtcgatccgc

SEQ ID NO: 51539 - DNA, 889 bp, Heterodera glycines
tgctcatgccgccggtggtctatcgttgagcggagcattgaatgagcaacttcctccgccgccaccactgcgacatcgcgcgtctctcaaccagcaacagcaaccaaagcagcgcaaactttcggcggaccaacgccgacattcagcgttggtggacggcactggcactgacaaacagcagaaaaagcagaggcgccaaactcacgggtgccgggatgagcagcagccgttattgatcagcaacgggcccaaaacgggggcaaataagaaacggaagcacgtggtatgtggtcgaaattaattggtattttcgtgccgtttaaagtgtgtctgttaaagaggaattagtcaaatctgaaaacacggcaagataattagcttttgtcactaaccaaaattttaatttggcttttacatttgggaccaaaatgctattttgtcacgaagctgcccctttttgttaaaactgtacgtgaaactgtccctgtttccctttgccaaaacgttttatacattaacaacaatcgcaaatttgttccaggaaaaggcatcgcgcacgggaagcaacgcgtcgacgacaagtggcggtggtggcggaagcggtgccggtctttacaacggtgtacgaaaatcggcagcggctgttagttcggacgaggcggggaattgtgtgtcggaggacgatgacgtcgacagccatgaagatgagaacgaatgtgttgtaaatggcagcgacgacggaggctggatgaataatcacgtcgaagatggtcagcagcagcagcagcaacaacatgaggaagatgacggagaggcgtcgcagagccaaattcaatcgaagggtccgtcgtccgattacctgcccttctcctccgttcttcatcactga

SEQ ID NO: 51540 - DNA, 653 bp, Heterodera glycines
tgtattcgcggagatggcaaaaatagctctgacaatgtgcaattttgtgacccaacctacagtaattatggcaaaatgctatttatgtaaaacaaaaatttatataataatttaaatttaagtggagcacaaaagggcacaacaaaggaaaacaaaacaattgaaaatggtgagactcttcgacattggagcgttgatgatgctgtgttttgctgttgtttttcttatagacaggtgctgcacaccgctgaacggtcctgtcagtgatgaagaacggaggagaagggcaggtaatcggacgacggacccttcgattgaatttggctctgcgacgcctctccgtcatcttcctcatgttgttgctgctgctgctgctgaccatcttcgacgtgattattcatccagcctccgtcgtcgctgccatttacaacacattcgttctcatcttcatggctgtcgacgtcatcgtcctccgacacacaattccccgcctcgtccgaactaacagccgctgccgattttcgtacaccgttgtaaagaccggcaccgcttccgccaccaccgccacttgtcgtcgacgcgttgcttcccgtgcgcgatgccttttcctggaacaaatttgcgattgttgttaatgtataaaacgttttggc

SEQ ID NO: 51541 - DNA, 6317 bp, Heterodera glycines
ctgctcagaattgaggtgcaggccttaaaaacaatttcatatttggcaatcagcaacccaaccactaaactaaccagttgtaatccgttttcggctgtgcgccagccccaacgtcgccgcctccgtacgcaccataataagcggtcgaatagtcgcccgggtactgtccatattggtggtgttgtccggcggcggccatcgcaccaacgccgcccgacattccgcctgcagacgcaccactcggcggatagttgccactcgcgaatgctgccacctgttgttggacggcctacaaacggagggaaggggggacacaagcgtgagtgtgcatgataagtgggcctgaccagaaataaacaaaaagatggtatggggaatggccaaacgaagttgatcgaaatgggataaggacatcggtatccgagtcaaaaacataacacaaatgactccttttttgtatcttcctaattcgtggtagaacttctcccaacccatcaacaaacaaaaaaaggaaaggaggcggttggacgttcattttacgccttcccttcctccatctctcatctttcttcccaatgtccaaagcttgcctggtggtaggggctatagtcagttgaatagtcagagtgctgtgaaaagagaaaaaatggagcagataaataaacgaatgagcatggaataatgatggcaaatgtaaaaacaaagaacagacaaagaattaagtgactaatttattgtcggaatggattttcaatatgagagaaaacaaaattggatattagtccaaaaagaaaaaaatgaaatatgcgagttatttattgaacaaaaaatatttgacacggcaaacgtaacagacctgcgcgtattgttgcgctgcggatggcatcaccggcccaactgcggcaccgccacgccctccgccaccgccgcccttaccaccgatgctttcgtaagtgacatggggtggaatcttcgctgacagtgacgggaaaagctccacgtaactgaattgaacgaatccaaggtgaaagacatataatataggtaaaaaatgaaatcatataaaagaacgttgaagtcataattttataaaaatcgaaatgtgactcaatttcatcaaatttttaacgaattgacgaaatttttatcaataaactggacgaagacttgcctattcactaaattaattttttgaaaaatctcgtcttgcgaactgtagggtcgacccccactctctttttaacatttaattggtgggcgtaaatgcacatgtctctttaccggtttccgatgcattcccggtctttgctcattgcctggcgcgcatctgccggtgtttggaattcgacaattccgtctccgcttgaacgaccgtccggcattgtgccgacctataaattgaaattaaagcaaaaattcgacattcacacaatcactacctgaatatccacgcaaacgagcggagaaaagaaacgttcaatgtcattggctgtcagacggaaaggaattccgcgcatgtaaagctaaaattaatatttgaaattaaaatatatagacgcagcactagaatgaattaaaaaccggtaaatagttccttttttactttggtcggtccagcgttgggatttgcattgtatccacctccatagccgccgtatccgtcatcgtaaccaccgccacccatggctgcagcagcagcagcagcaccaccgccacgtccagcaccgtaaccgcctcctcccgcaccaccggcgccgccgggctgtcgcggagtgccgtacccgtagttgggatagctcgggtaaggcgagtatcggtgagaggccggaccaccacccccagctgaatggattaatgagatgatgctgtttggtgagttgattcaacacaaacctccataaccgcctcgtcccatcggacgcccgccagcggcacgctgttcataaccagtcctgacaaatagtagaaaatttgtagtttaatggaattgtgttaaaataaatggaaacttgcccatatgcagccggaccatatccataagaggcgtacgggtcgccggtcgcctgggctaacgccttcagcggaacaatgttgttggtggcacgcgctttgaacgcttcaaaggcggcaccgtcgctcttgaacaactccaaatatctgtagaaaaagggaaagcattaattcaaatagcatccttttaaagatgaattcgtataaaattttatttgtggaatttgtaaatttgttgggggttttcagttgtcgtttttttccaccgcccaaccctccgccatttcctcctgtccatcctctctttccatcccgaccctcccgcattccgtttgtccaatgcgtccaccaccaattttgcaccatttgcaaccccccatccattctttgccaccaccaccacctcctattccaacctcctcgtcatgtgcgagtgagtggggtggtcaaccaaagagacacacacactcctccatcaatggacatctcatctcatcaattgggatgggtcgcgtttggggggttcacgtcacatcatcaacaacagagaatgaatggttggcggaattttcgggttaataaatttttatatattttttgaaaattttaaattttgtgaacgatgaaatcaccgacaaacagtcggcaaacaccgtacctgttccccatgtgttggttgttttgttgcaaagcgcgttctgcctcgtcggcagtgctgaatctgacaaacccctcgcccgtaggtcgcccctctagccccggttccttcccgaacaccacctcttccacggtcagccctgacagtacaacaatggtcatttttcattgtcatgggaaggtttaacaattgtattactacaccaaacacattatgaataaatatataaatttaattctcatgtcgagttttttggaaatggtaataaaacgccatacaatttttgttgaatttgtatcgatatttcgaagttttccaagactaacaaaagccatgcgcgttactaccatccattaagtgaaaatcaacactaattaaattaacaagaaatatttaatgcattaaacaactccctcccggccatttgtccaccaaaaccattggcccgcccgcccgttgcgcgtgccattcattcatccacattgataaacggtttgtgaacagacctcggaaaaactgctgcacctggtccttgttacagttgtagggcaagccacgaatgcgcacaaagcctttgctggacagcgttttcttcatctgagttgtaaagtttcaatttttataagcaaatataccaaacttttctgggaattttcaaaatgtaaatccctaaatcccccagttctcaattccaacctgcatgcgtctcattaactggtccatctcaacgtcgcccacttggaaaactgaattgttttttgattattgtttcgtttattcattaagaaccccgaaatgttggcatgttttgagtatggctcaacaaaccttcgatgtaccgactgcccatcgtctgtcggtctttttgttgtgccacagccgtcgattctctgtctccaaactgcacatagcattccccggtcggcttcccgtccacgctgctggtgaaatgcacgtcgtaaaccgtgaattctgaatcaaatgaattacttcctacatctgaagaaaaccacaaagtgacaaacctccaaaaaatttgcgcacgtcattttcgttggccgaatatggcaacccgcggcatcgcaaaaagcaacttgcatcggtctgcggactttgcggctgttgcgtagaaacgggcattggcgcgttgacctgaaaattgtttgcattctcatgataaatttgtaaattctaaaaagtccgaagggaaaacctgtgtttgtttttgaaaagaattattatacaggttcaagaaattttatttgatggggcgatataatttagaaatgccaatttaaacaaaagaaggtcaaggcgtaaaactggcacaattgattgtgaaaaaatcgttaaacgatgatagagttcaacctgtggttgaactggcgtgaaattctgctgctgctcgccagggtccccgctgtcgtcggcaccgataaccacgggctttgcctcgacgacctcaccgccgtcggcagcttcagcgccattggcattgcccccgttcaccgccgaagtggcgccaacagtcgatgacgccaaaaagctaccatcagttccattcatcattgttttgtcttacaataagtcttgttggaataaaacttcaaaatttgagctgaaatagcaaaaaataatgaggaaaattaagcgcgagtctcgacgtctttctgtgataaagtaattctaaaaacacgaaaagaaggaaaagaatcgacagaatgtgagcatggccgaccagcgaaaggaaaaagcgaaagcttgagagaaaagagaacggaggaggcagaggcaaaggcaatgtccaaatttttaatcgattagcgatgtgcagaaatgtgctcgtggcgcttttcttttttgtttgatggcactgtctaactctttaaagtttttctctgattctcattaaaattaaacaaaatgaaagaaatttgctttaagaagggaatcgttgtaaaaaaaatatattagagtaaattttgttttttcacaaaaataaatttttaaaaatataatttttctgtgttttgcacgctaataacaaacccatagggctgttgaataataggggtcaatggcaacttgacaaaaggcaactcgtattttacaaagtagagtaaaagcttaagcctaggcccaagcaagcctaagcggcctagcttaaagcttaggcctaagcctaggcctaacctaagcaatttgcctttgttcaacattgtacgagttgtcatgacacagaataataacaaattaatttgatcacttctgacaatgagaaaggctatgaaattacgtcgcattcaaagtctctttttttgttgccctttctttcattttcggcttttcccttcccaaatttgcgcttccttttctttttaatctcttcctttccccggaagtctgtgaaacaaaaaagttcatcatcaccaccaccataactcgcgtcattttcttttttgttttatgcatggcgcgggacgcagtcgcagcacaaagcgcggcagatcgaatcgattgtgcggatgagtgaatgaattgaatggatgaatgaaagctgccaccagcagagaatccctcttccaattccatcctttcttttctgccactgtcaaataaattttcttaattttttttattaccctttgccatttcatccattttttttttttgccttttgtatcataatctctgctgattcttctcattgtctgaagaacaattcgttttttcaaccatcacccaaatttggcattttgatccaaaaaaatatatctaataattgctttgcatacaattttatgaggatatacctaataggagaaaaaggggatatcgatgatttgatgaatttgtcgaggaggcaaggtcggatttgtgttggcctttccggaacgcctatttgcttagcttatccccattagctcgattgttggaacagttgtaacatacaatatttttggcaacataaaatgccaaaaccaaatgatgaatcgtttgatttgcatttgtgccaaaatttactccatttcaaataatttctgcaaagcgagtgatcagtgtgatcaaagcgagaacacagaaatggtaaataaatggatacaatgaggaaaagagcagcgagaaaagtcagagacgggcagacaaagtcacgtcgggaatgggtgggcagagattgtcgagaatgacttgggccgtcgagatcaatcggagcagagaaacagcaaaggaatccgatcaaaaagcgttgtctaaacacatccatcactaatcactcaccggggcttttcgaccggagaacggcggcgggggacgacgaggcaaactgcggccggacggacggtgttgagccaacaaaacctcgctcccgcccccgtacgccatcagcagcaattaaaaagccttccttccatcgccgcgaggtttgtccgtcccatggggacaaatgaatgaatgaataaatgtgcgacgaccgcggcggggggcgggggaattcaatcgccacacatattctatggactccgccaaatcgcttgctgcgagcagcgagactcccgtcgcgcccgcttcatcccccacccctcatttgatccccccctttcatcccaattaatcccgccgattttttgctcccccccttttttttttg

SEQ ID NO: 51542 - DNA, 900 bp, Heterodera glycines
atgatgaatggaactgatggtagctttttggcgtcatcgactgttggcgccacttcggcggtgaacgggggcaatgccaatggcgctgaagctgccgacggcggtgaggtcgtcgaggcaaagcccgtggttatcggtgccgacgacagcggggaccctggcgagcagcagcagaatttcacgccagttcaaccacaggttgaactctatcatcgtttaacgattttttcacaatcaattgtgccagttttacgccttgaccttcttttgtttaaattggcatttctaaattatatcgccccatcaaataaaatttcttgaacctgtataataattcttttcaaaaacaaacacaggttttcccttcggactttttagaatttacaaatttatcatgagaatgcaaacaattttcaggtcaacgcgccaatgcccgtttctacgcaacagccgcaaagtccgcagaccgatgcaagttgctttttgcgatgccgcgggttgccatattcggccaacgaaaatgacgtgcgcaaattttttggaggtttgtcactttgtggttttcttcagatgtaggaagtaattcatttgattcagaattcacggtttacgacgtgcatttcaccagcagcgtggacgggaagccgaccggggaatgctatgtgcagtttggagacagagaatcgacggctgtggcacaacaaaaagaccgacagacgatgggcagtcggtacatcgaaggtttgttgagccatactcaaaacatgccaacatttcggggttcttaatgaataaacgaaacaataatcaaaaaacaattcagttttccaagtgggcgacgttgagatggaccagttaatgagacgcatgcaggttggaattgagaactgggggatttag

SEQ ID NO: 51543 - DNA, 1106 bp, Heterodera glycines
atgataattctcttgggatccatcgtttgtctcgttccgttcaatctgtctcttctcatttgtcagaattgtctattgatcactctcataattctcgtgaacgccgggctcaccatccttatgctgttcgccaatccttttaccgaggccgaggccgtagggatggaaatgcgctggagactcgccgccgtcattgagcctttaaaccttggaaccccaccgatcggagccgaatttgccaattcttttttatttgtctttcacatctcttttgacgagggaccgtcttttcataaagggtcggggtgtgatatcatttggacttcattaattatttaatttattatgtttgttttggcgttccgtttattcaaattgaccttaaataatttgttttggttttaattagttcttatgattgtgaagtaaaaagttaattgtgtgattgatttattttcttctgtgcctaattctcgccggttttcaagtttgtttgaaattgtgtttgttttggttatttcgttgtctttaatttcgttttgcataaagcataattttattgttttcgatttattttgagacagggcaagtacctttgactgatcaacaaatttaaattgttcgaattgcttcctttgccttcgcttgccaatttggaaaataaagtagaagccaaattggccaatttgttttaactaaatttcccgtactcaaatgatccgattcatattcccaaatgtccaaacttgacaaattgctcaattatctttttttaattgcgataaatttcgaagatttttaatagaataataaaaaatcgaaaagggttgaaaaagcgatgattataatgatgaaaaaaacagttaatcgataaaactgacaatttttagcattcacattatctttgtcgattataaaatgaatagaataatagaaaaagcttaattaaaataccaagtttgaattaagaaatcctatataaaagaaaaaacaatgtattattaatgtttctcgtttttctcgtatctcgtgcctcgtattttattttcccttttgcaatatccctggtgtgtggataagtagtttagtttagaaaaaatcgtcaa

SEQ ID NO: 51544 - DNA, 919 bp, Heterodera glycines
atgaagaggtacaaaagtgatagaagaggtgtaacagtgattagaagaggtacaaatttgatgaagaggtacaaatgtgatttaaagaggtacaacagtgataaaagaagtacaaaagtgattagaagaggtaaaaaagtgattagaagaggtacaatggtgattagaagaggtacaaaagtgattagaagaggtacacatttgatgaagaggtacaaatgtgatttaaagaggtacaaaagtgatttaaagaggtacaaaagtgataaaagaggtacaaaagtgattagaagaggtacaccagtgattagaagaggtacaactatgattagaagaggtacaacagtgattagaagaggtacaacataaattcaaattaaaaattgtatgaattataaatttattaaatttaaaaataaatcctccatttattaattgaaaataacgttgaaaattaacccaaaaaatacaaagaaaaataatgtacaccgcccggcttcgaacttcgccccccccccaaaaaatgatgcctcagaatccccaatcacacagggattctgaggtcttgacgatgtcaaaagtaaaatctgatcacgtattcgtgatcagcgtcccaaataacccctaaagacatgtttttggaagatttttggtgaaaaatttttttcacttaaaaaccatatgctcccccctttggtcccgaatcccaaaatcacttttatttttgtatctttttttaaaaatgtgatagaaatgccaaataaaatttatataatagagcaaaaaattgcggattttttcagtatttaaaatttcaaaaacacctttacagaaccgagttctgaatttttttctgaaaaatcgaaaatttccagaatttctggaataactttttttgtttttgtgatataaatttcaa

SEQ ID NO: 51545 - DNA, 2353 bp, Heterodera glycines
  unsure (1)..(2353): unsure at all n locations
atgccaacaacaacaacaacaacaccatcagaaatagcaccgaattgtggtgacgaagtgcggccaaatgaggacggcggttggggcggcacatcgccgtcttcacaatgcgaaactcttgctgcagcgtcggatttgtctccgtcagaccatcagaaaaacaacgcaccgtcggagcagcaaccgaacataaagccaccgccgctgcatttcggcggtttgcccgtccttccgtgcggttcagaaacaaaatttggcggccttaccgccggcacacccgtgcgacgacatgcccccgcacaggcagaagcggagtttcagcacaacgcgacggaaaaactgctttcggagaatgctatggcgagtggttaccgtgacggaaaaacaccgcccctctcagctgaaattgatcaatcggtgggagagcaacagcccctgctaaaagccacgagggttgatcaacagcagcagagaaagtcctcgtcactgcctcccaacggcggcaccgtttgggcggccccttcggcaaatgctattccacaacactcgtctttctcaaccaatgccgaccatgacgacggtccattgttccggcccgaacttcgtcacgcctattcttggccacctctgaagggcactgtcattttggcaattgagcgcaagagctttgtgcagaaagtatgcgacctgttcaagcaggcgacagccgtcgcattgcccggaggcgcacgcgagttcaatctccgtgccgaattgttttggctgaagtcggccattaggcactccgtgtgtcgccttttgaattggcaggtgaggtgacgcacaaagagcacggcatgcctttctcggagaaatgccattccaaacttcatttattcgtgacaattctcccttactttttatccttctcattaatttccgtgcggatattttcttccaaataacaaaaagacagccaaaaataggaacacattaagtaacaaatgtttgtgttgttggtcacatagtgaaaaaaaggggggagattatttttgtttgttttttatttttgctcacataatttaaaaagggattcattcgcaatgctatttttggactaacggacggtatgtccgctctatccgtctcccctcctctcctctctccttcccctttactttcccaaggtctaagattcaatttccttaaaaaggctcggccagacaaatggtgaaaattttgtatgcacttgttacatggacggatttagaattagaattagcgtaaaaaaggatattgtggtttaggtgcataaaagggcataaaatagaaaaggaagaaacagaaagagagagagagagagagagacggggattactgtagcaattggatttaaatgagaaaaggcaacaattcgaagtgcagcagagacagttagacggcacagcatactgtagcaaaaggacagacagcgcaaaatttgttaaataattttaagcaaaatgactttttggtttttgttctaacattgtgcattttaaaaataaatgtttcattagaatacctcatgtttggacgacttcgaccgcataaaaacgctcgggacgggctcatttggccgagtgatgctggtcaagcacaaacaatccggcatttactttgccatgaaaattttggacaaacaanaagtggtcaaactgaagcaggtcggtttattatgaccagcaaatgaccgattgtttcgtttcaattgcctttaggtcgaacacacactgaacgaaaagcggattttgcaggccatcgactttcccttcctcgtcaatatgcaatattcctttaaagtgtgtctttttcggtgtttttcgttttaaatttaattttaatttcaaatttctatttctccccttctctttaggacaacagcaatttgtacatggttttggagttcatcagcggtggcgaaatgttctcccatttgcgacgcattggtcgtttctctgagccacactcgcgcttttatgcggcacaaattgtgctggcgtttgagtatttgcactcattggacctcatctaccgggacttgaagccggagaatttgctgatcgatagcaacggatatttgaaggcatgcaaaagcccgaggggggaagatggagtttggcactctttttgcaagaatgccatgccattaaaattggactctcaatttgcatatgacattccgaaattggcatcactttttccgcagattaccgacttcggattcgcaaaacgggtcaaaggtcggacatggacactttgcggtacgccagaatatttggcgcccgaaatcattcttagcaaggcgtgttttttggatgagcaaatttactga

SEQ ID NO: 51546 - DNA, 296 bp, Heterodera glycines
atgtatgttaaaagtatcatgtaaactgcacaagtaccggtttcctatataaatgcttttttgagagttgagtcagaagtccgccgacggttcattaatgggatttttagcgatttgggaaaatttattttcaaaaagaaacccaaaattcacaaaccatcaaacacactgcccggatcatgttcatctccaacaagcatgggaaaaagacgtcgatacttcataaattcaacggccgaatgtgaccaattgcgcctaaacaattcaattttattaaaaaatgggaaaccaataaa

SEQ ID NO: 51547 - DNA, 1313 bp, Heterodera glycines
atgaacagccaattgctcttggccatccgacggattggcactgtcaccaggaggaaattcgaggaaaatgtcgtcatcgaacgtgacgaagctaaggatggacaccgttacgggcactgtttgttgctccaatttacaattttatgccgcaagagacgaaaagggacgaaaaacggtggagaaagtgaaaacattgtggtcgattatggaaaatagaaaatatgatgatttaaaagcaactcaaatttagttgcttttatatgatagtaaagactcgtaatccgccgaatgactttgttcggcaacggattttgtgggattgcaaagcttatcctccgtttcacctaaaatttgcatttctttgctgttaaaccatcgctttttcattcgaattagaattggtgtccaacgtctgtttacgcattttgaactattcgtacacccaactattaaagcggcgactgatcagtgcaattccgatgccaagctgaaaaggcggaagagaagaaaatcgaacattttgagtcaaaaatcggcagagattaagctgaaaaaaacaatgattaaccattgtgatgtttttccctcttagtataaaaatgctttttccgctgccatttttcattcacgttgcagttttgttttttttttggattcagtgtcggcacatttcaagacccttccattgtttcatttatatgtgcttaaattcgacttttgtttttaaattagtcaaaaaacctttcaattttttgtttcagaaaagcttttgctaaccctgctttttacacctctgaattccaaaaaaaaaaaaaaagtttttcattatgcatttttgcttctgtacatatttcgttttcttaaattgtttcaactgctttccctttcccgttttctctctcgcaataatctctttaacgaattgcccttttcttattgtatttttttgtaatatttaataaatttttgactttcttcagcaagcactctgtcggttttacgaattgttttttgatttttttcttttctaagtttttttattttaggccagtttgccatgccgttggttgtgtttggtggcactcaaaaatgggttgctggtagcgcagggacgtcttcatttttggaaaacggtggataatttttaaagcacattaaaattttgcaaaataacggcatttttttctaaaaatggcatttttatcagaaaaccatgacagaaataccttgaattaaaagtcgaaaaattgacctgaaagttcattaaataactgaaaataacaatgtgttactcaaagaatccaaattgtcga

SEQ ID NO: 51548 - DNA, 67 bp, Heterodera glycines
tgatggtgagcgtgcttctgcacttcttgctcagtcacttctttggcgacgaatgataatttcttag

SEQ ID NO: 51549 - DNA, 2060 bp, Heterodera glycines
atgcctgaggaagggtacgagaaagctgagaatcagagcaaaatcgcagtgaggtattttgaatggttggcgcaacgcaaaggggtgaaagttcgacatgcctgcaacggcggggaggttgaatttggcgggctgaaggtggactgtgtgattggggcagagaaaaaaataattgagtttcaggtaaaagaaaaaatattttctttttaaacaatacttaaggggtgtgcatttcacgggtgtccgagatgttttttaccttggacgatagcgccaaacggacggacaatggaagagaatcaaagtagaaccgaaattcgcatggaaattttgagggaaaagtgcaaaaatttttcaatcggagaagtttgggtagaataaaacatttagaaatatttattaattgttagttttaggagtgtgatgtcagagcggaattgaagaagaataaggagatgaaaaagttctttgaaagtgtgccggacaagggaccaatcaatccgagggatgcttatgccgggggaagaacgatgccattttgtttgtacgcaaaggctaccgaagaaattgagatatcaatgtttgatatcattagtttgtatccctttgttaattatggtaaaaatctgcttaatttttgttaaagtttcctttcgcttaagacactccataccccgttggagtcccgaaaattgtagtgagcaggaattttaatgtgaattggacagtgcccgacgatattccttatgatggactgctgaaagtgaaggtcgtccccccgaaaaatcttttgtaccccctcctccccgtgcacatcgatgatatgctcctcttccccaattgttgggcttgtgcaaaaagggccaagaatgagtttgtgatgacaaaagatgtaaagaaatgtaaccaccgtccagcgcagagagcatttttgggaacgttcacttcgattgaactacggaaggctttagagctgggatatcgggtcataggcttctatcgggcctatcattttgagcagtttgacagtcaactgttcaaaggatatgtgcggatgtttttgaagataaaggttgaggcgtcggggtggccggcggaggtgaagagtgaggaggaaaagagagcattcatcgcaatgtataaggcaaagtataacatcagtttggattatgataagattggactcaatcccgggttaagaatgattgcgaaattggtgagaaattattttaaaaaatcgaaaaattgtttaatttaagggattaaacagtttatggggcaaattttcgatgcgcaataccctttcaaatacggaaattgtgggcagcatggaacgttggatggaattggggagagacaatacaattgagtttgggcgcccagtaaaaataagcgaagagatatcaagagtcgtgtaccggaaaaaggaggagttcatcagggagcataaagtgtcgaatattgttttgtcattgtggaccacgagtgctgcgaggctaaagctgtacgagtacatggagcaggtctacaagaaggaggggtgtaaactgctctattgtgacacaggtgaaaaggaataaaaagaaaataaacaccaaaaatttagattctctagcttttgctcatcggaaggggcgctgtccgttggtggaggggaaatttttggggtaaaacataatttttgaaaaattttctataaacatttgtttagtgagatgactcgagagtatgctgacagcgaaattttggagtttgtgtccgcgggtccgaagcagtacgccttgaaacttagaagaaagaaggatggtgtgatttggcacaaaaccaaaatcagagggatgacattggatagacgaaacgaatttaaatatgatttgttcaaagagatggtgctggattacaagaaaggggtcaaaaaagtttttcactacccggagaagattgggccgacaaacgacttccgggttctctcaaaagatgtacaaaaagaatatacgccggtgcagaaaaaaggaattattgacgatcactttaatgttttgccctttggatattattaa

SEQ ID NO: 51550 - DNA, 456 bp, Heterodera glycines
atgaattctgaaaaatcagaaaaagctaattccatattattggaagctgcaaaaaaagagacagaaagagcatggcgggatgtagctgcgctaacggatgaagtaagcgattttgccaaatcttctcgcgaaacacttaatcgtggaataaaatctagagaaaaggctccttacgctaatggtattcgagaattatatcttaaaatgtccgattcaatttgggaaatcttcacaatcctggacaaaatcaatttggagtcagaaaaagccgaatctacgtggcgtgatttcgagagatacaaaacttttgaccaggcaacaaagctcgaggaacaatcgcaaaattcattaacggaagcccgaagattacatttcgagtcccggagggtgcagagccaaatgttaaattatgaaaataggctccaaacaattgtttgggagcatatgggtatataa

SEQ ID NO: 51551 - DNA, 1106 bp, Heterodera glycines
atgctcaaaacgggcaccaagaatcgtttcccgccatcaatcattgacgaaatccctggcgttctgtccgaccggcgcacactgttgggcgagttgaattggattttcaccgccatcaccgacgcaattgcgtggtgccgtctgccgcgcagcaccttccaaaagctgttcagacaggtgaaaaggaccaattttttgtcaattttttaatttattcgtctgtccttatccataaaaaacaattttgttataaacttttgtggaacggtcccctaattttgggaggtgcattctgacaaggcacagtttttctacaaggttgactaatttttgaaaaaagccaaaacatttttgagtgcgggatgatcagcaaaaaaaaattttttttttcatttaaataacaatttttaatgctccaatcgtgtcccgacgcggtccagacatttgcggcccgacttttacggccagacattttgcgcttactatgtcaaaaatcgtgctcaaaattaagtttttcaaaccctgaaagcctaaacagcattaaataagtgatagaaagtgattgtgtctgatagtttgatagccaataaatttttttaaaagatcattaattattcaaacaacataattaatgcttctaataaactagaaaactaagatttcttcatttcatgccgtttaggctattatggatggaaaaaattcaatttagaatccgatttttgacatagccgcaaatgtaggggcttcgatgcaataggaaatttaaaaaatgtgaaaatcaacggacttttctaaaaccatttttttaaatgtttcaatattattttggataatttattgagatttaaaaacattcgcgacggaaaagtggccggcttgaagtggaggggtaaagaaaatgaactgcttccgggcaacgttgcttatgacaatcagcagatcatcatcccgcttttgtgcccttccaggacctgttgatcgcctccctgttccgtgcctttttgctgtcggaacgtatcatgcgcgagaacgggtgccatgtggtgtccacgccgcagttgcccagagtgcatgaccatccattgtgggagtactgggacctg

SEQ ID NO: 51552 - DNA, 634 bp, Heterodera glycines
atgccgagtttgtccatggtttttgtgagttttttttaacatttcaaataaaaaaataaaataaaacttttaaggaaattatcattctggggctgcatttggccatcattttttgtgccattcttggcatttacttggacatgggcattgaggacaatgtgttcatcatcagtagtgccgttttgtgtgttgtgatctgtcagctgaaagcatatttttacaagaaaaagggcgttaaatcatcgtgcgcagtaaaaaaaactaaacaaattaatgtttaattaattatttttaatttaaggacatgctcgtgttgctgttgcatttggtcgtcttttttgtcgcaattcttggcatttatattgacatgcaaactgaggacaatgccatcatcatcggtggtgccgttttgtcgctggtcatctgtcagttgcaaaattattctgccgccaagaaaaaggagaacccgaatgccggaaaagtaaaattatattaaaaaattttaaataaatataatgattttttttattttagatttcgatctttgttcttttcggacgttgatcgatgcgggcattatcattgataaacaaaacatacatttcattataattcaacttgctattattaacaa

SEQ ID NO: 51553 - DNA, 791 bp, Heterodera glycines
ataaagtgcattagagccgtaaatgcgatggagaggaacaattcattttgacgacccctcctctttagacactttccgttgccgtggacacgtccatttccctttgggagggcgtcgacacgggcgccgccgaactgccgaccgaacaacagaaccacggtagaagaacaggcaaatggaagaagttcaaacgggacagccgtcgacatcagaagcataagcaaagccatccatggaaaaagccctttaaaagggggcagaaaattttcaaaaacgaagccaaagcagtggacgggaaaaacgaacaaacgcagaaacggcagtggaaaatgataccaccggaaaagtttgtgccacgcaaacttatgacgccaaactatgcaaagacaaaacttttggatgtggagattaacgcggatgaaatgagcgaagaacaactcgcaaacgaacttgccgaagcacttggagagaaagtcccggtgagagggggggggggagattcaaaagatttagtaaatacaaaattagtaatattgttttatttaaaaatggagcatatcgccacttttgtaggaattgatgcaaaaagtggtgcattttgctggaaaatcacatgccgtggaactgttcaagcaatgccaagaagttgagcggaacggcggaatgttgacacaaaaccgcttaaggagaagaacgcccgggggcgtgtttatgaaactgttcaacgaaagcaaagaaatcagcgaagagaataaggcacatttaatataattttccattattcaaataaa

SEQ ID NO: 51554 - DNA, 402 bp, Heterodera glycines
atgcaaaagaaaaggcgaaagaagcagaaaaagaagcatcactcggaaaaggagttggagaaaagagtggcaaatggacaaaaaggagagaacgaaggcagaaaagaagaaaacgaaggcagaaaggaagaaaacgaaggcagaaaagaagaggagtttaaaatggcaaagggaacggaggaggaggaggaggaagagagacgaagtggcacttactcatcctcgggggaggaggtgtatctgaacgaacgggaggaggaggaactgctgatggtcatggagcaggggctggacagaaggctgggcaaagagaggggccaagtcggggaggggaaggacaagcagcagcagcagaacggtgacaaggagcacaaggaggaggaggaggaacagaagcagcag

SEQ ID NO: 51555 - DNA, 786 bp, Heterodera glycines
atgtcaggcgtggccgaggccgaggccgtggcattggaattggctttctgtcgcctgtgcgcggctccggcaacattttcagcgaggacggggaagaacggaaacgcaaaagccgccgtcgctcttcgcgctccgtttcttcggagacggccaaacggtcgcgcaagtcgatgtcagtgttgtcgcgttcgcgctcagcaagtttagaagaggaaaagaacaggcagcagcagaggggaagaaattcggacagttcagagtgagtgtttgtttcggctgaaaagtgccaatccatggcattggcatttccccctcacttttatggccaattctccccccaggcgttcttctcgctccttctcctccgcttcctctcgcttccgccgttcccattcgcgctccgtcgcagcggaaaaaagtcgcaaaggacaaaagagcagaaaagggacggacggcccccaatcgccagatgacagagagtccgttgagctcagaacgtttgccactgatatggaaatgagagaagccatggggaagagagagaacgagcgagaaggggaaaaggcaaacgaagcgaaggagcagcgggaacggcacgaacagacgaaaagctacgggcaccgtcgacgctattcccatcggcacgggtgccgctcgtgctgccaccgacagagtcggaaaagccggtgccatcgtcgccatcggcagaaacgggcaaagcaaagtttgcgagaggaagaagagagtgccagaaagggtgagaaaatgccaaaaaacaaaagatga

SEQ ID NO: 51556 - DNA, 198 bp, Heterodera glycines
atgagtgtaaacgtaaaacaaaagaagacggcgccgaaaagagacgtttcgtcgtcgccgagccaatcgtcgacgagcgactcgagcgaagcttccaacgaatcagtggacgaagcgaaggaagaaacgacgccagccaatgacaaagtactgacgaagtattccatggcagctgaaattgtgaataccgtcctcaaa

SEQ ID NO: 51557 - DNA, 1695 bp, Heterodera glycines
  unsure (1)..(1695): unsure at all n locations
agacagaggaaaagtgcggaaaggaagaacagcgacaggaagacgaagaagtgccattgcccgagttggacaacagcggagtgcagactgacaaaaccggggatttgcaactttctatgggcgacctgagcaagcaagtggcggaagaggaaattgaacgtgccaacgagagccgagaatcggccatggcagcgttcagcgaaggtggcaatcatttgaggaatttactgggctcaaggagaaaacaatttttaaggcaattaccaatctgcctttgaccttcttaccaaggccattgagctgaatcctggttccgccattttgcacgccaaaagagccaagtttgttaatttaacgaacactgacacaacattgggttcaaaagcaaggatgaacagaggatttcgtccttggatataccaccctcccacctcatcaaccgaactatctttttttggctctgcggcaagcaattttttctagttttcgaaaggaaaaataacaaaaatatttgaaaataagaaaaaaaacactagaaaataatctcgaagtgtcgaggtgagcgaggacgttgaaggtcgatttaacattctcccccaacttttttcccttaaaaattatattaggatgggagtcatcgacgatcctgaattaggattttcaaggcttaattacccattggaagtctttttttgccaacttcggttttttttttgccttaagaaatttacccccttggggtacccgttccacccaagaatctgctaaatttagcactctcctcaaaatgtcaatgatgaaggcagccatccaagactgtgacaaagcaattgctatcaatcctgactccgctcagccttacaaattccgtggacgcgctaatcagtatcggaaaaatattaacgaatttaaggagtgaattaaacaactcaatttttagactgttgggtaattggacggaggcacaccatgattttgctacttcttgcaaatgtattgaataattcacttttttctcagttttgccttttagtggattatgatgacgtggcctatgggtggatgaaagaagttgagccgaatgtaagcagccacttgcgtgacttcacaaatgttctgttgcgtaggccaaaaagctgcaggagtacgaacgcgctaaacaaaggcgtgccgaagagaaagagcagcgcgaacgactcgaacgcgtgcgtcgagcgcaagaggcgaaccgaaaggcgaaggaaagcgccgctgattcgggggaaggcggggctcattttggaatgggacccttcacggaaatgtttaaggcaagtttccatgtcattcattgttcactattgatttaaggagttgtcggatgaccccgaattgttaagtgccatcaaaagcgacccttcgctgattcaggcagtttaattcgatagtaaatttcaagtaatttctattttatttaagaaacttatggagattatgcagaacccagccaatatgatgaagcatatgaacgaccncaatgttcagaaggtccttgagaaactcggctctaaattaggctcagcgtcgccatttgccaacgaaacgggacgcgactcaacaccctttggaacagcgactgagggaacaccgcaacagaagagtactgctgataaaggacccgaggcaccgaagaaagcgccggagccggaacttgac

SEQ ID NO: 51558 - DNA, 441 bp, Heterodera glycines
atgtatataaaacttctttttgctcaaaaggtaacatttttaccctatttttaaaaataaacttctaatatttatttttacagatagaaatatacctatttatagcagctgcggtggataagaattttctggaagaaccggacgaaaaatttggaccaaccggtaattacaaaagaaaaaataaatacgatttttttaaaataaaaaattgaatttttttttctttattttgtcttttgttatgtattttgtctagagaccggacaagagggtcggtaggtcggtttcggtataaaaaccgaaaaaaaccgaaaaactcaaaaattagtcggtcggtcggttaaaaaaccgaaccgaaaaaaaccgaagaaaaattttcggtataccgtttcggtttcggtttttttgaatttttttatcttttcccaaaaaaataataaa

SEQ ID NO: 51559 - DNA, 436 bp, Heterodera glycines
atgaaaagtctacttttgaaactttttgttggcctctgcttcattgactttacgtcaaatataaagtcaaaatttgaggactttcttgaaaatcaagaagcaatgaagttgatccaaaattaccaagaaaagcgaatcaaaactattaaagaattacatgctgaactaacaaaaaaagggattaaattggcagaacgtagtttgaggctatatctttgtaaaattaagagtgccaattctgatacatcaaaagaaagtccaaacataccagaaataaaatttgaaaagtgtctttcccgtgatctaacatatactatttatttaatcggaaatggaagcaattggcgaaaataccgaataatgaatgaaaacaatgcagatatatatatcgcgtgttcaaaacattccgtaaaagactaacattaatttttataaa

SEQ ID NO: 51560 - DNA, 448 bp, Heterodera glycines
atgaagtgccacgccttccatgctcattttgacagattttgcgacgaaaaattcacaaaagagtacgtccggtcggattgtaacgattgttttggctctgattgcaacaaggaccaactgaaattgtcaattggtagcaaaggtaaggaaggaaaaagagcaacaatgttaacgctaattatgccaattaaataatttgataattggtaacgaaatgtttgtccccaaacatgaactgctagggcagccttcatcagctgatagagcattggaaagccagagatgccggctcaaagcggggacgggacaaaatctcgccgccgaaattttaaaaaaaatttcaaacagaaatttctcaagaaaaaaaccttagaaaattttttataagaaaatttcagaaagaaaaatattttaaaaatttacagcgatttttttttgaacttttgta

SEQ ID NO: 51561 - DNA, 1237 bp, Heterodera glycines
caattgggtcaattaaattaccaaaaatattttttaacaattatctaatagcattgaattgctttcagatacgaaaagcgcaacggaggaaagagcgccttctcaggtcgaacaattaaatatttaattaaccaattaattagtggccaattgctttttgtttaagagagaagagagcgagagaagcagagcgtcagacggacagcaattcgacttcgattatgctggtgggagattggaaacaagcaataattttaccatgctgatctgtgatcgcattggttttatgttcactgattggtccgctgagtttggacttttcttagtgatttggccatttaaagccattgattaatcacccattcactgattgtgatcatttttgtttgtcctctttgccaggtcatcatcgtgtccatcttcctcatcgtcaatttgcccaccgctctgttcatggccatgctttgcgtctgtctcccccctccccctaaattcccgtgccacccctttaggtgtacaacactttggggctgagtaaccgctttttggaaggtgttttcccggtcaccttcctcctcgtcaacaacatgctcgtcatggtctgtctcttggctttgttcccccccccctcattaattgccaaatttgtctttgccaggccacttatccgatcaatttcggcatttactgcttcatgtccagttcctttcgtgacaccttttggatgttgttctgtcgtcgaaagagttgcaccgaaggcgaccgaattgacagcaaaagaatgccatcgctggggggaggaggcgtctccgagatgaacaacaactccaccgccacgagtgctctctcaacggtcctccgccgttccaccgacccatcggtggacaaacagcacaaaacgccggtggccaatcacttcggccaatccgctcgtcctcaaagcatcggttcggccttttcccttctgtcggagcctttgcttggcccaccgccgcaactgaacgcaattccgccgaccaatggaccggcgaaaatgaggaaaagcggaccaacaaaaaggacggaggagcagcggaacatttgggagggaggggaaaatggaaaagggggaaaaaagtgcaaagcgatctctcccacagagacaatcattggggagacgatatttctgtgatttaagagaagaaaaagtataaatatatatggaaaacgaaacgaaacaataaatatggtaaaaagt

SEQ ID NO: 51562 - DNA, 627 bp, Heterodera glycines
atggatttattggtttttattaccaaatttgccacctttttccatttgattgtttctttgcccatttatttgtcggttttggcatttttgttgcgtcaaaggcatcgtccgcagttcacttcctcattttatatgctttttattgcgcttggctttgtggatttaaggtaagaaagctttaaaataatttaaattggaaagaatttttgattttctcacaaaagtgcccataatttaaaatattttccaaaaaaaattcgccgtctttcatttttgttacatttttcattaaaaaatttccaaaaaattgccaaaaaaggacccctgattctcatttttctcatcatattggatattgggactataaattcgattcagaccgtttttgaaggatttggagttttgaagctaacaaataagatgaacatttatttaattaatttatttttgtttttattccattttagcaaatttttgttgtaccttatcaagaaatgcgcttattggggttatgttccggctatattttacccgttgaaccaagcaaacagcgcagcgaatttaatttacttttcgctatgggcattgtgtttaatccaacttcaggcatttttaattttaaaataa

SEQ ID NO: 51563 - DNA, 632 bp, Heterodera glycines
atgtcattgaaccgtttttgtgccatttgttgttcccaaatgtatcggcgccattggtcacaaataattagcaaatatttattggccattattcttttgttcgctttggcaatttctgcaccaattctttggcattctgtgtgctttcggttgtctgaagtgagaacaccgcttgggcaaggacagcacaaaatggacggccccgtgttcatggaaattccaacacaagtaaaaaatagaggagcacaaaataaagaaaatttattttaaaaattgaataaattattttgaacaaagattttccgatttttttttaccttattggcatattgggtgcttttgccattcttagtagaggtcggcattttcaaactgcaggcctcgtgctcgggcttaaatgttttttgaatggttgcccgacggacatgtgttttttcaaaattctggaaagatgattataaaaaattatataatcttctatttgcttgtggttataatttgaaatgacgtacgattccatatccataaaagctttaatttttagccttaaaatagcttcggagctaaagttgatcagagtgatcagacacaataacataatcagacagtcagaaaataagaaataatgtaca

SEQ ID NO: 51564 - DNA, 271 bp, Heterodera glycines
ttggccaaattgttgcggatgttgtgcaaaatgttgttcaaactgacgctgctgcaacacctgccgtacaacatggacaacaacaacaaccgcaagcagttgttgaacttgctgctgatgaaccaccgccaaatggacgacctgctcatgacgaggagaagacgcccatgacaaccagcacaagcacaacggtgttggtagtgaacaacgacgagaatgatgctgatgcacaggcgggctttttttttgaaaaattcgaattcaatttgag

SEQ ID NO: 51565 - DNA, 1270 bp, Heterodera glycines
atgggtcaaaagcactcatataatttgaatcgtgccaaagccacccgacaatcgacgcagattatccaggacgaggtgggttcgaccaaatttgacaggtggaaaatccttcgaaatttaatggaaattagtgccttattttatcaaggaatccttgaaaaacaaaaatttcctcattttgggtcattctcaaggacgtacttgagaaaatagtcattcattctataaggattttgaaaccggcacatccccccataatgtcttatcttcgtatttggctcagaaaaaggcttatttatcaagggtgtccctgaaaacaaactttcctcgttctaaaataaaccttccttatttcatggtactccttctcaaggacgtccttgaaaagtcggtcattttctttaagaattttaaaattggcacatctctataatctcttctctcctaattatttggctttacatatatgttttttttgtgccagattgcttccactgctgagccaacacatccgtctgagcctgtgccactcggtgtgcgcaccagtttggatggaagtgactatgtgcgacgggaagtagaacgacaggaacaacaagaaaaattggcaaaatgccaagaaaatgggacgagtggccaaggaaagggggaggaagtgccgctggaaagcaaagcaaatgccgtagaaggaagtcaaactgtagctgaaccagttgaagaagatgtgccaaaatgcaatgtcgttgtgctaaaatgcgaagaaaatgccatggaaagccaaaccggtgaagacgaagtgccaaaatgccaaaaaaatgccctggaaaatcgaagcgaatcagtaactgaaccatttgctgataccattccgagccctcaagcaaatgtacacgaagttgaagctgtacctgaatttgctaatgatgcattgaaaagcgaagaaagtgccatcgatgttcaagaaacggggaaagcggaagttgaagctgtacaagaagttccaacaattaatcagctggtggaagaatgtgttgctggcacaaaggatgtactgcttgaagttcaagccgttggtttgctgatccatgagaatgaggaacattcggcacaaagccaaactgatggcggagaagtgccaaaaagtggtggggaagaaaatggcaaaacggagcaaacgggaaaagctgccagagaggagagatgggaaagcattgatcaagttttggaagacaaaacgggtgcttcagcagatgttccggaagaggagatg

SEQ ID NO: 51566 - DNA, 193 bp, Heterodera glycines
atggcatttgcttatacgtataaaatatggcacattaggcggtcatactcagtgccaatctatgcacttccttctggcaaacaaaggcagcagcaacaggcgcaggacgacgacgacaatgacaatgagcagcagcgtggtcgaccaccgcttccgccatgtccccttccgggtttctgtcgcgacgggcatg

SEQ ID NO: 51567 - DNA, 95 bp, Heterodera glycines
atggcacagtaagccaaaagaaaaataataattatttttaatttattttcagttttatttggcatacaaaaatgccaaagcaagttgggcactga

SEQ ID NO: 51568 - DNA, 172 bp, Heterodera glycines
atggccactttcggtatggcgcttctcaccattttaattggaattggggtattaaaaataattaaattaaaattaattattaactttttaaatatttttttaattttagttgagtgcatcatcagttcgtgctgatgacaacaaaacaaaactgaaaatggaggagacataa

SEQ ID NO: 51569 - DNA, 741 bp, Heterodera glycines
atgacaaagtggtgcaaagtgagactggcccattgaatatttcctgtcacgtgagttgtaatataaaaaaaattttattttcctattttttcatttatttttggatttttattttctatttttgtaacttttttttgttcatttattctcaacagaaacgggaaggcagcgcggaaagcttctggtattactggaagcaaaaagacgctgagccgatgcgcattgaagaaatgcattgtgtgaaatgtgatccagaaaaggacaaacgctgtaaatatataccccaatgacaagatttaattggttcgcgcaattcgctgaaatgaatgtgttctttataataagccatcccgaaaattcccggctgaaaattttttcttttaatttttcgggtgtttgtaaatttgtgtacatatacatatagcaaaagggcgtagttctaacaacaagttttaaaaacgaattttcaagtttcctgacggtgcctatttcgcgtattccgcaaatttatgttgctacgtcattcttggcacaccccaattccttgggataatcaaaaatgggaaaactttatatcataagttcgttccttaatctattttaataatttgttgtattccgtacatctttttcataaatttgttttttatttataaatgctatttatttccctttgcgatatcacaattttctatttaataaggctgcgattattaagaaagaaaacccttaaataataaa

SEQ ID NO: 51570 - DNA, 304 bp, Heterodera glycines
aaaattccctcaaaaataaaaggtctattgcgcaccgccctccctatcatgctcgagagcatttgtatgtgtataaaatttatcaaaaaaagagatagccatttttctgggataacctctaaatataaaaatcctctgtgaaataaaatggcgattgtgcacagccctccgtctcatacgcaagcgcttttgtgaggtataaaatttctcaaaaaaagagatagccatttttctgggatagagtataaatttaaaaattccctcaaaaataaaaggtctattgcgcaccgccctccctatcatg

SEQ ID NO: 51571 - DNA, 304 bp, Heterodera glycines; identical to SEQ ID NO: 51570

SEQ ID NO: 51572 - DNA, 1458 bp, Heterodera glycines
atgaagtggggctgttcaaccattgccggcaattgtgattttgttaatgccaagaatgatgaaatggtatgtgagagctttataaaattttaaaaaatttctaattttgcgtgaatattttcaaaaattaatgaattttggtgtttggtgttgctaaaagacgcgcagtcggggatttttttttttggcatttttgtcattcgtagagaattttgataaacacaaatttattttaatttttccttttattttttaaatttgactcgggctttttccttaaaaaatcatattttacttgcaattaggggattatgattaccatgatcaattttaaggacaaatgcctgtgtccttttggtgagaaggacgttgacttctccaacgaaaatctcacaattgaaatcccggctgtaatgaccactccgaccctgacaactctgaccacgaaggaaacgacgacaaccactaccactaccaccacaaccacgacagttaccacggaggagccaacgaagcctaagacaactgcaacattggtggaattggctcaatcaaccattaatgagggtgcaattagattacctaattatttgtttaaaagaatatgtaaattacaggaaatggtgttcgcgtcagcaatggtgtgcattgctatttgaaaatcattggtgaattaatattttttattgattaatattttatttttgctaattaggcattctttgtgccgtccaagcgctaattgttgctgctaaacaattcagtgctttgtgaaatatgatgatgaatgatgaaaaggagattaaaataatatgatttcacaaatatttatttttcataatattattgggactatgttaactaaaaattatattcacctattaatcaatcaatctagataaaaacattttcctctttaaacaaacgatcactttaaagaactccaattatttacataaaaaatggggacccaacacttcgagatgctgttatgactagagaccgactaaaaaggcaccaaaaatcgcgaaaaaggcactttaataggcacaaaaaaatcgaaaaaaggcatcaaaaggtacgaaaatcccgaaaaaggcatgaaaaaaggcatttaaaatttttttaaaaggatttttagggagcaaaacacgtaaaacctaatcaaaaaaaattcatttttggtcatttaaatgattattaaaatattttagagctttttcggataaggaaaattttaaaccatgaatttttatcaaaaaaagaaatcttattttggagatgaatttttgagaaatttttcatttcgtaagggtgtatttttgaaaaaaaaaaatcaattcttaggggtgtatttttctgaatttttttcaggtcttcttttttaggggtgtattttaccgattttattgcatttttaatggattttttcggaaaaaacgccaaaaaaggcaccta

SEQ ID NO: 51573 - DNA, 725 bp, Heterodera glycines
ttatgcggacaaaaacaggttgccagactataccgacccccaaactataacgaccagactataacggccagactacaccggccagactacaccggccagactataacggccagactataacggccagactacaccggccagactacaccggccagactacaccggccagactacaccggccagactacaccggcgagactacaccggccagactacaacggccagactacaccggccagactacaccggccagactacaccggccagactacaccggccagactataacggccagactacaccggccagactataacggccagactacaccggccagactataacggccagactacaccggccagactacaccggccagaatataacggccagactacaccggccagactataacggccagactacaccggccagactacaccggccagactacaccggccagactacaccggccagactacaccggccagactacaccggccagactataacggccagactacaccggccagactataacggccagactacaccggccagactacaccggccagactacaccggccagactacaccggccagaatataacggccagactacaccggccagactataacggccagactacaccggccagactataacggccagactacaccggccagactacaccggccagactataacggccagactacaccgg

SEQ ID NO: 51574 - DNA, 1847 bp, Heterodera glycines
ggcattcccatccgtccgcacttttccatctctctgcaaaatgccaaagaatcgttggagatcagctgtttgccgggcacaagccaaattcgactgcgtgcaactgcggcgacatgcggcggttgcggcaccgtcggaagttccagcgacgacggcggaacgacggcatttgcaagcggcggaccgaccggtgccggggaagtggttctgctggacataaaaaatgagattgaggagttcaagaaggacctgaaattcctgcagttcatccaatccgacgacatttacaacatcgaacagttcatctccactttgaaagtgtaccatcccgtctccgagacaacgtttcgggaggaagtggcggcggtggtcgatgtgagttaattatgagttaataaattgatcaaatcattccaaataccgttcttttttatgattcaattaacagcatgttcatgttttacacttcttattattgcatactttaattttgaagatgttcatcgacgcggatcatttcaattactttttcactgatcgggacggcactttgaagtcgtacagctgctcgtacgtggccagcattcagcccgcctattctggcgtcatccaagcccaattcgctcgtcgttgtgctcaaacttgtgccattgtcaccaccgctccgatgatgcgattgggtgggtggcattttcaaatttttttactgttacttcattgctttaaaattcattttttgaaggcattttggacgtgtgcaccatccccgaggggtattattacattggcgcctctgctggccgtgaatggtttgtggacccggccaacaagttcaaggaccagtcaatcccggacccggacctggagaagctgaactacgtgttcgactccatttcggaacttttggagcatccggaattcaaaatttttgcttggattggctccggactgcagaaacactatggccatgtgacattggcacatcaagtacggaccgaacggagaatgaatgtgctacatttgtgtacccaaaatgttttaggatgtgttcggcacagtgccgcgtgaactcagggagcaaattgaccaaagaatccgtgccattgttgaggacattgactccactcatcagttgttggaagtgaaaacgacggagacagacatcaaagtgttcattaaggtggaaaatgccattcgatacattcacaatttagccaaaatcccaatttttagtcatcattgggacacatcttcgacaagggcaacggcattcagttgcttatccaacatttgaagtgcgacctgcgcgagggcaccattttggtgtgcggcgactccgagacggacattccaatgttgcgcacgtgcctggagcacaacccaaaggtgggccaccaaattttgaccaatttgtactattgttttccagaatgtgtacacagtttgggtggcacccgaaagcaaaaaggaactgagagagaaggtgggcaaagggagggggcattattggagacaaatgatttacacatttttgggtacattttttaggtttcccaactctgtaagagtttcggcaatgagcattttctgttcgtttcctcgccagaagtgttgcttggcgcgatggcacaggtcagtcagtcactgtttactgtacttgcaaactaataccgtaaccataaaaaagtcggagtttagacaaatgctaattgtcacttaatgtaccaagaaaaaatgggacagaatttttataatgagttcacattccctcttccctccaggcaactggttcgggagataagcatcgcccgcggagcaatgggctctccacgccgccgaacggagca

SEQ ID NO: 51575 - DNA, 473 bp, Heterodera glycines
atgtgtgatctccatttatttattcttgtattcaccgatctgcagagtaagtggcttatgcccttctgcagatatttttattgactgaataaacaaactaaatacatttttcggaattttttagggtttaaaacacatattttgacagtttttagtccatattttggtccatatttggctatttttgagctttttagtccatatttcgggcttttttagttaaattatttaatttacaacaaaatcaacagatccctttttgtatgcaaattcgacaaaaaatgccttagcaaattaatttaatttttaaattcgcgtaattgtttaaaaagtttacaaagtttacttacaagatagatatttagattcatggaaatccaattcaattgcaaaaaaacggacgcttttatttgcttggactgccaaacggcggcacaaaatccaatggacaattaatgcaaaaattccaggca

SEQ ID NO: 51576 - DNA, 623 bp, Heterodera glycines
gccatatgccccatttttggagacaattcgttgccttggactgatcgcttattatgccaccccaacaattaaagacatttttcggccaagtcgcatttttataaccgtgccattcatcgcttcagcaattgcgtgggccgtttttgtgctcctcaaaacttttgtctgtttacgttcgcttaaatttaaggtgaacaaaaatagcttcgcgatttaaatttttcgaaaatttttgaaaaacgattatttttcaaaaattcagaggcctcgaaaattccgattcgagaaaatttacagaagctatggaacttcgacaatgtagaggccttagaacttctgattttagaaaactttacacagagaccatggattttttgaaactgtagagagagagaagccttgggatttccaattttagaaaattctagagacgacgaatttacaaaaatttcaaagctttggagagaaaatttgcaggcccttggaaccttttaaattagattaatatttcaagcattttcccggacaaatctaaggtcagaagggttcaaaaatggtgctgaaggatgatgaagaatttgctgaaaatccgtcggcattttgaaaaacggcgaaggaggaaa

SEQ ID NO: 51577 - DNA, 249 bp, Heterodera glycines
tggcgcccccacaaagtgtccaagccacgaaatgtccaaaagagtaaaaacccacgaaatgtccaaaatttttcaaaatttataaaaacaaaatgagtctaatttaggatttttagggttttcggggtcgctgaatacgaatataccctttatattaccccttgcctaaccttaggcccatctgaataataaaaaactcaaattcgagacttggacatttcgtgggctggacattttgtgggtcagcgg

SEQ ID NO: 51578 - DNA, 828 bp, Heterodera glycines
atggcacagcatccaattttattatgggccgatgacgtgccttctgaacaaggaaaaatcggtgagtaaatgacactttgataatatcgcaaaatcttctaataaactgttgtgtccccgggtttaaggctttcagccatttcaaattaccgttttaggagagaggaatttattataaggaaaagcattgacaattaattatgaattgaaaaccgggaatatgtttgggtcaacaacaacctcagagcattttgggtgggtcagtgcaattggttatttgggaaaggattgccaaaggcaagaaatggcacagactgacccaccgcagacatctcgcagcccccgagggggaaattgagtggacttatatactggcacaatgggtatggactttggataggatgaggggtatgacggcataaacacaggaataagagagaaagggatggcatatgcaacagaggtgaatgggatagaaacggcacgataaatgagagggacaggattggcttgagattggatgaacagacggacaagtttatgacgggattgggtcgaggaatagggcaatttacattatgcacaaaatatgaaaatttgaatgctgcggatacagcataaatggggcaaaattcgccaatatcatttgttttttcagtttcgattgattagctgtccatttcgattccattcgatgcttttgttcaagaattgacaatttacgaatttttcaattaaatttttaaaattcattactaaattaaagacattttgtgagcctttttttttacattttttcatatatatgtattttgcatatcaaataaa

SEQ ID NO: 51579 - DNA, 138 bp, Heterodera glycines
gtggctgacttcggctgtgacggcttccatttggtgctcgtcgccatgcgcgacattgacagcgacgaggagttgctgtacgactacggggagcggcggccctccgtgctggcggttaacccgtggattttgggctca

SEQ ID NO: 51580 - DNA, 348 bp, Heterodera glycines
atgcagcaaaagctggaaatgcttctgatggatgcggtgaacagagaggagaaagcgatgccacaacgaactgtccaatggaaggccaatggcatcggagttcaagccgaaaatggggacggaaaggtggagaagcttaaaatgttaggtgggccgattaatcggcttaatcgtttcgcaatatagcatctaattaactaatcacttaattagtggcattgaaaaaccaataattgtttagggcaacagccataccgtaccgtcaaagccaatttcacaattgtcttcgtcaattgcttcttcctccgttcttttggcgtcctccaattattcagtccatggcaataa

SEQ ID NO: 51581 - DNA, 316 bp, Heterodera glycines
atgcctccaaaaaatgcgcctaaaacaagcaaaaaggcggaggagaagaaaaaacagaaagtccttgaagaccgcacatttggcatgaaaaacaaaaaattgagggcacaaatggagaaaaatgtactcaaaaattatgaaaaattaaaaaaaacacgaaaatttctcagattatgggcgcgccctccaagcagttcacgccgaagaagaagcaagaggatgaagacctgaaggacataaacaaaattttcaaaccagttgtgcaagcaacacagcaaaaagtgagcgcaggtacttgagagcacacacaaataaa

SEQ ID NO: 51582 - DNA, 582 bp, Heterodera glycines
atggcatgcggccgcttgcaaactcaacaagcactgccctcgagtgatttttgtgagagcatttaataattggtttgaatgcgtatgtgtatgtttcagctctctaccctgcccggtgtggacgaaaatgggcaagcgtaccgagcgagaactaaagttgccgagcgagttttgtttaacaaggaccaattgctggcccaaatggaatatttccttggtgagatcaattttttttaatttaaaggctcaatacccggtgaactggtttttaacagtgtgaaccgaccgggtatcaagtgcgacatggacgccgcatacattgcagcggaggcgatagtaagttaacaaaaaacaaaaaggagataaatattagcttatcttttataaccaaaatccaattacaaaggtttgtttcatcgaagacgccggccaaacctacgtggaattttccttcgaaagacggtgccccgttcaacagagaagtgcgcccgaattcggaaacgaattccgtaaatacggcgctttctgtccccttaattagtgttaggagtgtaggatttttcgaactggaactaattttta

SEQ ID NO: 51583 - DNA, 1048 bp, Heterodera glycines
gtgactttcaacttggacagtcgacgaccctttgggatgtccattgtgacgaagaacaaccgttccggatttgcagggatttatgtgcatgaagttaaccctggtaagcttagaatttagagattttagtacgatttgttttatcccatttcaggcggtcttgtggcgttggacggtcgaatcagacccggctttatcattctggaagtcaacgacatttctttggatgaccttagctcaaaggaggcgctcaatctgatcatctcttcggttcgaaatgctaccgaaaccagggggtccgttatttgtttgtttgatggttggttcatttttacgggttttgtcgtttaggcaactcaaattggtctgtgctcccagcagtgagtctgttgaactcgcgcgaaacgttttccaccccattttggccgagcccgtacgaccgattgatcccaccgcgtggattcagcacgcaaacgccgccagagggttggaccaccaattgcagcactttccccctcccccgccaaccgctcattcgcaaggtccgtttgtcatttttaaagtgatagcttcgttgctttcttcgtcctcttcagggcaacagccgccgatttgttgtattatgccgccacaatgtcagccgaacgcggcgaaaccgatggccagcaaatcgtcaaccattccaaaaacaaaccctcagcaacagggaaagggtgggtcaaaaataacattcgaattgtctcattttgcacaatgagttagtgtggttttatattgatttattcgctttcaagtccatgaaaaacaacaccaatttgcgggtgctgcaaattgtgccgttgacggagacattcgaatgatccaaaacccatcgactgacattaccacgacagagtcgggcatttcctccgtggaatgctctattggccaattagagccctccacgaaagcgaaaggcgcatcaactggaaacagaaagaggagcaaaacgacggagacgaagaagcgaaggggaagcggaggcatcgggacggcactccgccgattg

SEQ ID NO: 51584 - DNA, 702 bp, Heterodera glycines
atgacggatcgaaggtatccgatcagagacggcgcccaatggacaattatctcgaccgatacaatccaataccgtttctttgaggcactaaggccagttcagaatgaggtgcattgtcacggttgaatgtgggccaaccaaatgccgttaaggttgctcctgtgccaattgtcagttcgctggacatgcactcgactgacccgacttcgtcttccggcgcttacgttgagcttaatgggcacgacttctaccccaatttgcaggcttggctcggctccactcccatgcccacgacatttgtgtttgttttgaacactaagagtcatcactttgttaaattctcggttccctttgctttgcagcaacaaagagatgctccgtttcactctcctccctctcagtcagctgaatttgcaggagggcgtcgattatgtgttgggtgcccgctgctctcttctgtccgtcccctgcccgctcagttcgccctcccattctccgacaacggcctcgtctcccccattccttcacttcctcaatggcacaacaacagtttcttatgacagtgatcaggaattggagtttccgttgtcattggttcgcgatgacggagtcatttacgccactcagctgagtgtgtcttacacgagaccacgggaacaacagttcaggacgggaattcaaggaacacaaccgaacagctag

SEQ ID NO: 51585 - DNA, 66 bp, Heterodera glycines
gacgataagaaacgaatgggagggagcaaatggaaagaattgcgccacaacggacgacggacacaa

SEQ ID NO: 51586 - DNA, 456 bp, Heterodera glycines
atgccaaaggaggggccgaaaatggcaacagcacggggagcgaagaatttgaagcaattagcctttgaggttgttattgaaaatgagaaatgagggaaggaaggctgttctgttcaggttgaaagatttgttgcggccaatttgactgatgcgaatgagcggcagtcggcggagcagcgaatggttgttgccttaggcgcgaaacccccacgacggaaggcgatcaattaccggacattaaaggaacagagaacggaagcgaagaggaaaacaatggagggggaagacggacaacagccggaaaaggacttgtggaggatggtcaaagaaggaaaagtgcgaaagagagagggcggaaggaagaggaagaacggaagcggagtgctgaagaaatggaagaaagaaaagcaaaaaatgagtggaagaaaaaaggacaaaaaaatgaatgcgtgttaa

SEQ ID NO: 51587 - DNA, 196 bp, Heterodera glycines
gacaaattgcaatggtgtggactggcgatccatcgtcggactttgagtgtatgtttttccctttgatcttttgatgggttacactttcttcagttgaccgtcgactattgtcgttatcgtcagcgtcgtccgtccatttcttttccgtcctccgcccttcgctcatccgaccattttcgcttcatttgcaacacca

SEQ ID NO: 51588 - DNA, 478 bp, Heterodera glycines
  unsure (1)..(478): unsure at all n locations
aaacgaagacagaagccgggcttagctatgacgacgcattttcacgcatcatntgtaaaggaagcgaggaattcaattctccattcaaaagcgaaataagcagtgtcgaatttctcaaaatgatcactcaatttgccatgcgtaccctaatcaggtgaatttgaatttattggttttaatttaatttccatttttgcaaactggtttatcttttaattttagagaaccattctgcgcattaacttcctctgcacaaaaccggcccttacgacaacgattatttgtcagtggaagaggaattggccaggggagctcactttcggttgccttgtgcaatttgtatttgggttgggtcgagcgacaaatttgccttcattcgccggaaatggggctgacaaattgcgctattaccctgttttgctgtcgttacatggacgattatctaatcatatccaacaaaagggaacgagttgaaaag

SEQ ID NO: 51589 - DNA, 267 bp, Heterodera glycines
ctgatcttaacaattgttatacctcatttgaacacaaagtgttggacgaaattttgcacaaaatcacaccctctgacaggtaaaaccccaacaattattattttgattcacattccatttaataaatcaatttttctgataaaccgcaattttcagcaagtttgtagttgtcagtgttcaagtgaacagcaaaatatacaaatatcgaaaaacgaagacactatagaggcttagctatgacgacgcattttcacgcatcatttgtaa

SEQ ID NO: 51590 - DNA, 1761 bp, Heterodera glycines
atggaaattgtgaaagaagaaatattcggggctgtgatgttgattttgccgttcaaaactgaacaagaagcgattgcacgagcaaatgccacacaattcggattggcgtcgggattatgcaccacgtgagaggggtttaataataaatattgatgagattaggtcgtaaacaattaaaggacatcgtttgatttttagctattatgaatagtaagtttatgtagattttgtttggattggagatgcataattatttaaaatgttttcattgtacccttccttaggcacaaattaaaaatcgtcactctgatgtcctaattaccacttattttttaaatattatccgatttattctcttgttggtcaaatcactaaaaaaatctttggtttacttttagtttaattgggccttattgcaaaacgacaaataagcttttgctaacaaaaaataaaagtttctaaaaatatttatttacaagtaatgaaaatttaaattttggttttattgcattttaattccaattttttaaggaatttagcacgagctcatcgcgttgctgctcaattgaaagttggcactgtttttgtcaacacttacaatgatgctgaggtaacaattttgaataattaattgcgaacgattgggtttactgttttgttgtaagatggtcgtttaaggtgcacatcccattcggcggcttcaaaaattctggtcacggacgcgaaaactgtgttgaatgtttacacgaatattcacaagtgaaatcggtgtacgtgaacatcgacgaaggattgcaacacaatttgggatgaaggaagcggagagagaaaaatgcaatagaaagagctcaaatacaaatagaatatttttaaaattttttcacatgccttattttactaactaataaagagattaactaactttctagaaaaaattaattgaaaagcaaaaaaggttgtttacatggctggaggacctcgtaaatttcggtccccaccacttactattttataacctaatcagtgcttggaaatttcgatgctttatgtaaaatgttttaggtattttgtttgagttgcgtcgcagtgtgtgcttgtgatgactgcctttgaggagttgggcgttttgtccgaattggcaacggcactcaatgatttggaatggacgtccgtctctcccttttctttcctacttaattttcatagctttcagcttgcctactgacattcaatccgaagcgatccccgccattctcgggggtggcgacgcttgcatggtccgtccgtccgtttctttctctcttttgttttgattgaatcggtgtatttaaggcggcggagacgggcagtgggaagacgggcgccttttgcattccggtggctccgtccactaattcctttttcgttaattttgcttttcgttgaatcattttcagattttgcaaattgtcttcgagacaatgcttccgtcaaaccccaaacggagtggtgctgtcgaaggtcaatcgacgggcggtgaccatgtcgataatgatgagcaacgtttgctttaagacaacggttggcgcatgaacatctttgaccgtgaccacaatttgggcatcgacgccagcggatttgtttgtgagagtaaccatcccaaattgtggagcggctcgcgttcagtgcgtggagttaagggatcgggtcagtattcttgttcatttatatgagggataggattttaagtcacgaaaaatccaaaaagtcaactaaaaaata

SEQ ID NO: 51591 - DNA, 384 bp, Heterodera glycines
atggcagagcaatttgtacaacccgaaactgcggaggagcaacaagtgaaagctaagaagccacgcgttgatgagcgatttctttggaaaatcacgcggggccaatttgtactagcgattcggctgtgttcaggttaatcaaatttttgacgaccaaattaattgacagctttcataggactggaacaatttatttcacaacaaagacaagacacgtcggctggaagatgggcgagtggcgattggactcgagatgtgtgaagaatgtgccagaatcaattgctgtgtcagtgatatgatttccgatcaaaagaagaagccaaaaaccaccgaataatacaccaaatttttcacattatttgaataattttgactaccaataaa

SEQ ID NO: 51592 - DNA, 783 bp, Heterodera glycines
  unsure (1)..(783): unsure at all n locations
atgcatccatccatatttntaagattgttctgcacaatccagaaccctccgagtcgttgttttgttcgacattacccctgaatatgcaaccaattttcgcaaccagcaacaccgacttttcaaaacattgaggtcttaagaaaaataaaaattatttattttattttaatttaatttagacacattgatcagcaagtgaaagggcatcaacgattttatgcacttgtcgcctttcacagaacgtcggtggtgctgagtggactaaattatgctcaagcaaaaaatgttgaaaaggtaaattcatttttaattaaattaattaattattaattttcttgggaaaaaacatattcttttggggtctaaatatgaactaaatttattgtttaaaacaaaatgattttaattggaattattataatagtgacaaagttttcagaaaaaaataattaataatttcatttaaaattgcaccattttttaattttaaaaatttgcagattatcgcccaaatctctgggcttaatcctcgacgacgacttgaaacggcgccttccaaggtaaatttaaaataaaaattgtcaataaagaatacaaattttaattttctcaattttttaggcatttgcaacagcggcagaattgttggaatatcaccaagaatcaaacaccacttcggagacaacaaatattgttctgttaattcatgatggcttcaacacggatatggggaacgaaacatttgaagcgatgtaacggnccaactggaagggaattaataaa

SEQ ID NO: 51593 - DNA, 419 bp, Heterodera glycines
atggctataattcagggaacgtgtggaggccggggtaaatttcacgaaatgggaatataaattttttttaatttgttaattaatttctaccgtctgttgtttgcttgacagttatgttgggtgctgattgtgacaaagttgtcagaatgcaaatcagtaaaaataatagaatatgacaggtgatcattgggaataattaaaactaaattgaaaatcaaacattatttttttgttttaattaatttcaattaaatttattcgttttaaatttcaactttcatttaaatgtgcaaaatatgaagaaataaaagtgaaaaaacgaatattattttttgctttaataaattttatttaaatttattcattttaacattcatttaaataattattcagcttatcaaagtcaatgtgacaattaa

SEQ ID NO: 51594 - DNA, 555 bp, Heterodera glycines
atgacgaaaggggtcaatgtcgaaaagtgccaaaaattcaaagaaagaaggggtgactcaatgagaagaattgaggaaaatttatgggcaacggtaaagctagtgaaaacggagtatgcttgggcaggtgaaaaatgtgaaacaacagtaaatgattatatagagaaaggtaaaggtggaattttggatttttatttggtcaccacatttggccataaattaaatccttataaaggttgggacgaaatgcccaaaataactttcatttgggaaattccagagcccagcgacctatattgggcaactcacgctccagtaggagaatttttggcagaaattacagacgacgcaattgttgtcgaaagcgaacagagtgtcttttactttgaaaaagagaacactggccgagaagggattattggtgtgccagaggatgcttacaaaatgtccaatgatgttttcattataattcatcaaattgaccatcgttttaaaagggaagccaaaaaaaaatggagcctaacagaaaagaaaggccaactaaacaggaagtga

SEQ ID NO: 51595 - DNA, 579 bp, Heterodera glycines
atgcaaagtacaaaagcgcctcttttgtccacaactcaaattacacctaaggttagggaggtcattaccactgaagcaccaccaattacaacaacgcaaacagtaaaaattgagctcactacgaagccgcgtaaaattgagccaaaggttaaagtggaaactccaaagtccttctccaaaggcattcaatttaaaagagtaagaaatgaacaacaaatttacaaaattatgggaattaggaaaggcacaatcctgactactacaattccatttataagtacaactcaagcaccaaaaattacaaagccgaccacagtaagttcagtaacggtaccaaccaaatcaagtcaaaatgtaaaaacgactatgaaacaaaaggttgatacaaaattaccgtttataaaaactacggtaaaaccaacggtaacagtcacgacaaaaaagacttctaaaacaatgccagtaactgttaccttggcaccaaaaactgagaaaactgttacgacaccgaagccgatttttacaaaagttatgaccacagtggccacgaccacgacaatttcaccaataaaactgtga

SEQ ID NO: 51596 - DNA, 1122 bp, Heterodera glycines
atgagtgacagaagttcatcaccaatttgcacaggaaacccaatgattgacgtggctcgactgctgttgatgaacacttcgccagaagtgaggaaagaattggagaaggacggccgcctcctcaagcagtatttggaagtgcatcggacggaaggaggacagaatcaattcgatttggagaaggtggggggggagggggagacgacggacatgacaattggccaccacagcttaccaaagcgtacaaattggcaatggtcggccaaacggtgggctttgtgatggtgttgcccttcttccaaagagtgtgggctgaagaaacgaattgcgaagtgaaaaacgccaaactcatggaaagagcagtcgctgctttggccgatgcggtcgaagtgttggaggaggaggcgccggaatggttggaagacgcggccgaagagccggggaatttggcggagaatcccggcatttgatggacccttggagttttggcaaattcccatataataagtttatacccatgatttatacccatgatccaagctttcgaaaacaacatatgctgtcatgggttcgagtcgcattaatttttgtgtttccactcattgatgaatgaaaataatatcacctttattttgcttttttaatttatttttttgtttttggcaattaaattaaatttttttatcaaaccactccttctctctcacactcgtacgcgatccatctatattgctgatgctctgcaatacgcgtatgtattctgcatacccctctgtccctgactctgtctgcgtagacagataatcattcagagcattatattcgcacctttcccgtccgtctacttgttttcaaatacattttaactgcacaattacgcccaacgcctgacttattcattcactgaactctcatcagacaccaaactttttatgtaaggattagtatattagttttcttgacaaatattatatttcataattcagaccggcgattgcgttcaacaaatcgacgctatgttaggggaagtgcgcttgaacacaaacccattgccttggtacaacaaccacaagaggattttttttgaatagttaaaaagggaaaatttcttattttgagcca

SEQ ID NO: 51597 - DNA, 518 bp, Heterodera glycines
atgtggataattagatggagccaacaaacgacgaagcttaaaaatgctatcagcaatgaggaaaatgacgtcagcaatgagaacgatggtatcggcagtgaagacaattcatcaaatgacgtcgtcagcaatggcgaggaaaatttgaccgtgacgattcgtcaaatagagtcagcaatgccgacatccttgctgttcgtcatgattcttttaaattatttgatttattcgtttcagcgcaccgatgagatggatcggaacatgaaagacatcgccgcatcggttcgactgcttttacgtcagcaaagagggcgatgggttgctggacggtggctcattgggctgttgatgggaggacagtgtttcgtcgcagaacgtattcaggagtttctctaagcataattcgaccacattatgggattgttgttattatttgttatgcaataatataggaattttggtaatactgtgctttgtccacccccctttcgaaattttttttatgatttcaaatgtca

SEQ ID NO: 51598 - DNA, 1263 bp, Heterodera glycines
atgatcactcgttcactgcataggaatgtaaatcaaaggcgtgtagttggagaaaatgaagaacaaaacggaggaaatagccagcaaaataacgggaacaaccaccattcagaaccgatgatggaagacgacgaaattcgccgagcacttttggacgtcaatggtcaacagaacgagcagaaccaacagttgaatgcggacgaagagcgccgccttttggatcagagtaacttgaatgggctgagaaatttgggtgaaaatttcggctggaatttgggaaacaatcggcaaaatgaaaatgctgcacatatggcgcagcgaataaataattttatgacgtccacgcctaacatcagtcccggtcaccaggcgcggcaaaattttaattttgttgacaaccgcgttaacagacgcgttgtagaaaggcctagggatgcgcgcggacgttttattcggattgagaataacgatgagcaagaaatgccaaattttttgcaaaatccaccgcggaacccgcaaattccgccagtaaatcagcaacaagcaaacaatttgggaaatttcggaatcccaaacaaccccaatctcattcaaccattgcaattcggtatgaatggcatgtatgcgccaggcgcgtggcctcaacagccgatgatggcttatccaccacaaaattttcaaatgttttatccaccgaatttcgttccacaaatgccggctcaaaattttgtgccatttatgaataattgggcaccgaatgcgtttcaaccacaaattccccaacccgcaattcaaccaatgagagctcagccaacgaatgttgtgcaacaacagcaaattccgccgccgacaaatcaggcgatggcgcaacaaaacccacagcaggaggtgaaccgacaaacaacagggttaagcggcattgaatatgctatgatcctggacaggctgcccgacattaaaggaaacgagggaagtgattcgatccgcaactttttcaaaaaattttcacaatatacgagtgaatggccaaacaaaaagcgaatcgaatcattagaagccaaattgagtggccgagccgaacgtgcctacaatgctgctttagccacagagccgttcgcgtacgaaaacatcaaacgaaacattttgcagcagttggaagaaacggattgtagggagatgagtgcttttgacgacctcatgaatggtgtctacagaaaatcgggggagaacttagacgatttggcaaatcggatttcaagctta

SEQ ID NO: 51599 - DNA, 531 bp, Heterodera glycines
ggttcgatgaaactttttaaaatataagcctaaactttttggcctgtttaaaaaggaattaaaaatttttaaaatatttattcatctccctttttgatagtgaaagcatcagagagccttatttaacttttaattaacatttggtgcgtttcagagcacgttctaaaaaatatttatgaattaattttgcaaaataataaataattaatgaaaaagtcagaatttcgaaaaattttaaaaacaacaagcgttggcattttttcaggttaagttagtcctttacaatggagaaggcctgcaaaatttggagagattatatcgattttagtgcgctaggttcgatgaaactttttaaaatataagcctaaactttttggcctgtttaaaaaggaattaaaaatttttaaaatatttattcatctcccttttgatagaaaagcatcagagagccttatttacttttattaacatttggtgcgtttcagagcactttctgaaaaaatactatgaattaattttgcaaaaaataaa

SEQ ID NO: 51600 - DNA, 566 bp, Heterodera glycines
gggaagctattcccgaaggattcggtctccccataaatctgggcgcatcggttcgggggtactgccccgaaaacaaaaaaatcgattttttcaattgtccgtttggggtactcaaacaattatggggagcaaaaatccaacgcagaattaaagtacaggctatagggaagctattccggaaggattcggtctccccataaatctgggcgcatcggttcggggggactgccccgaaaacaaaaaaatcgattttttcaagtgtccgtttggggtactcaaacaattatggggagcaaaaatccaacgcagaattaaagtacaggctatagggaagctattccggaaggattcggtctccccataaatctgggcgcatcggttcgggggtactgccccgaaaacaaaaaaatcgatttattcaagtgtccgtttggggtactcaaacaattatggggatcaaaaattcaacgcagaattaaagaacaggctttagggaagctattcccgaaggattcggtctccccataaatctgggcgcatcggttcggggggactgccccgaaaac

SEQ ID NO: 51601 - DNA, 1088 bp, Heterodera glycines
atggcttcaaaagaatctgatatttggaattttttcacgaaaatttcttcagaggttgctaagtgccggctttgtgaaaaccaattagcgtgtaagaaatcgtgcacaaaaggattgtgggggcattttaaagcgaaacacgctaaagaatttgaaaactatttgcaaaaatccgacccgtcaacggtaatacaagcttccttttgatatgaacaactttggtcaggttgaatcaggaattgaccgtacatttgctgatcaagaattgagatagagaaatgtattgacaattgcatcacataaatactttattttctttttagatgatatctgggcccaaccaaaatcaccatgtggtatttctattccctcaacaatttccggagatcctgactctgattttttatcaaaaattgaggctgaacttgcttgttttaaggcaggccaaaggatggaagtgaacggagacttattttcttggtggaatcaaaacactggccgtcttcccgaattgtcaaaacttgcaagaatggtccacagcattcctgctacatcagtcagttctgaaagactcatttggctgtggttcgacttgattttggtttgaaattcctttaaaaacaaatgagaactccgcttggaatgcctgtcgatattccgtactaaaatataattaaaaaattcaatttaattttcaaaaatgccacctcgtaaaatataaaattggtccgttcgatgcggcgccaatgttcaaaggaattgcggcaattaattgcaggaaccaagcagtgatcggagacgaaattgtcggattgatcagaacggtgtagaacaaatagatacaatagccgccaaaattgacactgacaatgcaaataagtgcccgaaaagcgcgatgattgatctgatcagctgatggcaaacctaatgtgacgaaaatttgatcattagagaatgaatttttgcgggttttaatttttttttttaaatttatttcgtatgcaatatgtaaacgtatctataaaatcgtgaattttaattttattaatgctttttttttgtttttagtcatagatttaattgtttga

SEQ ID NO: 51602 - DNA, 520 bp, Heterodera glycines
atgtggaagagaaagtggaagaagaacagaaagtggaagagaaagtggaagaggaacagaaagtggaagatgaatagaaagtggaagagaaacagaaagtggaagagaaagtggaagaggaacagaaagtggaagagaaagtggaagagaaacagaaagtggaagagaaagtggaagagaaacagaaagtggaagagaaagtggaagaagaacagaaaatggaaaaggaacagaaaaagcaacaaagggaaagaggaaggaacaaaaaaagaagagagcaagagaaagcgagagtgatgaagtgaaatgggaaggtagaaaggagggagaaaggggatgagaaagaggaaaagtaagagattttaagcgatcatattaaaatttgagttttaagaaaacgttaattgaattcccggccattaaaaaaatcagttgccttcttacatataaaggttttttggcgcgtagcgccctctagagactgttaaatagcgaagctatttcaatttaaaaaaataaa

SEQ ID NO: 51603 - DNA, 1345 bp, Heterodera glycines
atgcggcgagagctagcagacaagccggccaaagttgagctcaccaaagggataagcgtgctgttgagaagaggtggtgaagatgaagatggtgaagttgtggacacaccaccgcggcctcccgctccaccaccaccaccacctccgccgcctgggagacgcccttggcgtgggccaaatctaccaccaccaccacctccacctggaagacgccctcggctcccaccaagtcctccgggtcgcgctccgtccccaccagggagtcctccgcctcgcccacaacgtcctcccagaccgagtagaccttctcggagaaatggtcgtttggagcagtgggagaaaaggcgacacgatatacaacgacggcgaccggttgtgcgggaccttcttgcagaagcagctgctgcccccttaccggaaagtgatacagatgatgagtacatgttggagagtgggttagcgctgccaacaccatcccaatactatggcgacttgcctgtgttgccataccaacatcaaattgaccagatggacactgctgctcagcacaggattgccatcagaagaaaattaaaaaaggacgaagcatatgatgatgatgattcggaccgcaaaaaatacagggtttattatcctccttcacctccccggctcccgctcccgcctcgtgcgaaagcaaaaattgaaccaccaccgcgtcctaccgccaagagagagcctcagaagccaacaaagttggaactaaaaccatcaaaatttgagcccgattcacgaccaaaagtcgcgctgcctcggtcgaaaaagaacctgaattcccgcttgaccctcggccatccacatccaggcaggccggatacttgcctccacccaaaattataccaaaacccgagccgacaaagaggcctgtaccataccgtatcccgaaaagagagccaaaaattgttgaacaacagccacagccgctgcaacaaccccttcctgcttctgccgtcgaagaagaaatgcccactattcctccgcctaggcgggggaccaaacgccactaccccgtaaacggtgagaatgatggtgaggtgcgcattagaaaacgcgtgaggcaagcgagaagggtgagagtacagtactctcccgaaccgggcccatcaacttctgcacaaagggatgagcaacaacaacagcgtgaactgtttgccatcccgtcaaatcagctgaccatgactcaacggattgaacgactgcacatcaaatgcaaccattatgcggatcgtatgggcgttcggggaaatacaattaacaccgcaaacggcaaaccgttggcgcatagcaatttgcgaatggccctcaa

SEQ ID NO: 51604 - DNA, 1286 bp, Heterodera glycines
atgatcagcaaacagctcgcgcaatggaaaatgtaattagtcgaatgcaaaattattaattaactaccgccgtatcacaccactgaaatattctcaaacgactaaaagacaattaattgatcagcacattttttgaactttgtaaataaaaaggacattaaaaattaaaaatataagcatttttctaattaaagtttgccagaatattatttttggcaatttattatttaatttgtgcatttgtctttactccatgtttgacaaaatttgaatgtgcggtacgtcctttgatcaacatttatcactaaaaaagtttatcaacggataaatttggcacttttatttatttggtgataaaaatgcccgccttcctcacattaataaataaccaaatattactttttttatttttaaaatgaaactaattaaacgaaaatattttccacccgaattactttttgagttaattcattttttgcctttcaaatgccattgggctaataaaagggtttctgccatttttgatggatttgtcctggaaaaacagggcaaatggctgaaaatgttttgcaatttggtgattaaaatataaaaaataataattatttaatgaaataaatttaggtcgaagcgttggatggcaaattgggcacttttttggcgaaagtggcacatcaccgtaggcttattttgtactgtctcatgacacgtaagtttcacttacatttcgattcacatcataatttgcttaccgtatattctctaattaacgcctcgtatccaattactccccccccccttttgaaaatgaaaaagttgaaaaataatccccccaggtcgataattcgagaacatacggtatatgtggttgggataccgtccgggattggtctcagattcccggctttttcacttcacagcccatgttattcaaaggccaaatgccgtaggacctggggacaaattttcctcatcctaatggcatattatcataccatttagtgctctcactcaatttccgtgttcccaacgagttcttattgcgcatggcgtggcacaacctcactgaagaggcttccgaaaattatggcattggcaaatttcgcacgcatctcgcagaaattcgggcacatattgttaagagcggggacactgaattgatcaccaatgcgcccgagtgtaaatttttattgccaaatttggcaatgcgtaattaatttaaaatgccaaatttcaaacaaacattttcagatttgcagaagcttcttattattttttttgaatga

SEQ ID NO: 51605 - DNA, 231 bp, Heterodera glycines
atgaacctgagtaagctgatcaaaaattgatcaatcaaactgatcattttgaaataatactgttgatggccaagtgattagactgtataacacactgattaatgcaaattatcagtcaaagtgatcagcttgaaacattacataaaatggccaagtgatgtgatcaacttgatcatttcaaacaatactagctcactgatcagactcagactcgtttaatgatattaggca

SEQ ID NO: 51606 - DNA, 2424 bp, Heterodera glycines
atgcgtcagtggaaattttattgccataaaactaagttccttaggtttttgaggtaggtcactgaccacgaaacagatatccatttcggcctattccggacccgaattcaaacaaaaagtcaaaagtccaaattctcgaattttggttcaaaaatagcatataggctctctttcttatcaaaggattgatgggtttcagtttatttccgtacactaatttcgaaaattttgactttcgactttttgttcgaattcgggtttggggttataatcagggctgccagattaaaattttctaaagcctcattcggcaagcaaaaaagcctcattttgggtcaaaaagcctcatttttacaaaatttattcaaaacacgcttaaaattttatatttttgactgtccatgatcaatttgagcaattttttgttagaaataagcatttgggaaattttgagcacgaaaaaccgaagttgattttttgcggcacttttttcaaaaaatttcggggaataaggggccggtggtgccgataggggccgccgggggagaaatttagaattttgaccatatctttagcagtttttcattaaaaaaattctttattttgcgatttttctcaaaaaaccacaaaaagcctcaaaatttctcaaaaaaccacaaaaagcctcaaagcctcattttgaaaatttagcctcattgacctaccaaaaaaccacaaaatgaggctaaagcctcacatctggcagccctggttataatgaatgaaagaaaatgggggaggagggagagcttttgtagtcgcgaaaaatttggaaaatgcaaaagcgtacaaatgaaccaataaaaattagtataaaagtggttgctcctcctcctccacctttcattattattttccattcgccatttatttttttttcgactttttctcctgacaattccttcaaaaatgattctgtacttttttgtattttttctctacatcaaaatttttgctaagtaaaaattccaattttaatttgaattttgtttcctttttttcagttttatctccggcgactgttggctttgtgtgttcaatttgctctctccgcgtcagcttggctttggaattgcgatgatcagtcaccgatttgacttttacgtcgatgaacacttcaaaactcgcaaatggacattgggacttattcgaatttggagcaaaattggagagaatggcacgaagaaaatgaaaattgtcaatggctatggaaaacgaatgccaattccgcaaattcaaatgccacggaaagtcatcggattcaattacatttccatctagtaaaattggcgattatacaaatttcagcaaatttcccattcatttttagttacatcgaccaaaatgccatcgcttttctccgccattttcaccaacttttcgccacctgtccaattaatttggccatcgaaactgaaaatgaccgcattttggtgttcattttgcgcaacatttggccaatgatcggaaaaaacattcatttcatggaattgtccgccggaatttttcatcgttttcgacaatttgtcccgtcaattctcaacgattgtccatcacttcgctttgtctgtttcaattttcacaatctcttcgccgaatttccatgcgatgacaatgccatggcatccgatggacaagcggtggcaaaatggctgttcactccgcttcaaaacgatgtgccgaagatgtacaaatgctggttgaaaaatgatgattcgagttggtcgtcgaagattgaagcattcaaagcggtgatttttatttgattgatttaaaatggtcttctcctaagcaacaagtgtcacagctatcatttcttaatctaatttttccatgttttaggcttttgccaatgcttcatctcccgtcaatttcattgtcaccatttggttttcttttgcttcctccgttgtgccctttgatctgaccaacgaattaactcgagaacaattgacgttgaaaagaactgactacagcaatcgttttctgctaatccgttgtccaatttcgcgagacgcgagcaaatgggcaaaatgggaaaaggaagcgattgactggagaatttgcggtcaatgtaacagaattgagattcaaatttatgttgagcgtcaaattggcgacgggtaagcgaatgctttttcaaaaaattcaaatttaattcgtttaaattcttttaggcttctcgacgcaactcctggcacaagtgatcggcagcagaagtgaatgaatgaattgttgagaaatgatcgatcaatttgaattatatagttattgtcgtgatcataaaattgttcttttttgttggaatgttcaattttgtttttcttctttaatccttagagctttaaaaaatgccaaattcgtaacaaaattcgtttttgaaaa

SEQ ID NO: 51607 - DNA, 775 bp, Heterodera glycines
atgaagaacaacgagcgacgcgactcgttcatcggcacaccctattggatggcaccggaggtgatcatctgcgagacgttcaaggaccagccgtacgactgcagaggtcgtcgtcctcgtcgagtcccccccccctttttgggccactattttccctattaaaaaggggacaaaaaactgtgcacacactccaaattattaattaacattgtttgagtagcgacagttttgtgtttgcacaacgcgtgtattgactagtcaatccgtggacaaatctgaccaattcccacgagtcgttggccttaaaccaaacaacatttcttattcttgccattaattaatgatattataaataatgcaacctgtccctctccctaaaatgatatgaaaaggttttcgattaaatgcaaaaaaaaaatccggaaataggccgggaattgtcggtagatcgtcccataaccgaaatcctctgtttgcgccaggagaaccctccctgatttctacagataaagataaccaccactggttgaagcacaactgcttgcacatgccctttaatttgtttaattttaaaatttttagcggacatttggtccctcggcatcacttgcattgaaatggcacagatggagccgcccaaccacaacatgaacccgatgcgtgtggtcatcaaagtgcaaaagtcggagcctccgaccctcgtgcagccgcacaaatggacgcccgagttcagcgactttctgcgcaaatgcctcgtcaaaaatgtggacagccg

SEQ ID NO: 51608 - DNA, 315 bp, Heterodera glycines
cctcatttactttgcggacttgcgcaatgaaatcgacgggttgcatcgcgggcacacgaacttgcagattttcaggtaaagaaaaatattgaaatttttataaatgagaaataaattgacaaatccgttccgttttaaggcggcaaaggctcgtgccagcggtgtgaaggcgatttgtgcaatttgtgaccaatcattttttgggaccgaactctgatgttgatcatgaagctttggtcacagacgatttaaatattttttagcattttgtaaacttttgaatgtattcaacctttaagacaaattttgagaaaa

SEQ ID NO: 51609 - DNA, 1157 bp, Heterodera glycines
  unsure (1)..(1157): unsure at all n locations
atgatttntaaaaaattagccaatntagagaatagtgagaaaatgataaataaatagattnttatagaaaaagtgataaaaaattaaattttgtgaattattgaattaaaaaatttacacatttcgccctaatcaatttgataagctgtgcttaaagaaattgggagcgagcagtgaaattgaaaattgaatgagtgtgaaaaggagtttttgttctccaccactgcccccgacaatcacagagagcattaaaaaatacataaacaaataaatgactcattaatttttactcttagctaataaaattgagaaataatttctatcaattacatgaagaaaatgattttcattaatttcttaaattcaattgaaaaatgatgttaaaacgtattctaataaataaataattttattctaaaagaaatatttcataccaattatcaaataaaaaatggtatccatcaagggctgcttgtaactgaattttcaattaagaaatccaaatccgtaattacgatgaaccaaaaagaccatatccggtaaatataattaaaataattttaaaacaaaaataaaaaaaaattgaataatcttttttgaatgaaacatataaaaaaatgttcttgttgaaagtctaaattaatgcaagattctcgaaaaataatcaaataaggaccgaaattacagaaaaatcgctaaattccagtaatctgtaactgcgtgaagccattccaactaaagcctctgagtttggcaattttaaacatttattcacatgttcatcaaaattaaacatatttgtaatagcagattcaggtccaaatatttaaaaattcacttttaatttaatttaattttcagaatttaatccctccgatgtgtgccgtgccattgatcgctccccccaatttcactcgctttgccttcgttcgtcggtggtcaaacagaaaggctttatccctaagcatttgcgtcccccgtggttggactcatctctttttgaggacaacaaattaaaagcggagatgaaagtgtcggccaatggatgttatgcgtgttacagggggagaaaggcgagcaatgggacaaatgaggacgaggattactgtgcatgtgtggtacggtattcgcagaggaaaggatgggcgtactacact

SEQ ID NO: 51610 - DNA, 975 bp, Heterodera glycines
atgaattcaaaatcaacagaaagtgggcgaaattcgtccccattgagtgcagaagatgagccaccagtgaaggagataatgtggccaccgcatggacatgtctatcagcaggtggttgttgttgtgttgttccttttgattttacacaaaattgatttatgccccaattaaatcaatattttggcagtgagaaaattgggaattaaatttttaaaaatgataaacaaattccaacccacaattctgcattctgtagttggtacatatgtagcttgcctgaacagcacttgaaagaggtttaaatgaatttttttttttttttgattgcgcttttacaaggcttactgtataagcctaaaattcttatttttccccaacaaatttgcaggaatttatgcttcccgcttattgcaagccaaaattgattccgttgaaatcggtaacgttggaaaagctagaaaagatgcaggccgaaaatgcggagaaactgcgcaaaatggagcaggaggcggaatcagaacaacagcagcaggtgggaattagggttcggaccccgtgggcgggggtggcttttcgcgggggcgggggcgaaggtcgcgggggccgggattgcgggggctgagtcacgggggcggaggtgaggccaaaaaacctgtcccgcccccggcgggggtgacgggggcggggtccgaaccctagtgggatttaaaaaaaattattgcaattttggcataatgtagtatgccgccattttattacggtatctatcacatttaatccgttagccacaggatggaagcaaacacgaaaatgcgcctggctctgttggtggtcaaagcggtccgccggacatttggaaggcagaagaataatttgaaaattaaaggcgacacggaggaaatttttgacaattagagtagaaaatttttattttcctaatttaaatttaaaaatatttttttttattaaaataaa

SEQ ID NO: 51611 - DNA, 679 bp, Heterodera glycines
atgtcatatgccattatgaaaatgagcattgttctcctgctagtgccaattgcattaatttttgcatttcttttattcaaaataaataattctttgccaacaaataccaattcaaaaagtatgtttctgttttttaataattcagcaattagagcaaaaagtagcagaatttggacaaccaaaaaccttaattagttaattattttttccaataatcaggtgacacattcattgtcaaaaagttcaaagaaagcgaattggcacatcggttgttggatggcaaattcggcatcgaaatcggcgcctcatcgcacaacccgttcggtttggacacattaaatgtggattacaccgacgacccgacagcatttttccagcaagatcagatcaaaaattcaggtctgcagctaatgaccaaaactgtgagagcatccccaattgttttagaaccattccatacaattgtttttatccattttaagatttttgacactgacgccaaaagtgatcaaaaaaactggtcgaatgaacaaaaagattaaatccactcctataatttatatttgatatggctgttaatgggggctggattagaactgattatttagtatttttcaaagtatctttccgctgatatttttaattttattattttaaagaaatattatatttatggcaa

SEQ ID NO: 51612 - DNA, 802 bp, Heterodera glycines
ccactaattgtgccatttattcaggacgacgagatcaaacggcaagccgagaagatcaaactgctaaaacaggaactagaggaaaaggtgccgacataagcatcaaaatttaaagaaaatcatcaacatttaaccaaaatttttgtgaaaatattgattttcctcataaaattgtcagttttttggtcaaatatttgagagttttcaattcaattgcttaagaaaatattcaaaaataagctattaaaaatataccaccaaaaaattggaaatgcgggcaaaatctgaagggaaactgttaaatattctttacttaatacactgattgtgtcccactttttcaggacgccgagatcaaacggcaggccgcggagatcaaacggcaggccgcggagatcaaacggctaaaacagcagctagaggaaaaggtgctggaaatatgcaccaaaattttaagaaaatcatcaacatttaaacacaactttagtgaaaacttaaatttgtttgagaatcttattttaatataattattatattttttaaattctgcccttttggtccgttaattttctaatttaaatcaattccaaaagttggtcattttttaggaaaagaaactgttggaacaagaagagaagttggcacaacaaggacaaaaaatattggaactggaaaatgaagtcggcgcactacgaaaaattgtaggttttttaaaatattatttaaaattttaatacaaaaatattttgaggtcaatgccatgtccgaacaattcatgcccaaggataagcaccaaaaaatg

SEQ ID NO: 51613 - DNA, 292 bp, Heterodera glycines
atggcaatgctgaatgcgtccttcgataaattcaatatttctaattcggataaaatccgaacccagcggctcatatcaatgagtgaagtaattgggatttgccgatgatataaattatttctaatttttgttttcatattttcagagttgcgaagagtggaaaacatgcaccaagcgagaaacatatgcacttctcgaccaggagctgaacaaactgttgaccacgtcaccccccgagaaaatggaggcgaattttatgggtatctcgacaaaatctaaaatggaaatttaa

SEQ ID NO: 51614 - DNA, 646 bp, Heterodera glycines
atgcgaagaatggacaaggacccaatgcaaatcaaagcaaaaaaacataaaattgagtttgccgaggacatcacaccacaacaaaagcaaaaagtaaaaaatgattattttatattttctaaattttacttcttaaggcgaaaaaagaaatcaaaaaatttttgaagtcccaaaaatgcttcacggaagcgaaattttttgaaggcctgccgaattattgaaagaaatgacgaaagaatttgaagaaattcttaagcgagaaattttttgtcaaatttcattttgaaataatgttgttaatggataatttaaaaatttcatttttaaatgcttttaaaaattcaattacattttgttttgtttttttttttgttattactagctagagctcagtcaaacattctgagtatcattcgaaaacttgaagtctatatgtttttttattgcaaaattctaggacaatggcaacagacaaaaaaaaaaaatttttttttttgtatacgcgcgaaaaatgattaatttcttgttttcttattgcaattttttcttaatgcaaatattttctcttttcttatatgtatttataaattccctaatctttaagctttcgaatgatacacagaatgtttggattgaacaagtatga

SEQ ID NO: 51615 - DNA, 741 bp, Heterodera glycines
atgtgtcaatcaaaaggcagaaaaagaaaaatggtggaggcaaaaaaagaaggcattgatgaaaagaaagctgcgcaatgttttactgtttcaaaaattttggcaatgttcgtcggccgggacaaaagtcaattttactatattgattggggagaaggtaatttaattagtaatttttaatattttaaaaacaaatttgtgtgctgataattggtaataattagaaaaattaaatttaaaaaaatttgtaaattgtgacaaaaaacactcctaaaaacccctaggttttcgaacattttggcattactttttgaaacaaaaatatttttttttagaaattttacaagcaaatagagaaaacttagggctaccccattttttaaaataataaatttgtaaacaaaaaaaacaaatttttgttgcttttacattaaagttcatatgaaaacgcgtttatttttataaaacggttttattgaagtattacaaaacacccctaattcccaggacaattgtacttgaaaaatccttttttttatagaatatgtcggccaggaaagttgggagcctttgagttatattaatgcgcttgaaatggtggcggaatttgtcgaacgttcaacgatcgattgcgtactgaaagcattgttaggtgaacaatcagtgccggaacatatagcaaaaaaactacgcaacagtgacaaattcaaggaatgtacggatgaatttaaatatttttaa

SEQ ID NO: 51616 - DNA, 1238 bp, Heterodera glycines
atgacgcacagcggagatatgtggcaacgtatacaagttttggaattggtaaaaaacacccatttaaacgtattaaaatatttatgtttaggcaaaagcatttgaatgtggttacagggtggacagattttaccgggcatggcattacgaagcggcggatgatgatttattcaagggatatgtgcggttattcttgaagttgaaggaggagtcaagcggatttccgaaaggagttgagagcgatgaacagaagaggcaatgggctgaggaatacaaggaaaagtacggaattgcgattgaactgtgcagggtgcagaagaatccggggttgcggtatatcagcaagcttatgctgaatagtttagaggtatgaaatacgaattcttagatctgataaaatgttaatttttaggggaaattttcgatgagaaattcattgagcaagaatgcggtgattgacagagagtctgccttttacgagttggcgtgtgatcataaggtggagttgtgtgacattgtggagtactcgggtgacgcgatgcgggtgatctacagggacaaggaggagtttgttactgagcacaagtcaagcaatattgtggtcagcttatggtaagtttttttttgaaaaaaagcgagaaaatataattttaacaggacgacgagcatggtgcggttgaaattgctggagtttatgatggaggcggaaaggaatggcggggagattttgtacacggacacggatagtatattcgtgtttcatgacagagagtggagccaataacgacggttaaataccttggagagatgagtgaggagtatggaggttacgaaattgaagaattttgttgtggtggggcgaagcagtatggtttaaagatcaggagcaaggagacgggggaggtcgattatgtcatgaagattaggggtgtgacatttgatgtggacaaccggaaggcgttgcattacgatgcgtttaaggagatagtgctgaattatggaaagggggaagtagaccccgcattctttgtttacaaaaatgattttgggaatgttttttgaaaatttttttaaacaatctcatattattttagtccaacgcgtgagtcgaaggtcgtgacgagggagagtcacaagatgtacaagccggtctgtcagaaggggattattgatgaagaattgaatgtgatgtcatttggattttgttaattctgtattttatttttgttttttgttaa

SEQ ID NO: 51617 - DNA, 1562 bp, Heterodera glycines
caatttgggcttctgcggctttttgttgaccattttgtctgtcgttttcctgctgatcactgccccattttcgttgtttttctgcgtcaaaattgttaaggaatatgaacgggcggtgatttttcggcttggccgactgatcccaggcggtgccagggggcctggtaattttttaattttcgcattttttatggattaaaaatttttaggtttattttttgttaacccatgccttgacacctttcgtaaagtggacttacggtaaaagaaaattaaatattttaatttaatttttttttaattttttctttaaagagtgttaacatttgatgtgcagccacaagaagtaatttattgccggggcttgaatggatttttaagtgcaaaataatgacaaaattttcaatcaaaaaaataaaaaaataaaattttgtaattctacaaaatggctaaaaaatttattagatagtcccgctggataaaaatataattattccattatttatataattttatattttaatttttttatcaattaattggggtcaagaaaaatagataaaagcgatttattaaaaaaggaaatccgatttttgtaaaaacgattaaaaaaaaaatttaaagccctttttgaaatatagcgccaataattcattttaatcataatttttggatttaaaaattaaaaaaaaagattctctcccgtgacgcggtcactgtggcggtcgatgtggtcgtatatttccgcatttcaaatgcaacaatttcggtcacaaatgtggaggactgcagccggtccaccaaattgttggcccagacaacactgcgcaatgttcttggcacaaaaacattggccgaaatgttgaggtagaaaattggtcacaaaaaatgttgataatagtaaaataatagtataatttgaaatttttttttttttttggtattttatttacacaaactatcgtaaaataaaaatttaaattatttataataattctatttatacaccattaataatattgtttaacaaagaaacttgtagtataaattaaattaattttaaatgcttttatttctgtattgtgaatattttttaaatatacaattgtataattaatacataaaaaaaataataaattttatttttgaatgatttttttacctagcaactgattaatgaataaataatttataaataataaaataaataaaaatttatggagtttattaaacaaagagaataaaaatatataaataatttagtgaccgtgatcacatcagcctcaaaattcaggttcaaattcttaaaaaatccaaaaacgaaaaatatttttaggaaaccttggacgaggctacatacccatggcatttattcgagaattttaaaaaaatttaagcattttaatttcaggggcgttaaagttgaaagggttgagatcaaggatgtacgcctaccctttcaattacaggtcctaaaaatttttgttttttttacaaataaattttaaagcgcgcaatggccgcggaagcggaagcacgcgtgaagcgcgtgccaaagtgat

SEQ ID NO: 51618 - DNA, 1238 bp, Heterodera glycines
atgagacagcagacaggcagagaaaattggggaggagtgggtcggagagagatggagagtgtgaaagagaggggaagagatgagaatagcagacaggcagagaaaattggggaggagtgagtcgatatgtcaatccattcccaagcccttcccttgcactgttttcattgcaagggtcaacgggcaccacattccttctgcatttgccgtttaatgcaaactttcctcccccccccccatcaattgcttaacttttttttttttctaaattgttttttttttgacatgccaaactttgcgaggcgtacaggtggcgcgccttgccatcaaaaaagaatggctgcgcgggtggccatccaccttgtaaaaaatgtaacttttttttagttcaaaatttctttcaatttcgcttttttacagttttatacaccgggaggcacagaaacaacagcggcagcaaatgctcgacgaggacaaaaacgaagggtattttttcttcttttttttttaaatttttaataatttcccgctcacatttaaggtgttcaagctgaaaggcaatgttgaaatgaatgaagctgatcgaacagccaacgaagtgggttttttttttgaaattttttttaaattcaaaattaaattttttttttttttttttttgaggaattggacaatgtgatcaacatcagtgccaacgccaatgccaacaatcggaccaatggtgaaggggtaagtaattgtttaaattttcaaatttaaaaaattttcccattttgatttaaggtggcagtggcggtgaacgacgggggtgccagtgccgacactgggacaaataccgaaacggtaagtaattgtgattaatgttttgaatttaaaaaattttcccattttgatttaaggtggcagtggcggtgaacgacggcgatgccaatgccaacaatgaaaccaattgtcaaggggtaagtaattgtgattaatttctaaattttgattaattttcccctttgatttaaggcagcagcggggatgagcgacggcggtgccaatgccaacaatgggacaaatgccgaaacggtaagcaattgtaattaaatttttaaattttaatcattttcccattttgatctaaggcggcgacggcacagaacaacggattggagggcaatgccgacaatgggacaaacggtgcaaatgccaacaatgggacaaataccgaaacggtaagcaattgtaattaa

SEQ ID NO: 51619 - DNA, 1040 bp, Heterodera glycines
atgctgaagcttaatttcataattattttcttcaacattttattatttataagcattttggcggttgatgatttagatttccttgatgatttattgaatgacctcaagacaacgacgacacaaaatttgttaaaaaaacaaaaatttgaagaaaataatggagggttcccatcagaacaaggattcaaagtacgtacttcgatttgagcttccgtgcttacaaattctaggtgtatttatttccaagaatgtatttgcaaaatcagtttaccgatgaacagggcagggcccagatttcagagatagtttttcaacacattaatttttttttttaaacctttgactgataaaatatattttgtgttttgcaaatataagggcgattttttaaaaaaaaattcattctttttttgtgaaaaaaattttctgtagagtgcagcggaaccgggaattttgggcataaccgggaccgggaccttttaaaaaaaccgggaatttttggctgggaaaaccgggacttcggtacccagttgtactcagctgtccgtgtttaggtcccggtcccgctgcactctagttttttggcattacaaattcttgtgtggtacttaattgaccttttgacttcttttatgttttgaattataattattattggcgttttgttatcttttttatggaccttaaaatattagtgagtcttttactttgctgttcggttttgtttttggttttttatcttgtcttctctggaattgttttgaatttcttttgatgctgacttcttctcaattgattgttgtggtctcgtctttttaattattattgttgcggtttaaaatttatcgtcgtaaattattttgttttgtttatttattaaagtgtttgcgaattcgttttgaaacaggtgctgacaagccgacagataattgtgtttgatccatttctgaaaagagacaacccatccccatccaaatttgttgattttgtacaacttggcgctcctggcgacaaaggtttggcttagttgcgactattca

SEQ ID NO: 51620 - DNA, 3307 bp, Heterodera glycines
atgcaacaagccgctccagtccagcatctccaaaatgacagaaatgaacaaccacaaaatatagaaaatcggccgattaacaccgctaacactggggttgccgaaaattctgtaaacgatggcgaaattttagcacacaccatgaactccgaccaaattcttcacgccgttttgaatgttgggtcagcaaaccgacaaagtggacatggacaagatgaagaaaatgtggaaaatcaagatttggcaattcatccgaatttgacacagcaacatggaggtttgagaatgcgtttcagacgcttgccaaatttggaagaaaacagtgaaagggaattgtggcaagctgggaacgaaaacaatagtggtcatcacagtcatcacattctaaatcgaaattttctgcgcacatcaacgcctaataacgagcacattattcatgagttgcatattcagcacccgcgccaaaaccctcccaacattcaagcaaatcctaattttgtgcggcaaaatttgcaaaaaactgtgactgctaaccagcgccaggccaacccaaacgttctcattcctccacctcaagttattcaacaaccaattgcggtatatccgccagttcagccaccaattccggaaacttattggggatatcccgcaccttactatccacatcccccaccacctatgggttacccaaatcagcaaatgtttggaaatgcgaacactaaggtgccgcaaccgacccaaattcgacaaccatacaatcaccaaattccaactcaaataaatgcccagcaaacagctcttaacggcctcgaatgcgttttaattctggacaaattgccggacattaagggcaatgaaggaaatgacagcattaaatcttttttcaaaaaattttcacagtataccagcgattggccgaataaaaagcgcattgattccttggaatcgaaactcagtgggcgcgcagagcgagcatttaattcggctttggccaatgaaccgtttatatttgaaaacataaaaagacacattctccaacaacttgaggcgacggattgtcatgaaatggcagcatttgatgaattaatgcaaggcattcgccgaaagccaagagaagggctggatgatttggccgaccgaattgtgagcctggtgcgaagggcttatccgggactgacgcgaaatttggcggacgagtattcgattaaacacctaatccgcagtttcgataatgccgaacttgccttgagtttggagctaaatcgtcggccaggaatgagttttgatgagtttgtagctctagctgctcgtgccgaaacgacccaaaatgcggcgagaagggccaattcggacagaacgcaacaaaattttggccgtagccagccacacagacaatatgatggaccgatggccaaacaaagcacaaacgcatttgagccgaacaaattccagcgattcaatgaaaatcgaatcacgtgccaaagttgtggaagagagggacatgtggcgagaaattgttttaagcgttttgcagatcaggatcagcgtcgatattttggccaaaatcaaaatgcgaccggtgccaatagagcacaaatgccgacacattcaaatccgaatgtcagccaaaaatccgaacaaaatcagtttggacagcgccagcaacaccagcaatcacgaaattttctaaaacaaaatttcctggtcgaacagaacgaaaagcaagttgagtcttccaatgttcagtgtgccggtgttatcagcaatacacctgaaatgttggatttttttcgaaaattttggacaaaatgcaatgaaacggtggatgacggacaaaaagaagcatttccaatcggcaaaataatggcaataaaggtcaaaatctacgaccaatcagctgattcaatgatggatagcggggcccaaatttcgcttgtacaggcgagttttgtcaaacacctcctagagaactcaacactgcaagtcgaaaatctcaaaattttctccaaaacgcgaaatgtcgtggacatcaatggaaaaatcgttgagtgctatggcataatcatcctcccaatcactaggaaaggatgtgaagcagttgatgtcccatttcacataactgatgcaccgattggcctgccaatactttttggtaccaatgccatgggactgttgggttttaaactttttgactcacaaaatggtgagctgatcgaatttgaatgcgccgataataaatcggattatgtacgcattgtctacagtacactgatcgaacctcactcaacaaaatttgttgaactttctgtttcaccaaaatttagcggcaaagactttatcctttctccaaacgatgaaagaaacgacttaagggtcgaaccgtcgctaaacaaagagaggcgcggaaaaacaattgcagccataacaaatttttctcaaaatgcgttgacattaaaggagaatgaagaggttgcggttgtggaagcaattgaagatgttgctgatgtggaaaactgcttgggggattcatggcttttctcagaacccagtgaggttaaaatggagaaaccaaagcccgaaaatgaggagacaaatgcaaaatttggccttttgagcaaagagaattcggaaattcttgaaaatttgctaaataatttttcgagaatttttgcatttcatgactatgaattgacgcaaacagagatggtaaaacaccagattgacaccggcgaagcaataccggtcaaacaaaggatgaggccagtcccatatgcctatagagaaaaggttgccgcaatgatccaagaatatttgggaagaggaatcattcgacactcaatttcgccatgggctagccccattgtaattgtgcccaaaaaagacggatctttgcgcttttgtgttgattacagagggctaaatgcaatcacaagaaaggattgttttcctctcccaaatatagaacgtactcttctaatgctaggaggacgaaagttcttctcaactttggattttctctctggctattggcaaattaaaatggccaaaaattcaattgaaaaaacggcattttcaaccgaatttggcttacatgaatttactgtaatgccttttggtctatgcaacgcagtcgcaacgtttcaacgcttcatgtcacaattgtttgggagtaaattaaatgattttgtgtttgtgtacatcgatgatgtactagtggcttctgaatcttttgaacagcatttgatacatcttaaatttgtctttgaacaaatccaggaggctggattaaaaatcaaaatttcaaagt

SEQ ID NO: 51621 - DNA, 4373 bp, Heterodera glycines
cgactcaatgaaaatcgaatcacgtgccaaaactgtggaagagaaggacatgtggcgagaaattgctttaagcgttttggagatcagaatcagcagcgatattttggccaaaaccaaaatgcgaccggtgccaatagagcacaaatgccgacacattcaaatccgaatgtcagccaaaaatccgaacaaaatcagtttggacagcgccagcaacaccagcaatcacgaaattttctaaaacaaaatttcctggtcgaacagaacgaaaagcaagttgagtcttccgatgttcagtgtgccggtgttatcagcaatacacctgaaatgttggattttttccgaaaattttggacaaaatgcaatgaaacggtggatgacggacaaaaagaagcatttccaatcggcaaaataatggcaataaaggtcaaaatctacgaccaatcagctgattcaatgatggatagcggggcccaaatttcgcttgtacaggcgagttttgtcaaacacctcctagagaactcaacactgcaagtcgaaaatctcaaaattttctccaaaacgcgaaatgtcgtggacatcaatggaaaaatcgttgagtgctatggcataatcatcctcccaatcactaggaaaggatgtgaagcagttgatgtcccatttcacataactgatgcaccgattggcctgccaatactttttggtaccaatgccatgggactgttgggttttaaactttttgactgacaaaatggtgagctgatcgaatttgaatgcgccgataataaacggattatgtacgcattgtctacagtacactgatcgaacctcactcaacaatttgttgaactttctgtttcaccaaaatttagcggcaaagactttatcctttctccaaacgatgaaagaaacgacttaagggtcgaaccgtcgctaaacaaagagaggcgcggaaaaacaattgcagccataacaaatttttctcaaaatgcgttgacattaaaggagaatgaagaggttgcggttgtggaagcaattgaagatgttgctgatgtggaaaactgcttgggggaatcatggcttttctcagaacccagtgaggttaaaatggagaaaccaaagcccgaaaatgaggaggcaaatgcaaaatttggccctttgagcaaagagaattcggaaattcttgaaaatttgctaaataatttttcgagaatttttgcatttcatgactatgaattgacgcaaacagagatggtcaaacaccaaattgacaccggtgaagcaataccggtcaaacaaaggatgaggccagtcccatatgcctatagagaaaaggttgccgcaatgatccaagactatttgggaagaggaatcattcgacactcaatttcgccatgggctagccccattgtaattgtgcccaaaaaagacggatctttgcgcttttgtgttgattacagagggctaaatgcaatcacaagaaaggattgttttcctctcccaaatatagaacgtactcttctaatgctaggaggacgaaagttcttctcaactttggattttctctctggctattggcaaattaaaatggccaaaaattcaattgaaaaaacggcattttcaaccgaatttggcttacatgaatttactgtaatgccttttggtctatgcaacgcagtcgcaacgtttcaacgcttcatgtcacaattgtttgggagtaaattgaatgattttgtgtttgtgtacatcgatgatgtacttgtggcttctgaatcttttgaacagcatttgatacatcttaaatttgtctttgaacaaatccaggaggctggattaaaaatcaaaatttcaaagtgtcagttttgcgctgaagaactcaaatttttgggacatattttgacgcgaaatggcataaaaatggacgcggaaaaaacgaagccaattttggaattgccggtgccgaaatcgaagaaagatcttcattctttccttggatttatgacatattatagaaaattcatatattcatttggttctgttgctgccccattgttcaaactcctaaaaaaggatgtgaaattccaaatgggagaggcagaaactcaggcagtttctacattgaaggaaaaaattttgtcagaagtcgtcctttatttccctgatttcaaagccgcaatggaaaatccatcgagaaaatttattataatgacagacgcatgtaaaacggggatttctgccgttctctgtcaatcggacaatgaaaatcggatccgtcccatatattttgcttctcgacagtgcaataattttgaatctcggtactgcccgacagaattagaagcattagctgtgagattcggcgtcaaaaaattttcacaatacataacaatgattcccaccaaagttctaaccgatcataaagcgttggttccgatgtttaaaagcaaaagtgaaaccggaaacgcacgtgtcgataaatggataatggaattgagtgcacgttttattttggaaattgagtataacccaggaaaggcaaacataattgcggatgtgctttcacgttctggcgcactgaagccacgtgaattggcggagaaaatttttagagttgagcaagtcgatggaaatataagtgcttctgtgccaaaaatggaaatgattgagtgggtcaacgcaattaaggaaagtgagctcggaaacctttaccaattcctggaaaaaaggaaattgcctgaagataagcgggaatgtcagcgactttttgacaccattcataaattcacactgattgagggattactgtatttccatgattcgaattacggtaatcttcgacttttcgtgccacaaaaattccgcaataaactgatcgaagaaaggcacgaaggcaaatgtgcgggacatttaagcggcaaaaagattttcgggcaattagcagaaagatatttttggccaaacatgcgggcggattgtgtaaatgcggtgttgaaatgtcggatctgcgcacacacccgaaatccaagggcaaatgcgccagaattaagaccagtgattacggcggaaccttttgagctaatatgcatggacattttatcaattggaatgtcagaacggggaaatcgatatgttttagtaatggtggaccattttacaaaatatttgatcactgcagcaattcccgataagagcgttgaatcagtcgcaaaggcttttgtcgaacaattggtgcttgtatttggcaagccaaaacgtattcattccgacaagggcgctgaatttgtgaataaaacaatggaagaaatcagccaaattcttggagttgaaaagagtacaacggcagggtacgacccaaatgccaacggacaagcagaacgggccaatcaaactattttaaatatgcttaaaaggtcaactgattcaaattggtcctgggatgaccggctgccttttgtcacatttgcttttaacattactccctctgaaaccaccggattttcgccttacaatttactctttggccggccagtaaattttccgtcgtctgataatgttaattttactgtaaatccttcttacacaatcgatgaagaaagttatctgcagctctttcgtgaaaatttgttaaaaattttggaaaatgcaaaaaataattcggacaaatcaagagaacgaatggagaaatggtttaattcgcagccaaaagtgactttgcagaagtaccaaaaaggcgaacgcgttatggttatttttccgggagctaacaaacgctcaacacataagaaattaaagtggaatatctttggaccctaccaaatcctcgaaatttccaaatcctcggcaaaagtaacgcctgctgataagaaaaatgctgatccaatttgcgtcccattagaacgtctgatcagagcaccggatggacttcctaatatttcaacaactccgcgcggcaaaaatgcttataaaaatgtgttaaatgtgatgactattttgatctttgaagaaaaaagcatggaatttgaacaggaaaattttttgggaaaaacaaaaacttcatcagggacgatgaatttttcagaggaggaggaaaatatggacattgccgaagcggagattaagtggacgatgacatgtgaaggcggcggacatgtgttgtgcaaaaaattgttggccggcgatctcgaccccgtgctcagcaaaacacaaggaatcggtgctatggttgtgcagactccattacaaggactcatcacactattcattttgcggtccaatgtttcaatgtctgcgtcgaaagatttgctgaaggtcgcaaaccaattggaaaaactgggtggaattgctaaattgcaggccattttgacttcggaccctga

SEQ ID NO: 51622 - DNA, 1280 bp, Heterodera glycines
atgaaagtcgctttctttctgaacggaacacccgtccaatcgagtgggtgtcgactgatcagtgatttagtacagatcaaccaagaaagatctttttcaggtgaccgtgtgcaagtcttataccaaaacggatttgcattgctttcaatcgccgaagtcactgaacaggatgccggctactacgtttgtcaagccgaaaacgaaattggcagtgccgaaacatccgccactgtggtggtcgtgccacggacgggcgacggcaagtttttggccgaaagcgaagtgtacgagcacgacgtggaagacatgcgcgagttgcaggtaaagaattgcaattgtgaaattaaaacaaatttaaatcgagcaattaaattagcattaaattcctttaaaagagcatcaaagaggccgagggcaaaatgtacgcgccgcaatttgtgcaagcgccacgcgactttaactgcgaggacgagctgggccagtcgtacttcgatgcgcgcataaagccaaccaacgacccgtcgctgcgtgttacttggcttaaggacggacaaccgttgccaaatgccaaccgtattcagctggtaattaataattaaaaatataattagcaattacttgcttctgcccttgcccaggtgaacaacttcggcttcgtctccttgaccatccatccgacttaccccgaggacgcgggcgtgtacagctgcatgctgaccaactcgctgggccaggcacaagcggacgccaatctgtcaaccatttcctccggggacattatgtccgacccattgcatgccggcgcactgccgacaatccaagcgcacgaggaataccaggtaaagtagaggaagcaaaacaaccgagactgggcttgacttggctaggacctttgaagagactcaattgcattacgtcgagattctcgtttgaacgagataaaaaataaatattaaaaaaaaattacgtttgaatataatttagacatctatcgatgataattttatattttaacttttcaggtgcacatgggccccatgtttcagcccgaacgacccgaggaattccaaagcgtagagcaggtagaggaatgtttaattacattaaattgcaaatttgctttttttttattacacttacataagtgcaatttgtcccacttttagcctcggttcgcgcgccctttggatggccaagttgaggtcgaacaggaacagccggtgcacttcgagtgccgagttcagcctgccaacgacgtggtgagaagggaaatgaaataa

SEQ ID NO: 51623 - DNA, 2667 bp, Heterodera glycines
  unsure (1)..(2667): unsure at all n locations
aaaaaagtcgcattttctctgaccctcagcatccgagcagttacgcgcgcattcaggagatggaggcgccgaagccgctgccggaggaggtgcccgaaccggacaaacagtcaccccaattcaccaaagcattgagtgccagcgccggacatgtggccgaagcggaaagtgtttatttggaggcacagtacggcccattggacgacaacagcattgtggtgggcaaaacgagggggacataaaaaaaacattctcttgcagtgattaaaatcaaaatgagtcattaattgggctaattagagtcgaaatggcgattttataatttacagttgaaattatttgattaaaatgttaacaattccatttcgagcaaatattatgagttacattcagtgtgaatggcttttcaacggacagccgctgatgaaagcacatcgctttgtgctaagccaagactttggatttgcagcactgaccattttgtacatgtacccagaagacaggcaagtgcaaaaaggagaagtgagcccgcattagttctgctgtgaaactctcttgtttcggctcgagaaaatcgtatttttggagtctcggggttttggtctcaagcatcactagccctcatcttaattatgtataatttaaaggggtgataaatttggtcattagtgtccggaaggccgtaattgactgcaattttgttttcggtactactgatcagtgataggatagtctgctgatactgattctctgcaaataattgatatttataaagactgactgggaaggtattcattttcttgccactaattgatccaattaccaattaattactcgtcaaaataattactaaaataaatacccattaatgtgggccacttcagcggcacttacacgctgttgatccgaaacgcggccggcgagtcctcctcgtccgtcgagttgagctgcgagggcaaagcggcgctgctcagcgacccaatccatccacagtctgtggcgcgcatcgccgagttggaagcgccgcgtccgctgccggaagagccggcggagccggagaagcaggcgccgcagattgtcaagcagctgacggtggccacgcaaggcgaaggcggtccggccgagacgcaggcgctgcattttgacgcacaatacacgccgacggatgacaacagtgttaaggtgggggaagggacggagaaaactgtttttacagtgatcactgatcggttcaaaccttttttaataaagatcaagattttgaaaatgccggaacaaaatcaggaacaggaccagaaatcctgccaaaaattttgcgcggtcgctggggcgctctactttttaactcttggtgtcaaaatgaagataattagaacggaacaaataagataatttctgctttcataatactaatatccacncacggggcacattccctaattaaagttaatataaaaaaataaaatattgcattggttgggccattcatttgtcagattgaatggttcctgaacggtcagccgttgttcaatagcaatcgccatcatttgaccaacgatttcggctttgctgctttggacatcaatttcctcttggctgaagatgctggcgattattcgctggtggttacaaacgcagtcggtaggaatgttttggtttaattagttaattaattaattattacttttttactaatcaaaaatatattgccacgaggaattctcacaaaaccatttgcttaaaatgtgaaattaattcccaactatatgttaaggccaagcccaaacatcggcatcagtgcaaattgaaggtggcgctttaatcctggaggacacgcaacatccggaaagcttccgacgaatccaagagttggaagcaattcgtccggcagagccggaggagccggaaattgtgcccgaggcaccccaattcacgcaagagttgaccggacttgtggacgatttggccgacggcatgccgctacatttggacggcacagtgatgccgataacggatccgaagctgcgcatcgaatggtaggcttttgaaacaccaatcaatggtttgggggaccataatgaattagtgaaatgattatccatttggctaccagttattcaatcaatttatatacctattaattatattattttaaatagttattaattaattattgtaattactcaaatcacttctctccctcctactttaaggttcttcaacggacagcctctgcagtttagctcgcgcattcgcaccatccacgactttggctacgttgcgctggaatttgcccatcttttgcccagcgactcgggcacgtacacatgccgtgccaccaacgaagttggccaggccgagtcgtccattaccatcgaatgcgagacgaagcgtaacctgtacttggactcacaacatgaacagtcgtggcaaaagattcaagtctgatcaattactgatctaagaggcttgaaatatattcaaaaattattttttaaggaaatcgaaggccgacaaccgacgaaagagccgagccccgagttgcacttcctgccgccaactttcattgtgccgttgtccaactttgaggacctcgtcgagggcgacgtcgtccgctttgagtgccgacttcagccggtcaacgacccgacgcttaaggcaatttaa

SEQ ID NO: 51624 - DNA, 297 bp, Heterodera glycines
atgcgcgccacagactgtggatggattgggtcgctgagcagcgccgctttgccctcgcagctcaactcgacggacgaggaggactcgccggccgcgtttcggatcaacagcgtgtaagtgccgctgaagtggcccacattaatgggtatttattttagtaattattttgacgagtaattaattggtaattggatcaattagtggcaagaaaatgaataccttcccagtcagtctttataaatatcaattatttgcagagaatcagtatcagcagactatcctatcactgatcagtag

SEQ ID NO: 51625 - DNA, 1542 bp, Heterodera glycines; identical to SEQ ID NO: 3724

SEQ ID NO: 51626 - DNA, 1425 bp, Heterodera glycines
  unsure (1)..(1425): unsure at all n locations
atgcatcgcgcggaatgccaaaggcgaggcgagcaccgcggcgaccatcgaagtgcagacactggtcgcgcaggaggagccgacggtgcagcaaccgctggtggaaacactggacgccgcggagggcgaatccgtgcacttggagtgccgcgtgacgcccatcaacgacccgcaactgcaggtgcactggctgaagaacggacaaccgctgccggacgccaatcgctatgtgtaagcggaacataaagcaaaaaaaataagaaaaggagaaagggcgaactgattggaagcgaagtgatcggaaatgcaatgggacaaggcgaatgccatcatttttcaggcaaagcttcgagttcggcttcatcactttggacattttgtacgcaattgcggaggacgggggcgactatgaattggtggcagtgaacggaaagggcgaagcgcgcaccaaaacacacataaatgtgatgccgaagccgggccttctgttccaaccgcaagcgccaggcagtcaggtggcgaaattgggctcaaattagtcaattttatttaaaaattccctatcgacggcgccgtagctaaagctttacgaatgatctgacggcgccgtcgtcggatatattttttaataaagttacccaatgtttctcttttcgcaggtggtggacaacttggagcaccatttgcgtcaattcaccaaggcacaattggctttgacagccgaagacgcttggcaaccaggcaaaatgatttaatcataggggggtcttccgacttttttcacttttgcgttttgggacggtgccgccagcggtgccaatattcaatctcattaaattcttaagaaaanagctcaaatttcaaaaaatcagagagagaggaagagaaagagagaaaaaagaccccattctgctgaagtataaatatttcataatttaataatttaggagctcaacaggcgcccgctttcaagtccgaactgaacaacatcggtgtgcaggagggcgacttctgccgcttcgagacccaattagcaccgatcaacgacccgtacatgaaagtggagtggtacaagaatgccaagccggtggacattggtcagaaagaaagagcctattaaaaccgattttggttggaaattcacctgtaattaaggcgcccgtttccgcaacacgctcgactcgggttactgttgcctggacttactgtacgcgttgccggatgacactggcgaatacgcgtgtgtggccaccaaccaattcggacaggtacacacagacaaacagtggacctctccaagatttaatagttccaatttccacattaggcaatgcttacggccaagttggcctgctcgggcatacagcacgtgctgacaacgccgcagattccgcaaggtgaaaagaaaaaattaaaaatgtttca

SEQ ID NO: 51627 - DNA, 1176 bp, Heterodera glycines
tgatcgatgggattggagtgcattggtacactttgggcggacattcggaacaggacaaattccatgcgcaacacccggacaaaatgatcatttccacagaggcaaggaaaatggaacatttagagccctaattaagtgaaaaataatgaccgaatgcctctaataatcggaattgacttctctttggcatctttctttcggcatttatggtcaaacaatgctttgcaacaaattgctggcactttcaaggcatgtacgggctttatctttccggacgactcggggccacggctcggcaattggacccggggctggcaatacgggtgggacattgtgcagaacctgcgccattggagcggcggttgggtggactggaacttgtgtaagtcggcaaagttgaatatatgagatcatcattaaatgtgtgttgaaatatttattagacgcgggtgcagaaccgatcattatcgcattaattagcatacgctaattgggtccaatgtttgaacgcccggagctttcaatttttaaacttgtaaagagccgagacaaaaaaatttgaattgaagtttgcttgaagatatcttttgaaaaatacaaaaatttgaaaaaaaaatctttcttttccgcattcagcctcctcttcggaattccggcatgaaattatgcttttccttagaatcaatttgtaaatgggttagttagcctttttaaaaaataattattgccaggtttggacatgaacggcggtccaaattgggtgcacaattttgttgatgcaccaataattgtaaacgctgaacgagacgagttctacaaacagccaatgttctattttttggctcattttaggttcggaataccatttttgaccaatttaaatttgttatccaaaattgtccataattaagccgctttatgccgcccggctccgttcgaattggctccacactttttgcttcggatagccaactcggcactgatcaatccgcccaccctgttcagcatgtctccgtgacaactccacatggacataaagtgttggtgttgatcaactcggcaacaaatccattcaaaatacgaattgacgaagtcggccgatcagatggagaagagacaccagtgatcgaactgggcccggaagcaattatgaccctaatttggaagtgaaatatt

SEQ ID NO: 51628 - DNA, 1654 bp, Heterodera glycines
aagggatgccaacggcgctattcgcccggccaggacagcttcgtttgcgcgtgcgatgtttcgcattgcgatgcttttgaggatgggtcggtggacgaagtgccgtcggacactttggtcacttattcaagtgatcggaaatggaagcgattggaaagaaaggaaatgccaatgagggcaaaaggggcagcaacggaaggtgcggtgggcgcaaaactcataattagtggtaaaacagccaatttgacattatgccaatgaattccatcgtgttacgcgttaatcgaactgcgaaaaagaaccgttaacaatttccaagttttctgattccccaacgacgttttggttctgaaaacgaaaaacgttaacaatttaaatttgtctaaatattataaatccttagccctcatttaaaaaattttgaagtaaccttcaaatttaaatatgagtagatgcagttaaaataaacccgaaatttcaaaaaatattgggtaaaaattggaaatttttgataaaatattttttaattttctttttactggaaatttactcattttctgaccaaaacggcgaaattcatggtttttaccgtaaccggaggaatatcccatttgttgcagattgttaatcccaaaaacagaaaaaagtttagggtgtatgtaggcaaaataaggtcacctaaatgacaaatgagagaaaatcaaagcaaaaacaaaaagcaaagtgagcccttttgtaagggatgtgcacttgtggcacaaatgccgaaatgaattgactcccccccccgttttgatgatgtaattaaaaggaaaagggaaggaatggcactaaaacaatgctaaaagggcaaacgaagtgcggaaacgaaaagcacttctcatgttttatgcctatcaaaaccaaatccaatttcgctttttgcataaatgccaaaaatgacagcataaaaaacaaagactttgaattatttgcataggctcgttttgacatttttgtatttccattcaaatgctttcccttttaagaaagtgtttttccgtcctccgacaatgtcttgcggcttagcgtggacccatccgacaaataccaaaccattcttggctttggcggggccttttccgactcatccggcatcaatttgaacgcgttgagtgcgcccattagacgccatttgctcgaggcgtacttccattacggaaagggtaaccatttttttggccttctgctaaattttggcattcaatgattgtgacacgttccatttcctgattctcggccgacttttcactctcaattagtcttttgttctgctctcgtttctaatctctcaattaatttgcaatgcctttgccaatgccgccgatttgcccctcccatttcccccatttccccgcaggcattcgttactcattcggccgtgtgccaattgccagcactgacttttccacgcgtcaatattcctatgttgaccaggaagacgacttcgatttgagcactttttcgctggcgccggaggactttgaacagaaagtctgctgcaaatgaaaaattcaaaagaatcgcattttaaaattttcagattcccttcatcaaagaagcagtgagattaagcggtgaaaagttccgactctttgcttgtccgtggtcagtc

SEQ ID NO: 51629 - DNA, 58 bp, Heterodera glycines
tgccctaccgggaccgggacctgagcttttcaaaacccgggaccgggaaccgggaccg

SEQ ID NO: 51630 - DNA, 520 bp, Heterodera glycines
atgcttttgtgttcaaaaatttcgcactttcttctgcttttgcttggtgccctgctgttgttgtccttcatttcaatgggcaacggtaattaatttaaaaataatataattctaattttaattatatgaagaaataaaaatacaaatattatttaactttttttttggcatgataatgggtttacttatttcttctttctaccccccccccccccctcttaattagttggaaaattagtacgagtcagggtatactaccagcagtactgagttggcctagtacgagttggggctttcataaaccattcatactccaatttatagttgctaaaaagtgccaaaataattaatttttagtttctaaaaacccccaaaatggttttgctaaaaataccaaatagtttctaaaattcaaattaaggggggtgggtgtaaaatcgaaaattttcttcaaaaaacaaaaatattatgccaacccattaattagatacataattttcaaaatcaaaaattatcgtca

SEQ ID NO: 51631 - DNA, 565 bp, Heterodera glycines
atgaaccagcagcaagtaattaaaacaaaacgaaataatgataaattggtgcatgatggtgcactttatgtgtttcacaaattcagtaacgatggacttaagaaattttggcggtgtgagtttcatggcccggcagaccaatgcaagggtatgcaatatattattttgaattttgaaaatcttttaaaatccaggacgcttgcacacggatttaaataacgttgtgcagaagttggtcggagttcattcgtgcgacatgaacgctgcgcatgtggaatgtcagcgtcttgtaactggactcaagcgacgtgctgctgagacgtgcgaagcacctgcgaccattcgtgctcaagtgcttcaaaacacatgcacacctgtgctggcctcttttccgagcaaagatgccacaaaaaaggtgggttaatatcaaaaacaattttgtaaataattttgttttctttttattcaggtcatcaaacgtttgcgccgtgaggaaaatgcaccgcgagtcgaacctctcaatttggagcagttggagataacaggatacctatcgtgtttataa

SEQ ID NO: 51632 - DNA, 600 bp, Heterodera glycines
atggcggtacgaaaacggcggtacgaaaacgtccaaaaggtacatcagaaaccaggggttttcagtcatttttggccataacttttttgtcccttaacgaaattttttgcaattttgcaggctaatagacgacacttagcgctatcaaatgataccatcaatgtttgatttgattgaacatgaaaacagttatagtccagggaccaaacgtgccccgggtcccaactgatcgagtccgggaaaaagcgcatgaaaatggagggggggagggaaagtgatcaccgatcttgaaaaagtcatctcgtcgatgagggacgaagaagaagctgttgacgaattggaattgtgttgtgctaacaacagagagagagagagagcgagggaaaaatgtgtaagcgctaaaatttaatttgacgaattttttatttaggaaatttgaattgaaattttctataaaactttaaggggagggggggggggggaccagtcattttaggtgagagttgcacccaaaaatacgcggaaatttatgcatggaagagtcccaaaatcagcgtttgtttttccccatcggtcgaatccttatcctgctgctgtaca

SEQ ID NO: 51633 - DNA, 2593 bp, Heterodera glycines
acaaatttaaaaaataatgggcattttaaaattcccttcctagaatatttattaaactcaaaaatttgtgtagatttgttgcctcgtctgcgtggtgctgggcgtttggctcatttttgaccgttacgcggtggacaatttggccaccgcaattggccacgtggtcaaaggccatgaaaacgacgagggactcagcgaattggtggcactcggaattcttttgtttatttatatttgttcatttcgttaaatacaaatttatttctttgctaattcaaataaaacccatttatattttgcaattgaattttaattttacaatttaaggcatcaaagcccaccgccgtccgtcagattggctatttgcttttgtttggcggcatcgccgtcattgtggtcgcttctttgggctgttgcggcgctgctaaagagtggcgtccgctgctttgctgtgtaagcaaaaacaaaatataatttaaatacaaaatttaataaaataaaataaatatttattacataattaaataaataaattcataaaattttatttttgattttaaaagtttcgttatttgttttactttaaaatattatccaaatgttttaaaatattttttataatgtatatattttaattaaatatattgttttatttgattaatattattattattattattcacttttcttcttcagtatgcaagttgtctgatggttattttggcggtcgaaattgcggcgggaatttacgcagcgatggttggtggcatcttttggttcaacaaattaacaaaaacaaattaattgtcagcactcgcacatgttcgacaaagacttccgccaaattttacgcgcttcattgcgcatgtaaatttattttaatttaattttgtttatttataaattctttttttaaatgcttttccatttttaggtacaatgggacagagaatggcgtggagggcagcgactcaatgctggtcaaaacggcatgggacaagcttatgcaagaggtcgaggagcagggataaagcacattgaaaagtgaatgttttttgaaattcagaagagttgttgcggcgtcgactcgcgggtcggcgaatttcagcagagcgggtggtatcaggtcacacttttggtcccataattcagccgtttgatcgataagcaatgatttttttttgacaaatgccacacacaaaattgaaaaataaatatttttaaaattaattggcttttaatttcgtagcataactagccactagccaagaaaaaaattaaattttttacagcagagtccgtataaaatgacttggcaaaatttgagaattgattgggctaaacctccgtgaatttgaaaaattatgcaaaactcggccaaaattgaggacaaaaggcaatttttgatcacagatgaccaaaggccgtcacgaatttccgcctgcgtgttgtccaccgaaaaagaatggcaaattggcaccaagttgcccaacagtgttcagatttggcgaggtgaaatcagtaaaattattagcaaaatatggaataaatataaaagtaaattcaaaaattatttaataaattttaaattaaaactaaatttttgcttagcttttgtttaattattattatttatgctatttgcttttattttttgccattttgtaaatttatgccaatttgtgaatgcttttgaagggctgttacatcaaaatcagagagtccatccgcgaactgagcatccaattcaaattggtcatgtggacggccattgtcatttcacttattcaggcaaaatgatatgtatttacatgtcaaaatcaccaattattgaactttttgtttaattaattgcttatgtttcgcttgtgaaggtgttcggcataattgtggctttttgtctgtgcaatgccatcggttcggaggaggcggcctattgacaacaacaacaaaaaaatagaaaatgcatctgtgctcattcattttatgctgccctttttcccattcgttcgttctttgccttttgtctaaattttacattttgtgaataaaatttcgatttgttttgatttttttttttgttgtgaattcgggaggaatgcttcgacttttctctccttttttctgccagttttaccaggtttttttttcgaaaaaaagcaacatttggttattgatgtgggccgaaaatgaactcagctacccattggcattacctaaaacccgtccaaacgagggggggggggaaggtcgaaacaaaagaaattaggtccagactttttcaaatgtcgaactttagccctatcatttgtttgttagtggaacagaaaattttacttttacttgcaaaaatataaatatttattaatatttttttttgcgttttaagggttgccatgaccatctgtattatgagcattatgttcgcattgcttttgccatttcttttctgattctggtcggcattgtcgaggtgaaaaagtgaaaattaatttccaattttttttgattttccaccatttttaaactcctcccccatttgccatttgttcagctgttttgcgttctgttcacccacaaattgcacttccgt

SEQ ID NO: 51634 - DNA, 164 bp, Heterodera glycines
atggcgccaacacttcacatttccatcactcaatgcaacaacaattccacgatgatgaaaatggcttggaattatttgccactacggtaaaaagctcaattttttgtttaaaaatggtatttcagcggtaacggatcactattttattaattttaatgaaatta

SEQ ID NO: 51635 - DNA, 884 bp, Heterodera glycines
atgggccggaccgtcaaagacgaagaaataccggaagaaaaagagcaaaaaggcgacgagacgttcgggcggattcccgattcatcaattcctaaatcgctgattttgatcacgttcctctccatttaatcgtaccagccattatcatttcacctattttttgtcccattttcacttctttacaaattcatttctcatcggctggctaatctccggcccaagctttgtgcaaaacaattttgcacaaagttctttcttttcaatttctttaacttttcacatctgccaatttacattttatttttatgcgccatttctttgttcacacttttcacatcacaatttcggcccattttttgtcccatttttctcatcgcattatcgggccgtctgtcactccgcccattttgtcgaatgtctatttaagcggccctgcccaaggggtcgctctcttcgcttccttcacccccaaccattctttttattcgttttgctggacttttcgatcaattttttcaccatttacgcatttttaattcgtcgatcgcttctttaataaattttgtgtcggaatcgaagtctcgaattcgttttcgggggacacggtaaggagggaaaaagaccctcctcactccatcacattcgcctacgtcttttccctcaaccctcccggatcccaaattcccctcccatcagccactgggaaaaaattcgggagtgacccgaagtagcgccaaattcgagcagttcagtctcccaccagtaggagcagcggaagagacggggagaactcccgtcgtcgtcaagtccaagcagggcagtgaaggaaggaagagccgagcggtgccaaatcgtccgacgaaaggacagggccgttcgtcagc

SEQ ID NO: 51636 - DNA, 1086 bp, Heterodera glycines
atgtacaatccgcaaggcattattactctggcacagcataaagtagcagagcttgaagccctagccgacattgattggcggctgcacagctgctttaacttaagctgtgtgcattttagcctgccagacccgccaacttcaattgccaaaaatactgacgcggcaattgaagagtttttctttggcgatgatgatttgaatttgcctccagggcaaccaaatcctcgtccacagccaaatacccctccgccacttaacagcgaccaacagaaggtctttgatgctgttttgttggcaatacagtcgaaccctagggattcgactgtcccccgccgtttcttcatatacggcgatggaggcacaggaaagacattcctgtttggccaaattattaggcgcttgcgaaaggccccatacacctacaaagtgcttgctacggcatccactgggtgtgcagccattttgctgccatatgggaaaacagcccattccacgtttcgtctgggtagagaagtgtcattagacaaactcccaagcattccgctggagagcttctttgcccgtcggattcgtgaggcccaactcatcatcattgatgagatcaccatgcttcacaacacggtgattgaggtcatcgaccgagtgtgcaaagagatggcaattcgccagcacaaggatctcctcttcggaggaaaaacggtcattttcagcggtgacttcaaacagtcgctgccggtcgtgcctcatgaaggcttaaccgctcaggtgacagcctgttttcaaacgtctccgttgtttggtcaattcaccacgatgaaattgaccatcaaccagagactgggccaaggtcagcaagcgtacttgcaaatgtgccgccaaatcgggctcggagaaaccggagagcacttctggattcctccgcagttcctcgttaagagcaaggaagagctgatagattatgtctatcctaacttccaacaactccttggcaatgacaaagagctgctcaatcgtttgattctcgctccgcacattgacacgtgtgatgaagtaaacgagatcatgatggcgaatgtgccaggtcaa

SEQ ID NO: 51637 - DNA, 111 bp, Heterodera glycines
atgtctttacaaccttcaccattcaatgggtcaccagagaagccggatttgcattggcaatcaaagccaccgacaaaatttgtgcacaccgtattcgcttgtgggcatacg

SEQ ID NO: 51638 - DNA, 1331 bp, Heterodera glycines
atgcaaattgtaaaaatttggatggcacttttcgctgtgaatgccatgatgggtttgagcaagtgccaaactcatcggccggcaccaaatgccaagacatcaatgagtgcgacgacaaaacagtgtgccatcatgcagcaacctgtacaaatgtggagggcagctacctttgccaatgtgtggacggtttcattggcaatggcaaagagtgccatggtaaatattaagttctaaatttatgaaaataaattaatattaaatgcctatgaaatattattgagcaaaaatatcactttgaagccatatatttgtgtacagagttctttttttttattatttattttttgttttttaaaacaaaaacaatatttttttagccaccaaaaataaaatttgaaatttaataaggaggatcaaatttttgtaattctcgactgctcctgtcgttatcgcaaacctacaacatgtttaatatttttttaaatttagttgaaactttgaaaattgaaaattttgtggttaaaattttagaaaaaaattgtgattagggtattcaacaaacacactgttgaaaaaatatttggaaagattgcttttgttcaacaaaagtgtaattctatgcttttgaaagttttaatttttttaaaatatttgtcaaatattttaaatataattttttttaattttagagacaattttgtttccaattgggcagaaacgcaatattcttggaatttcaaacaagcaaatggattccaaagttgtgcaattggacttgccaatgcaaatatttggacaaaattattcccaattttacgtaattttaaaatttattttaatttattattttaattttcattttaaggtctcatctaacggatatatttcatttaatcttcgcttcaatgacacaatgaattttgatgaaatgtttaaaaattttcaattcaatggcggtgggccaatatttttgccgttattagcaaaatttgtgccaaattctaatgaatttatcgacattcaacaaattgatggttagaaattaagatgttttttttaaattttttataaaaattttgtaccagttggcaattttactcttctcaaagcttcgatttttttgaaaattcttaattaatttctgcaacaaatccaaaaattattttcggtactattttataatagaaacgaaacgttttgcagattttattcaaattattttgataaaaataatagagcaccaaattttatagggaattcgaaaaggaagacaattattatttatttattttaatttattagtttaaatctcgtgtaaaaaattattaata

SEQ ID NO: 51639 - DNA, 475 bp, Heterodera glycines
atgtgccagctcatccggttgagttcttcacagctgctgctgctgctgcccaaaatctgtggttatgttacaccataatgttgcggttgcgaatgccgtacatttgcgacgcgtgctgctgctgttgctgctgctgctggcggtggtgccgttgttccgccgcccaccgtatacggtgcgcagtgcgcgacggtagtccgtgctaaagcgcgtaatactacggtaaatggaaaagccagaaattttttaaaaagacagaaaattcagcgtttttcaaagaaaatctttaaatttccaacaaaactgcccaccttatttaaattttttaccaaaaaaatattcctttgacataaattgtctgttaattgccagccaaatccaaaatctaatttgtttaaaaaaatataattcagttacaaaagtcaataatccgtaattaatttcagccctgatcccgattgtgctgggacgttag

SEQ ID NO: 51640 - DNA, 58 bp, Heterodera glycines
ggattgctggggtcgtgagttcgagtcccaccgggcgagttaccttttatgttctaca

SEQ ID NO: 51641 - DNA, 392 bp, Heterodera glycines
atgccgggcaagaaaaatggagtgttgtgcaagaagccggccaacaacggacagaacaacgagctgttcgacaagatctgtcccaacatggccaccaaatggcccgtcgcgcgaaagggtcaggcaaaccacggcacggccaaatcattttaaatgctctccctaactttttatcagatcggcagccgattagtccgccgttggtagcacaatcaatcataaaacggagtggccaactcggacaacctggagagcctggtctgcgagttctagagggacaggccagagaaacagctgcaggccaatctgatggactcggcgaattcgacgggaaaaatcaactcggacaaattgccgcgtccggtgcacttggttatcggcaacacggatga

SEQ ID NO: 51642 - DNA, 6330 bp, Heterodera glycines
aatagcccaaaaaattaaaaaatttggtcaatttttggacaaactcttaacaaatccgacggtaaaaagttgatcggaaatcaaattattaacggttcataaatttgactatttttttcttttcaaaaccacttttgcggtggaatttttcaaaaaaactaggaacagggggtccggcggtccttatcagggatggcattccgaggcccaaaaaatgtcggaaaccggaagtctttccgtgccatacccatacctggtgcctatcgacatctgcgagaaattttatgaaatttaatgcgatttgttaacagattttgtctaaaattgatcaaatgacgcatttttgactcaatttctacaggattattaagtagggttgcacccccgaacgtcggggttagaaaagtcggggttcggggttgtcggggccagcaagttcggggtcggggtcgaccaaattgttcgggtcggggttcggggtttttaaatttttaccttgtgccatatagtcaaattataatttccataataaagttttatttgtttatatttatttatttttttttatcataaatatttttgtatgctttaatatcttgaaaattttaaaattttttattttgtcggcaacattatgtctttttggcggcgacatttctggtgcatcgaatttctatattaataaatgaaattttgccggtttttacaaatataaacatgtgaaaatttaaatttttcccaatccggaaaacggtttcggatccggcaatttgaaaaaagtgaatcttattcaaaaaatgatcaaaaatttaataagtaacttttcgcatttgcaaatcaatgtttcatattgttaaattttcttctttcatacggcctgccaaatgtgactttcttctccaactttgagctgatcacggctcagaatttccaggaataacttttgatcaattggtaaaaaatcatccgatttgatcaatttttccatgttattgtcaatgtaagccaagcaacgaccagcaaagtcccaaaataaaagtgattgaaattattatttataattcaaaaattaatttttgtacattttcttgcagaagacgagcttcggctaaggcaaggaaaacatttggcaatttcgaaatgggaaagtcggcgaatgcttcgatcagaccgatgatggcatattttttggctaaataataaataaataataattaatccattggtgaaataaattttaatttttgacccgcataaaacacagccattgcattttgtccgtccaaaacactcaaattgtttgtgtaaataaagcgtaacatcgccttaaatggcacggcacaaatgtcagtgaccaccacagggttagaaggagcttaaaatgaaaaacgaaagtttaatttaattaaatttgatttaattgtccaattttcgtacaattccccgccattgtcccattttgagagtcataagcgaacatcgcttcgcacacatccgaggcggccatcagaagggttttatgtgccgcaatttgcttaaaaataaaaaaccattttttatttggccattgcaccctttgtataaaacatgaatatgtatgtatacagtaccaaatacaaatcattttcaattgtacagtagacactgaaaaactttgtaccgtactaaagacaattcctgtcccgattaattattattttaattgatatattttttaaatcgccctcactcgcctccttttcttcgtcttctgcaaccaaaaagtaaacatccgcgccattgcccgtgttcaacaaaagttccaactgatcaaccaacaattttggttttggcattgtgtaaaaacaatttcggccaaatttggaattaaaagctgaaaaactttaaaaaggtaagaaacaaaattattagagatcggtattttgaaaaaagcctggacctggattccatgttggacctggacaaaaatccaggaaaaatccaggcctggacctggattttttgaaactcattttaaaaatcaaaaaatgtttgaaaaaattaattatttgcttagaaaacatttaaaaatatctgatttataataataatgtgtttttaaatttatttaatctttttttgaaaacttgaaaaaacttcggtcacttgaaataataaattctaaaattttgtccaggaaaatccagttttttcctgtttgcctggacctggatttttttcacatttgacctggatttcctggacgaaaatccaggtccaggaaaaatccaggttgccgaaaaatggcctggacctggatccaggtccaggccgatctctaaaaattatcaagtggcgaaaagttgatgagaatctgaattaattgaaggattgggagacaaagtttggcgggaagagagtcccgcgcagaaatttcgcaaattttctaccagaacccgtctgttctggatgaattgttaatacctggacacagcaaattcaatttgtaaatttaaaataattataaatggaaaatgttttttttaatttgcccaatgatttgaggaaaggttttttgagactaaaagtttggtgttttttttaactttcgtatcgacgaaaaaactgcagaaaataaatgtttgagaaaaagtaaaagaaaaactcagtcaatgcaaaggatgagagaaaagaaacggaagagacaaaagggaaaagaaaaaaaggaatatttgtctgactaaggcattttatgggcagaaaagcgggtcaaccaaacaaaccgcgaccgaacgtgggtcagccgcggcggcgttgcgagccaaaatcggccagcaaaaaaccaacgccatttgagtcattaggacgctattaatgagtaaataaaaatacgctaaataaaataggataatatcaaaaactttaataacgaaaagatgggtgaaaagtccgtagaagtgaaaacaataaaaaaaacacttataactttgtcaaagatcttaagaaataatattggaaattctcaatgtcaatgttttcccgtttccgctcttcgtcgcttttcccttaagccttgtatgcttctgaaataccgatttcggcacgaattttcagtgcctttccaatcgcccagccgatcccgaccaaatccttaaattttgatacatttcaaaagcatttcatttcttggcacctccacgggtttttcgataggcgagaagggataaagcatccgatctccaatggactggccaaaaaaggtcctcttttgctcatttcaaccatttaatatacccaattaaattatggaaaaatatgaaccaaatcttgcaattgacaaaaaaggcggtaagccatttactggtaaagctaaaataaaatttgtcagtaagttcattagcaaaatgctcacttaaaaataaacaaaaattaagcattcattgacaaagtaaactcatctcaaatttgccgaaatcagaagagcataaggaaaaagatttataaaaaaagacaaaaaggctgtcaataattaaccacaattaaataatgtcagaattttgtttactctccaaataatcatttgataactttgaccatcgatcagggattgatcaatcagatgaagctgccacattcttccggcttcgtgtcacaacattttcgcgcattgcaatggcatttagtcgtcgctttgtggcagtagcaaatgtcgtccaaatgcattttcttcccgcactttttgcagacgaatttcgactccaacgcctaaaatggaaatattttattgtacaaatttcaatttgaaaattcaaaaaacaaaacatcttattcatcagtgtcagcccaaatatcctttaacaaaaataggcccattaaaaaaagtagcgggtcataaaaagagaaaaatggacaaaaaagaagccaatttgggtttttgaacataatttaaaaaaattagtggaagcttaagtctcttggtaaattttttgctagaaaatgttgaatatttggtgcctttttccattttttcgtgccttttttgccatttttgtatttttttatgccttttttcatatttttggtgccttttttaggtgcctatttgagaaattttcgtgcctaaaagtccggtctctaattatcacccaagtttttgaatgttgttaaaagtagttttttaattttagtgataaatgtttgggtgataatattatacaataatggtggaaaaattactgtcccttggggcccagttggcggggcccagttggttggggcccagttggcggggcccagtcgacccccaccgctgattcccaatccctggtcccggatttttcaaaattccgggctgaatttttaaaacttttttcccactttagttccacaaggtgcccccaccttcacacgcaagccacagattttgcaaaaaacatcagactctggcgacccggccattgtgttcgacatcggatttcaggttaaccatttgtaagagaatacaaaaaataactttgatcctaaaaactcggccaaccaaacgaacaattgtcaatttttatgatgaaatttcatgttgcgctacgttatttttaagaaaattctagaagatatttttggaaaaatcgctagtttcattttttttttaaatttttaaacaaaaaattttaaatttttttttcgagtttaaaagatatgtgggcgagtgaaaacgaacgctttccaaatttcttgattcattcttaaattaatcatctcattttttatgcaggctgaccaaaacccggaagtgatttggctgaacccgaagggcaagaaaatgaaggagtccagcagaatcaagtttgggttgacgccggacggcggcgctaacacttacaccgctcaattggagttgaaggtgaccgaaaataaattttaaaaaaacttgggatataatccgaataatatgcaaatttttattctaaaatttcaatttcttttttttttgcagaattataaggcaaaagacagcgggacgtacacgtgcaacatcaaaaatgacgcgggagaggcgaatgtggagctgacactgaacatcgagggtcagtttaaccacaatttttttaaatgactaatgacacaacatttaattatcggtgtgtttgggagtgaagtgagtgaaaatgctttatctaataccaaaacaacaccccgaagggttaaccccccccagactcaaaaaatttcaacaaaaaaaagttaccacgtttttcttaaaattttcgtttctgacaactcactaatccgtgcgcggtttgaagcttaaaacccgattaaaccgttcttccaacaatctcgcaaagtgttgatcaatcccctactggaaaatcaaaccctgctaattaattgatcatttctcgcaatcgcttccagccccttttttgttttattaaatttttgccaattgcccatttaaaaacagcatttttttttgttcgttatttttactaaaaccggaatatgtatcaaattgactttattttcgataatttttcaaatttaattttggtgaaatttcactgcaattctcttctagcagtactttacttttttgtaattttgggcaaaaaaaaagtcttgcatcctaaaaccaattttttttttaaatttcttcccctgaaataaaaaaacggttttcccgcaattttagacgacgaggtcaagcaataagccagagaacagaagagcgcgcaaactctatgcagtgtttaaaatggtgctgtgtgaatgctgttgttttacaatattattcatcacattattattattttatgtgtatgccgtgtgagtgtgtgttggttgctctctcattcttttatcatcatatctcttctattagatttgaatttcaaaatgataattaatttattttattgtgcaaatttgctgatcgaataattattgcataatacatacatacaataactcaacatattgttttattttaaattataatgaacccgattcaattaaaataatacgattaatgcaattggcacatttctagaatttttagtgggcccaatgaaaaaccataggtgaattcttattagttggtagttttacaatcgaaaattacatttagtataaataacaatctatgatcagcagtgaccctgaaacattaaaaatcaaatggtcgcttttatggtttttcttcgggtccattaaaccagggtgccttaattatgactaatttgatgcaccgaaattctaaccgtttgtgtttaacaatttgacaaaaaaacattatttattttttccttgttaggaccattggacgatgctggcgacgacgaaagtcaagcc

SEQ ID NO: 51643 - DNA, 621 bp, Heterodera glycines
atgccaaaaccaaaattgttggttgatcagttggaacttttgttgaacacgggcaatggcgcggatgtttactttttggttgcagaagacgaagaaaaggaggcgagtgagggcgatttaaaaaatatatcaattaaaataataattaatcgggacaggaattgtctttagtacggtacaaagtttttcagtgtctactgtacaattgaaaatgatttgtatttggtactgtatacatacatattcatgttttatacaaagggtgcaatggccaaataaaaaatggttttttatttttaagcaaattgcggcacataaaacccttctgatggccgcctcggatgtgtgcgaagcgatgttcgcttatgactctcaaaatgggacaatggcggggaattgtacgaaaattggacaattaaatcaaatttaattaaattaaactttcgtttttcattttaagctccttctaaccctgtggtggtcactgacatttgtgccgtgccatttaaggcgatgttacgctttatttacacaaacaatttgagtgttttggacggacaaaatgcaatggctgtgttttatgcgggtcaaaaattaaaatttatttcaccaatggattaa

SEQ ID NO: 51644 - DNA, 1174 bp, Heterodera glycines
atggccgggtcgccagagtctgatgttttttgcaaaatctgtggcttgcgtgtgaaggtgggggcaccttgtggaactaaagtgggaaaaaagttttaaaaattcagcccggaattttgaaaaatccgggaccagggattgggaatcagcggtgggggtcgactgggccccgccaactgggccccaaccaactgggccccgccaactgggccccaagggacagtaatttttccaccattattgtataatattatcacccaaacatttatcactaaaattaaaaaactacttttaacaacattcaaaaacttgggtgataattagagaccggacttttaggcacgaaaatttctcaaataggcacctaaaaaaggcaccaaaaatatgaaaaaaggcataaaaaaatacaaaaatggcaaaaaaggcacgaaaaaatggaaaaaggcaccaaatattcaacattttctagcaaaaaatttaccaagagacttaagcttccactaatttttttaaattatgttcaaaaacccaaattggcttcttttttgtccatttttctctttttatgacccgctactttttttaatgggcctatttttgttaaaggatatttgggctgacactgatgaataagatgttttgttttttgaattttcaaattgaaatttgtacaataaaatatttccattttaggcgttggagtcgaaattcgtctgcaaaaagtgcgggaagaaaatgcatttggacgacatttgctactgccacaaagcgacgactaaatgccattgcaatgcgcgaaaatgttgtgacacgaagccggaagaatgtggcagcttcatctgattgatcaatccctgatcgatggtcaaagttatcaaatgattatttggagagtaaacaaaattctgacattatttaattgtggttaattattgacagcctttttgtctttttttataaatctttttccttatgctcttctgatttcggcaaatttgagatgagtttactttgtcaatgaatgcttaatttttgtttatttttaagtgagcattttgctaatgaacttactgacaaattttattttagctttaccagtaaatggcttaccgccttttttgtcaattgcaagatttggttcatatttttccataatttaattgggtatattaaa

SEQ ID NO: 51645 - DNA, 1218 bp, Heterodera glycines
atgcgccaattggacgcgtccattctcttcaactttccatcccttcgttttgtcggtttcattggcgacattttgcccgaatttccgcccgccgacgacgacgacattgctgccaatgcgtcgtcggatggccaagcggtggccaaatggctgttctcgccacgccacgacaatttgccgaaactgctgcttgtcaccattgtgagtgcgtcggttgaccaatggttgacaacagtggaacaaatcaaagcggtaattatccattattttaattagggtaagtcgggaccgggacttttcgggttgaaaaaccgggactttttggctgggaaaaccgggaatttccgggtataaatagttgttaaacgaatccaaagcttttacccaggaaaaatgtacgtttggaaaaaaatttcgacttttttgttcgaattcgggtccggggttcggaattgggcaattccgagttcagatccgtgatcagcgccctcgaaaaccctcaatactcattttgagcgaaaataaaaaaaagttaaattagggacccccattctttacgattgcccgttttttccctttttttttttttaggcattttccatcgcttcttctcctgttgctttcagcatttgcgttgtatttccgtattcctttccgtttcctgttgttttgccatttgaacacacaaacgaattcactcaagagaaattgagactgtcaaaaaaatttgtgaatgtttttaagctgatccgttgttcaattgcagcagcagacgatgaaaaatggatgatggaaattgatgaagtgattcgagggcaaaagaacagtaaaatttggatttgcatcggagacgacggagtcaacaatgggtgaacaattttaaaaatttgctaattttctcatttttatttttttcagtgttttcgacggattgcccgggccgagtggtgatcagtgatcagcgacagcaaaaaaaaaagtgaattgattgattgatgagattacaccgatggatgagaaagaaaaatttatcttgggcacaaaatattaaatgtatgtgtaaatgccttaggttggattcatgataaaaacagatttttttcaagaaattttttctcggcatcgttcaacaaattctccattttcccaatttactccttaggcttgactttcgtcgtcgccagcatcgtccaatggtcctaacaaggaaaaaataaa

SEQ ID NO: 51646 - DNA, 656 bp, Heterodera glycines
atggtggaaattgaaacggtcattttcccctttgaaaacattgtgtgccgacagttcgacgttacggtcaaagtgctcaaatggagatttatgtacaacaatgagtcatttgtggtggcactaaataataaaacgggggtttttaaagggcatttaacaggcaaaacaaaaaagcaattaagggaattgtttcttacgatgagttgccagtgatttacggttctgtggagcatcggattgacttgggaaggcatttagtccttagcattttcccattgctaaaggacgaagcgatttatgaggccaaattgtattgcatagaaaagacgaaagcattgatatcgcacttccaaattgatgcgaaaatgtgccaaaaggagtgttcaaaaatgatttttcacaaggaaatccaatgcccaacggaccaatacgatattaccgtatggaaatggaataacgcagcggaggtgtgctattggttattattactcattttgatagacataaaatgattcagaaagcatcaatcacccgtaaagaggtgcgcatgcattttaccaaactgttcattatggaaggccaagagcatcggataaattatgtcttggaacgcgacaaaaactaaaatttgcgaggaccaaattgacaaaattaaa

SEQ ID NO: 51647 - DNA, 548 bp, Heterodera glycines
atgagatgcttaagaaaattccgtcaattattttgggcaaaaaacccatcgaaaaattttgtgaaagaattgtcggatattttcacggaatattcgaattcgtttatggaaaattggatatcttttgagaaatttggaagcaaaaattttgaccgttaccgcgcttttgtgtggaagcaaatcacagaaaaaagcaaaagatctgaggaacgaattgaaatggacaaatttgttggcaaattgttcgagcgaaggcaattctttgagttggaaaaatacgacgcgaactttgaaaaactttttgccattgtgagaagaattaaagcacgcgagagcaaagtcatgcgaattttcatagaaatccccgaaataaaagtgacaaatttcagaaagtttttattccgaaaattattggcggaaatcgaagcaatggaaacgaattttatcaatgaatgaatgaatttgacagcacaactccgaattgaaaaaccccaagtcaaatcgatggcatttcaatattatttcttttttatggtgtccgaaataaa

SEQ ID NO: 51648 - DNA, 324 bp, Heterodera glycines
atgaatgggagtgggaacattgtcaggcgtttcttcctatttcaaataaaatgtgctaatgctcttacgaaaaatagaagaacggtttttcgctgctatattctttgctcattattacactgtgttttgttaaattttagaactcaaaattgataatttcaatataattagtagggttatcagccttgaaatatggatttatatggactaaaaacctttaccaaatcaaaaattttaacgtagtaatgttatttttaagcccctttcttcatagcatatgagcagaaaaaatttataaccttaataattagtcataaaaataaa

SEQ ID NO: 51649 - DNA, 1948 bp, Heterodera glycines
cgatgaaaaggcatttgaaagccatccttaaagtcggatccaaaaaagaccgttgcgtcgcttatgataatcctgtcaattgtcctctttcacagattgcttcctggacggagtcggcaagccgatctttcatgcccacgccaacactttttacggcgcgtggatgagaggttgggttaacaatgatcacaaagtgatcgctgatacgaaaactgtttgatcaacagaatattctctgatcaattaaatgtccatgagttcttttaaattgccaatacggaattggccataaatttgatcagatttgaccattcccatgcttttaatctccccctccctctcagatgcttatccccgctcggctgctgacttaaacaaacgttggttggccgtccattttgaaggcgattctctcatggaattcgcttccgaggccgaccttcgcaggtgagtagttctcgttgcatcaaggcacacagtcttctgctttccttgcgtttgcttcagttttcgtgcttttcttcattttccatttctgcttttccttttaatttttcgacttttcctctctatttttggcttttcctttttgattttcggcttttcccctttgtccccccaggggtcgtccctccgtcagtcattctctcccccaccctttccgtggctccaattccgtcttcttcaacggctccttcttttatcaccgttctggcactccaatgctggccaaatatgagctgcattcgcatcgctatgacgaagttcaaatagcggaaggaatcgcacataaatacgacgacgttaaaattgaaaaaaacaaatttaaattaataaataaattaaaagcatttaaataggcaattattaaaatttagctcaaaatactgtaaagaaaaaaatacatatgaattaaatttagtatttgttcaatgcttccaaaagttacatggacattgcggtggacgaaaacgcactttgggtactgtatgacaccatgagtaccgtactgcttgataaatttccattcccatttatttatttgttagttgctgttccatttcgaagacgtcccttatctgagcgtggccaaaatggacatcaacaatttgtccatgtacagcatatggaatctgacaatggtatattttaccatttgtcattaattacctaattaccgccaaattgattaaaatgcttttcccacccgcacggatcatgaaaaaacgtcgccggatgcttttttgataaatttttttcctttctcaaccatattaagcattctttttattgttctgaagcacttgaaaattctattaatctgcaaatttaaaattctttttcatatacaaaaaaatcagggcaaaaaaatacgaaaaactaagtttttgagtccttaaagccaaaatttaaagaaatttttgagatttggcagaataataacaaacacattagctgctagctatccaactaaaccaagaagacttaaatttgattgacaacaagcaaagttattgtccaaaaatcttccggcgccttttgcgcggaaccccgccgattgctccccccccctccccgcctcgccttattttctctcttttttcagattaatcacaccgatgtttcgaacggatttgtcctctgtggggttctgtatttggtgcgcagttccaccgaattgacaacggacatttcggtggcgttcgacttttaccgggaaaagtaccgtcagccgaacatccgctgggtgaatttgtacggaaatgccaatcacatcacttacaatccgtttgatcggtcagcgggggcaattaattaatttatttatttattaattgaggacaaatggcggatcgatggccaattgaaaccaaatgacaggcgaatttacatgtacgaccacggctatctgctgacattgccggcacggatcagttggagagcaaaa

SEQ ID NO: 51650 - DNA, 204 bp, Heterodera glycines
ctgccctcccactacgaccgcgatggtgccaatgccaatgccaaccatgcgctgttggcacggggcgacttggccaacgacgacggcaacaacgatccgatgggctttggccaggcggaagcggaccaaacggcacgccatcggcgcgggccggcactcatccttctgctggtcgtgttgccgctggttgttggcgcatttaca

SEQ ID NO: 51651 - DNA, 599 bp, Heterodera glycines
atgccaaactataagttttcgtgttcgctgatcgcgaatccggtatgcatttctgccaattccaaatcccggacccaaattcgaacaaaaagtcgaaaattaaaatttttgcttttcatattattggttagcattgtttaaatacacggaaaggaactgaaagtcatcagtgcttcaattaaaaataatttaaaccatttttagactaaaaatgaaaaataaaaaaatttaatttttcgatttcttgttcgaattcgggtccgggatttggaattggccgaaaaggatgcctgattcgcaatcagcgaccccgaaaactttttgccagttttagagcctaaaaattgcagccttagtcgttaccctgatgattttttttggcgatttttcttttttttaccgtccatgcgataaatcaatgaattgttcataaagcgtacacctagccaaattttacaaaaaattcaaaaagtcgattgataagaacaggattgtaaatattctaacgattcacgatttacaaaatcctctgcaagtattctcaaaagaatttatttagaatttaaataccgaatgaatttaattcatgaaacaataaa

SEQ ID NO: 51652 - DNA, 221 bp, Heterodera glycines
atgggattgtggtcaacaacgacctgccccttatgggattgtggtcaacaacgacctgccccttatgggattgtggtcaacaacgacctgccccttatgggattgtggtcaacaacgacctgccccttatgggattgtggtcaacaacgacctgccccttatgggattgtggtcaacaacgacctgccccttatggaattgtggtcaacaatattggatag

SEQ ID NO: 51653 - DNA, 177 bp, Heterodera glycines
ccgggactcaaatgtcccgctgaggccaaaatttttttctatttccgggaaaaaatcgaaatttttccgaaaaaaataccagtcgatagagctcgaaaaactatgttttggaagtggtctccgtttctctgggaaaaatcgttaaaaaatcctaaaattcaaaaacccgaaaaccta

SEQ ID NO: 51654 - DNA, 534 bp, Heterodera glycines
atggaacggctaattgccaccagtgaaatggtcaaaggtgttcaaattgttcaggaaaagccaggaagtaaaataaaaagaaaaagtaacattaattaaaaattatttattaagcgccaataattgctgtcattgtgccaaagtcattcaaccaaataactgttgctgatctgaagcaagaaatgatcgcaatctgccgggaacagaaggcaaattgcatgattaaccagaattttatatttacaaaataaaatatattttaaagtataattaatttttttttaactaattaatttaaatatttaaattaaattaattgaaaatttcattaaaaattaatataatttttttttattaataatacatataaaaaatttttgaattcaattttttcaatttagcttaacccgcccgaacaggtggccattgtgaaggattttccccgtgtgaatacgcgaattcaaaaatataaaattcgtgaagaattgaatgccaggaaattgtccttatattaattttttagaattttaaata

SEQ ID NO: 51655 - DNA, 1256 bp, Heterodera glycines
atggccaaggaatatttttcaattgtcatcaaaatgcttggccaaatgccaccgaaaattaaaaatttgttcgaaaatgacattgaaattttgaatttcaaatttaaaaacaaatatcaacaaaacattggtggcggaggtggtggaacaattaatttggacaaaattttggtggaaaatgcgatggattatgatgaggacacacttcgccaaactcatcggagtttaattgaacgtttcgccataaaaattggcagaatgttggagatgacaataaacaacgcttttgtgccgtcgaatgacataatggcaatcattgaactgcacatttatcaaacattttcggaaggactcaaaaagtaattttgttttttaatatttaaattctaaattaagaaagaattttagtattggctggaatttttagcacaagaaatctaggaaattttttttaaatccaaaatttggtaatggaaaaattaattaggaaattaaatttttaaaaaattcattcttaatgacggcaatttgaacaatttttttaaattttaaataatgctagaattttttttaccaagaaaacaatatgaatttttgatataaaaagcttcttaattttttatttaaataaatacatgaaacaattagcaaaaaaaaactaactttttattttaaaatttttttattaatcatttttaaactaagccaaatgtaaatttttggcatttattagttaaatttgaaggtggaataaaatttcattttctttatcggcccaaatgcacgatttgccttctattaaaaaattcattttgctttatttatgaaaataaatatctaaattttatttaaaaattaataaaatctgttacgatttgccattttaagtgttgccaatcccccatttcatcataaaatcgccaaaccaaatcattaacccttttatattaattaaaatttattaattttttagtatttattaatttaattaggtcattatttaaattttaattgaaattttttaattaaaattaaatttaagctggaataaaatttcgaaatctttatcggcccaaatgcacgaatcgccttcaaaattgccaattgatgtgaaactgttgaccaaatattttgtgtcaatgaaaattgcgatttcatttatcagtgcggcaattgaagtgccaatgttcacggattataaaaacactaagagcattcaattgataaaaagtgggtattttttacagaaattttaa

SEQ ID NO: 51656 - DNA, 702 bp, Heterodera glycines
cggtgttttcatccgtcctttcccatttgttccatgcgtttattccatgcattcaccggtgattctccggttaacaagcagtttttgctattcgtcatttttctgtgttttgtcgcaacggcagcggtgggaccgacgaggagaagtgcaattcgaaatgcgccaagggaagcgaaggcggacgaagcgacgccaaagtgcgacttgggagacatcgagctgaactcggaggaatttgtgcacacgtgcgacgaggacaaattcgaaaatgctaacatttactgcaaggggaaactgctggaggcaaggaaaagcggattaagtgtcattcaggaatcttgaaacatttttaaaatgcgaattgagaactgaaaatcaaaccattgaggggttgatttatgttataatataaagcgtttttttgaggcagttaattaccaccaattgttggatgacaatgactcgaaggactttgtggacagaccgttaagaaggaacgccagcgaagtgctacgtcaattcgagcagaaattcggaggacaaaacgaatcggcgagcagcatcgacgtggaagaattgagggattttctcgatgaaaactttgatcgcgcaggaggcgaactcaaaaagtgggaaaacggacgaatcattgggaggggggcaagcaaagaaaatgagaaaggggaggaaaagcctaattga

SEQ ID NO: 51657 - DNA, 547 bp, Heterodera glycines
atgcagaaaaaggcgttttggttggccaccaaatgggtgctcagcaattaccgggtgtaccgttcggaagtgcccaggggcaacatgtgggagaaatacgcggtgaacaaattcaagccgaacaaaggcgttggcggtgaatacgaagttcaggtaatttgagggggaggggagggatttggtcgtcgcaattggacttttcctttgtcagtccgggttcggctggtccaacggagttatcctggacctgctgaccacctttggggatcggatggagttcaagaacgacttggaggaggaccccagcgcagtggccaaggaggtgatcaaggcggagccgcccaatttgcccacgcccaacccgaacattacacccgtactcaacggacccttcgtggcggttgggccgcagggcgaaggcattggaattccgaggccaagcggcgcccttcgaacagcgatggcacctcggcacacattgtgccgatggttgtggtggtggacaagcgtactcatggcactgctcgtcactcgcacaattcattga

SEQ ID NO: 51658 - DNA, 715 bp, Heterodera glycines
attgctgcccaaagactgcacgccgaattcaaacaattgagtcaattgccattacaggggtaagttctatacaataaattattctaaaatatcatgaatgaattactatactgttctgtgtaatgttaggtataagttgtcaggcgtccccaaacagtgagaacattttccaatggatcgcagtgatcgaagggccaaaagaaacggtttatgagggagggaccttttttgttgagctgaacttcaacaaaaattatccattcgatgcgccggaagtggtctttttgacgcgggtttaccactgcaatatttcaaagtgagaaaattataattgccaaagaattcaaattttaattagtgcggtttgatgatagagagatggatttttgatagtttgaattgaagggaccgacgctgggaaaatccaatttttaaagtgggaatttctaacctaattccattcagtcaaggaaagatgcgtctgcaggtgatcagtcgacaatcgtggcgaccctcctttggcgtggccaccgttcttcaggttttcccttttataaaataatttgctatcatttttttaatttagtctataatttctctcctatgcaattgcgacccatacaattcgttggttccgttaattggcgaacagtaccagcaacagccggaagaattcaacaaagcggcaaggatttggacagaacgatttgctcat

SEQ ID NO: 51659 - DNA, 483 bp, Heterodera glycines
atgtcaaaacatcaaaaaagtgctgttacgccaccaacgacgacgacaacggcggcagagagtggcggcgaaagagacggacgcactgagacgacaagcggacagcggaaacgacacagcgcaaaccaaacggactcggcgaacggcgccgctgggggacaaggtttattcccgggctttggtttctgctgggaggtgttcatgtccacaaaaatcgccacactgttcgtcattggtttgagtttaaaatggccgggagtaaaattatttgttttttcgaaaaaccatatcggagatccttttgataattgacccaggtgcgttttgaaatacccaagtccattgactcgttaagttaccgattgactgccggccaaacaatttgtttgtttagggtcgaataacgccgttgttttgtcctcttctgagtcggctgcaaaggaagcaaaggtcagaaagatgtcgacaacatcgcagaacaag

SEQ ID NO: 51660 - DNA, 408 bp, Heterodera glycines
atgaagcgaaccaacgcaacaaacatcaccccgcctcgcgccaaacgttcaatggcaccggcaatggacccaatcactgccgcactcgcagaacaagaacgccaacgtagattggtgtttattggcctcccggaaagcaatgccgtttgcccatcggagcgtgttcaggaagacagggaagccaccaccaaaatcttggaccatcttgaagttgaggccgaaccaaccaccgtctttcgactcggccggtacgacccgcagcgaacaactccacgcccgctcaaggtggtcatgccaacacccacacaccaacacgtggcactcggaggatggaagcgcgagcgtgctcgagttcgttctcaacagaaccagacccgtctgttcgtccgcccggcactgtccaaataa

SEQ ID NO: 51661 - DNA, 810 bp, Heterodera glycines
atgttgatcaacaatttgccgttttcaagcgtcgaagaggcggaaaaacaagcattggcccaatacccagatgctttggttagtttaactgatttgcaactttattcgggaaataagttcatgaatttcgagaaaaaaatgataattagtggataatgggttaaattttttttaaaaattcaatgaaaattgggtcccacttctgtcgaaaggtgaagccgaggaaaaaagtttgaattttaaattattaagaaaaatgaggtactttatttaaatttcactcattcaattttgactaaaattaaaagaaatgctacaacacaagaattaatcattaattttaataaaatggtatatttcgcacttccgaaaataaatttatttaaaatataaaaaatttcaataaaattaattacttttattacaatagaatgcaatgcaagcaatgtggaacaaagtgaaggagatgaagtcatgcttggcaacctgttttgcagggcgagttcagaatcaaactgcacaacaaattgtgcaacaattttcggttaaatcaattaaataaataattgtcatcaattcattaattagtctcaattttccctaattagagttccgatttcacgtcaatgaccccaagggacatgtgcaaccaaggcgtgaatatgcaccatcagttgtcagcggaggacaacaagaatttgcatgcgtgcagtgcccaacagattggcacaggcatggagccattcggaatgttcaaacatggccaaggtggacctgctgctgatggtatataatttttaaaaatttata

SEQ ID NO: 51662 - DNA, 882 bp, Heterodera glycines
atggctgaattgttattgtctaatggacaagcgattcggcaaagaaaacgcgggggcgtcggggaggttgtgcaggaattcgatgcctttctgaaggtttctgacgatgtcaaagaggagccgaaagcagtgaatggcatttgttagttttggtcttttacaattcagtcagtccttcttcaatttaagtgtttgtgctttgcttccttttggtcgccgttcttctcattggcgaactttacaatttcatgaccaattctgaagttgagtatcgttttgctgttgacaccgactttcaagagtaagcaagctcataggattttgcaaatatataaaaagttttgcacttttttgaagaatccattttagtaatccgatgttggacattgacatggtcatcgccgccccctgcaacaatttggccattatgccaatgggcgtcgattcgttggacggcgagggcacaactcgcttaaagaagagcccaactcggtgcgttctgctgaaaattttcatgtgctccaaatatttagatatgaaatgagtcctgacgaagaagagttgtggacggcgttgcagcgagtccaccgggagcactttaagccgggcacttccctgaaggctttgaacgaagttgtctcggaaaggaatttgaatatcacaccgaatttgcttcttttcagataaaatttgtggacgacgaaattgaggaaggtcttcaagaagtggaggaagagaaggagcggaatgagcgaatcgaaatggaaattaagcgggccgaggcaaaggccaaggggcgaggggagggcacggcggaagagcacgtcatcatgatgatcggcaacggattcggcatcttccagattatcgcctcaggacgtg

SEQ ID NO: 51663 - DNA, 863 bp, Heterodera glycines
atgcttaaaggatgtctgtacgttatcttagagctgattgctgttagtttgattcggttgggcaaatgttagaggcgatttaagcattttggcccttaatttctccggaaaacttggaaaattcaacacaactccgcctaaaagacagatttctgtctgcaaaagaaatagaaatgtgaaaaaagatttgttctttcttatttagcttattttatcagtttctttttggtagttattgagatttgattcgtttttatcaagtgtctctattttaaattaacacccctttttcgggaaaaaattcataaaatttttttccatcgtcatttcgccttctcctttttagaatcttaatattttcagaattgctacgtacagttaaaaattcagctcgatcggttcatgggaagtggtcaaactcccaaaaaacagggtgtctttattttaaattaacacagtgtattggtggctaaaggttttaaaattggaaaattcgcctctttcaggtcaaatcagcgttgttcaattgttgtcgacgcaaaatggacgcattggtgggacggttggggcgaagtgcggcggcggatgcgtattttgtacgatgcattcggccaaatgagtcgccagcagaggaaaatgtatttaaatagtaccaaaatcggcattggaaagattttaaattttaataattaatccgattttagcatttcgaccgttccgtcgtccttcgccaaatgcgtcagatggatcttttggccgttgtcgagcagtgtcgcgcggttattcacagccagttttggatattcgcactttgttggcgctacattattctcgagccgattttgcgtagtcctaaattaaaa

SEQ ID NO: 51664 - DNA, 896 bp, Heterodera glycines
ccttcgttttttttctggactgagaagacagaaaatctcctcgacactgttgtggactccttttccgcccaactgttgctcgcattgtgctcgcttctcaccattggcattggcttcttccggatgttacgctctgcggcagaatacgaagtgagttcaatgcgtgaacacagacagcacatcagcccgacaaaaacgcgaacaaattgcttttcagtcaaatcctatgctttttttgatcaaattgaaatcagttttgcttttgtcgggttacgagttgcaaaaatttgcttgttttccattgagtcggttactaattttgtttttcatttttaagtgcttcgactattgcatggccctctattctgtcctttgctggtgttgctctgcttgggcctcatcgtgtttgctgctctattggacaccttattggtcttgcatgaacttccgtgcggatgacacaaatgtgccgttggtcacttttgtgagtttggccgcccatttgattctgcattttccaatttctggatttttcaggtgttcgacatcgtcatggtgtgttcgttcgtcttcgagatgttcttcaacaattcgctggtgaaaaaacggcccgagaatgcttcattcgctgccgctaatcgcaaattgcgcaacgatgtcgccacggaatgtgccaatgtcgccattcatcgccagcagcagcagaagaacggaagtgccatcatcatgcaaacttaagcagaggacggacgagtgggatgaagaatgatgctggtgccaacaaacattcaatgcgatgaaacgatataaagcataatatgtatttctcagctgtattccattgtattgtatattccattatatcgcctatatgcgtatgcatggtctcaaataaa

SEQ ID NO: 51665 - DNA, 482 bp, Heterodera glycines
atgccgacacaattcatcaaggtgttattaaaaaaccaactaataacaataaaaatgtgagttttataatataatgaattttattagtcaatcgaacatttataaaattttgtatgataatatacttatactttttaaaataggataaaccaacactgttacaaaaaattgagattataataaacgaattatataaaatttatatttaaatatatcggaaaataatatctaatagataaaaaaatgcatttttaattaacaattcatagttaaaattaaaaacaaaaaattgaaataagaaaaaaaaactcattttcagatagttaaaatccaaaacataagatttcaatataaaactattaattatgatgttttaaatactttaactaattttcaaagaaaaaatgattttttaatgaatttaaacataattcaaaactaaaaacaaaagtgagattcttacgctatcatatcataataaa

SEQ ID NO: 51666 - DNA, 870 bp, Heterodera glycines
atgtctcaaaaaagctgcatggaagattataagagacaaattgctaacgaagaaacttttaacaataaagagatcagcatgagattccctaatttcgtttcatttgcggtgggtgtcaattcaaaacaattaatttgccttttaaatttaaatgttcataattaaggaattgttggacccaagcaaaggattgtataaccaaaatgaggataaactgaaattggctattgatgtcactgtgaaattggttcatgggaagcggtcaaactcccaaaaaatagggtgtccctattctaatgcaacacagtgtaacacaaaaaaaatgaaaatattatcaactgaaaaaattgcatttaccattctactagaccaaaattatagaaaaaaggctcttttgaaattcgtcattaattttatcaaacctttaaaaatatacaaattttcaaaacaatatatgataaaaagctatttaaacttttactaatggacatttagttcaattcgcacccttttttcacaattataaacaaattgcagttacaaaattttgaatcgattttttacacctttggccactcctttggctgaatctgaaacaatggaaaagaccacaattcatgctgatttttcttctcagaaattttaaattttaaacctcagctaaattccccgtcccaaacttgcataaattttaattgttttattcgtctatgggcgatttttcagcagtatttatctgcgattgttccattttctagatttatagaaaacctagaattaatgaaaagacattttaaaaattataatattaaaatctatagtaggtgagttattttaagcttataattttcactacagatctgaaataaa

SEQ ID NO: 51667 - DNA, 191 bp, Heterodera glycines
atttaatacaccgtttcactttttctttgcttgtttgattttttttcagccgtttttcctgaccattccaaaattggaaattggcccgctaatttttctcgaattttttatggtctcatataacaaaaacgaatgtcttatatataatttagaccgttcgaatacaaacatggctatctttgctacttaaa

SEQ ID NO: 51668 - DNA, 1845 bp, Heterodera glycines
atgctggccagaagaaaagcaatgcggaaatgctttgccaattacgtggacgacggtccgttggtgatacgggatgcgtttatgggaggacggactgggccaatgaaattgctgcgcagggctgggccgggagagaagatctcttactacgacttcacatctctttacccatacgtaaagtgagtttttaattaaatttacagatataaatgtaatgcatattttatcaattatttgctgctgataaaatttgcttttaattttacaatgttgatagaaatgtatagagactttacaaaaaagcaattaaatgaaaaaaaattataaacatcgctcgatgagtagggttgagaattatatggaaatccatattttttctggactgtgggaggcctgaaacgcatgaaaaacgtttttaacttgggttgaagcttccaggatggatttctatatccatatttttccaaatttcgcgatttatgtccatatttccatatttgtaatattttggcatttaagcccatattttatgtccatattatggcatttttccaaaaaacctctattagaatggcccccatcagataaattggcctttttgacctttaaaaactggaaaattttccgaaaaagtcattttagtaaaattatgtcgaaaatgtttgattaattagattttcgaaaaattggtattttcccattttatgtccatatttcgcgattttttgtccatattttgcgattttatatcacatataattcccaaccccatcgatgtgtatttgttttttcattcattaaataatattattttttatgagtaaataatagttcatgagagtataggttaaagtttatttttatatttattccaaaaaatatatatttttattaatatttcaagactttttcattattttataaattttataattgtaaatttttcatgtaacatataaaagttaattcaatttattctgttttgtctattatattttaaatatttaaatttgttttaattcacgaagattattttcattccacttttttcattattaatagaatagattttaatttaaaatttatagtaattatttatattttacaaagattaattctttaaaatatttattcatatttgaaaaatggaattaataggagattaaaaaacttgctttatttagtattttagaacaattttcttttgttattaaaatattaaaaggattgggtgtgaatattaacgatctgaacaaaacaaaaataatttgttggcaaatttacgcttttcgcttttttatatataatttctgaaatgataattccttattaataaaatacataaattacattagagtcattgcttaggtaaattcaaaacataatgaatataattataacaattatataagaccatttatattaaaaaaacaaatgccctaatgtctttcagtcaactcactgtctctaattattctcttacgcatctgtactctctcacccgcccacagactgctctctcccatcctgcactctctcatctcatctctgactgctctcttgcacatctgtactctctcacccgcccacagactgctctctcccattctgcactctctcatctcatcactgactgcactcttccatcttgcactctctcatttcatctttgactgctctcttacacatctgtactctctcacgcgcccactgactgctctcttcttacatccttcactatctcatttcatctctaactgttctcttctgtccctgaactctcatcctcccactgactatctctaacttctctccctctctcacgtagctgtactcccaaataaa

SEQ ID NO: 51669 - DNA, 305 bp, Heterodera glycines
atgcggaccacagatttgacagcctgcagtccctcttctccaattgccgttttcaatacagccggggcaagcaattcgagcagcgatgaagtttggctgatgttcttttttccggctggagcgggtccaatgcctggtgttgcattgtctccaagtcgaacaccacaatacgataagggtcaatttccctgggctcaattagttgaatataaaagatctgcattttttaaattcttcattttctccgagattttcatgtggttttaattcattttgcatttattaatttaaattttaatcggaga

SEQ ID NO: 51670 - DNA, 425 bp, Heterodera glycines
atggccctcaaatcggacactttgcccaagggcagaaaaacatttgcaaagtgcggaaaagagcagccttatgtgaatttggagtcgacaaacacagaaaacaaaaagactgaaggtaataaatgagatggatcacgccgattaagcaacaatcgaaattttatgggccttctctcaccattttcaccatttaagcaaaaagttcgccaccggaaaaaacggacaaaacggcgacaaagcgaagggaatacgaacgaatggcaccaaaaccggacaaattagcgacaaacaacagtggggaatatgaaagattggcaacggcacagaaggagaagaggagagagggtgggcaaatgggaaaaaattgggggaagaaagaaaaatgaaatacgggggaaagggagacgaaattgaaacggaataaa

SEQ ID NO: 51671 - DNA, 348 bp, Heterodera glycines
atgaataatattgatgatatttgcaaagaaatcgaactgcgtctgtccgtccatggtgcgttgcttggttctggatgggctacgatggagaccactgtcacttctctgctcaacagttagtggcgattagttttaagaaagggttggagttggatataagggaaggagggggcggggggaggttgtctttcaactccaacaatctgaaattctttagacaaccaaaatgacatctcaattctgaagagcttgcaattagaacaagaggcgaatgccggattactggtccaaaaagttgacggacttctggctggaaatgcagcggatataactgccatgggttcgtaa

SEQ ID NO: 51672 - DNA, 666 bp, Heterodera glycines
atgaggaaagagcggaagaagtgggaggaggaagagcgtaaaaagagtgaggaggaagagcggaagaagtgggaggaggaagagcggaagaagagggaggaggaagagcgtaaaaagagtgaggaggaagagcggaagaagtgggaggaggaagagcggaagaagagggaggaggaaaagcgtaagaagagggaggaggaagagcggaagaagagggaggaggaaaagcgtaaaaagagggaggaggaaaagcgtaaaaagaaggaggaggaagagcggaagaagtgtgaggagaaagagcggaagaagagggaggagggcaagaagagagaaggtaagcgaaaacactcggacgaattggcggagagttcggcagacgaaggtgagagggattcgagatttataaaaggtagttaaatattgacacattcaaggacgattgaggtcaaagaagaagctgaatgtttattccggatttgatcacaagcgaagttctctcaataaggtacgtcgaactaacccaaataactttgtataaacttcgaaatttagactatggacacggactatgacgattctttttggtctgacagtgattagtaaattaatcacttcgcctaattattttttgttgtaacatttaagcctcatatatcatcattttga

SEQ ID NO: 51673 - DNA, 1580 bp, Heterodera glycines
atgaagcatccaagtcacagtactctgttgggatacataagggaaaagcactggatacccaaaggaagaaggttcatcagaaacacgatattgtctgagcgacacggatgcttgaattgccgcaaagagaggcttaaaccatatgcctatccacaaatgccaaacttgcccagtgaacgagttgcgatgataaggccatttgagaagacgggcgttgactattttggcccattaacaataaaaggcggagttaaagtctacatcgcactttatacctgtctcgtaatacgagcggttcatttggaagtggccgatgattgtacggcaacagaatttttgaggacctttcgaaggttcagctcacgccgcggcctcccaagccttatgtggtcagataatggcaccaattttattgctggagcagagtgcataaaagaggaatggagaagagaaatactggtagaaaccagccactcaggagtgagttggaaattcaacgtaccacgagcaccctggcaaggtggcgcgtgggagagactggtgggtatcaccagaagtgcgttacgaagaacagtggggaaaagcctcatggaaaggcaagaattcgatactcttgtttgcgaaatcgaagctgtggtgaacacaaggcctcttacattccaatcagaagaagaattcacacaaccgctcagacccgtcgattttttattgccatataaacgtgtggaaacaagccttccattgtcggacgaagatccaatggatcccgactatgcataccaaccccggaaaagaggggaattgcatcaattgatgagagttgcaataaaaagaattgatcgattctggaaacagtggaaaacggagtacttactttcgctcagagaaagagatcgaaccaaccgagcagaaggaagtctcccaagagagggggatattgtcctggttgaagaagaggaagacccacggtccatttggacgatgggaaaagtcgaaaagcttttgaaggggagggatggactcgtgcgcacggcacgagtacacacaaaaggaaaaactctggttcgagcgattaaccttttgtaccctctagaaattaacacttctgcggaggacgaagtcagtcaaattcaagtgactgccattatggattcaccaagtgctgtgatggaaggcagggacccgcaaactgtcacaacggagtcaagtctgcctccagggacagtgatgcaggattcacaaatcgtcacgacagaatcgagtttgtctcctgtcagaggaaggaatgagcggcaagctgtgaaagagagaattcgaaagagacagccaacggaggaagtcagaggcaaaggcaaattgaagaagaatgggccatatgatccactgcgaccgggcaactacagaattcctcgccgaaacccgttctttccgtcacaagtagcgtacaatgagcaaacacgcacgtatcgacgacgacgggggaggacgattgatctttcgggattgaggaagttgttcgctggattgggcggcggcaagggagggactggaaagtcatttggcgactcggaaaaatgcac

SEQ ID NO: 51674 - DNA, 1569 bp, Heterodera glycines
atgcagaaaaggctggttgagcagtgggaattggtcaaggcacgccaatcgccggacgaaggtccttttgctcttacgaaaacccatttacgactcgagaagtcacttttaaattcagagacggagcccaccgaagaggaaatggtcgccgagagcacaatgagtcttttttctcgagaatgcgcttcttttgcttcgacttttattctcggcgaatcgttttcccccaaaaatgtgaagaaagaagcgatagtttcacaaatcgcccaaattctgctgatggacaaggtaaatttgttgagaccgaagcactgaaatgaactgaaaacaacggcaaaggaattgttcctcgacatgctcggactgctcgccaaactgatcacttgctccgactcacaggcggcggtcaaatgcattccgatgctcaacgtgatcaccctaaatgtacgcattgagaagcaaataaacggccagacaaaggatgcacaacatcaacatttgtttatcttcctcacttttacagtacgccacatcatttgacgaacaaaccgcggttcaaattctgatccatgccctccaaagtctgcaaatgtatgtgtccgatgaactcgctgcaggacccattctcacgctgatcttcaacatttattcaacattccgaccaaaataccccgcacttcttgaagtcttgagacaggtttcagttaacattttagttttatactatttatctgtttaattggatcaggttccgaattccatgcccgagaatgtcgagcagttcgaccaacgaataataacaacaatttcaaaacgaagaggaggggaaaatgcacgacaaaatcaagagggatttgatgaggaaggttttgatatcggtgagaatggaggaaggcttttgaaacatggaaattttcaaaatacagagaaaagtcaaaattcaccacggccaaaaaagttcgaacggaacggaggaagacggagaaatggattgaccagagaaatggcggaagggagattgttcttttccttttcactttgttctacttttgtactggagacgggatcattcgttgtttttgttttttgttaaagcgatttataacaaaaatggcagaaaaatatgaaacacaaattgttttgtgtgagattaaattacgcgtcacttttgttttccgtccgttcattttgcccgctttgccttcgattgcgcggtggcccctgagggttcctttctttttgttgcgcccgtcgatgcttcggccttttcttgcgtcgattgcttcttccgtccgccccttcccccctgggcgcccttttgctccaagcccaagtcgcccatttccttctccaccagtgaaattaaaatgttgcaacgtcgttgtaattcctgaaatcaattacataacataaaatagagccccccccccccgcaacaaacaaagtctacaggcccgtaacaagaaaaaaaggccagcaatagtatttctgctttggtagtgccctgatccagtaatgacccctcctcccctaccaattaaggctcataccatggcagttcgagagcga

SEQ ID NO: 51675 - DNA, 720 bp, Heterodera glycines
acgcattcagaaaaggcatgccatcaaacaggcattggaggccaaaatcaacaagtacaaggcacctcagcaccaactccgtcttcagtacgggacgggaaaatgtaaaaattacacggaggaggaggacaggtgaaaagggggggggggaaagggagtcattggcaattaaaattaaataaataagttatgcataagccctatgtaagttatgatttcgggaaaatgagttattttcatctcatttttgcagatttctcctctacaacatttatgaaatcggacttgataatgaaaatttatacgacgaattgcgtcaaaatatccgaaccgctccccaatttcgatttgattggtttattcgctctcgaactgccatggtatgagccttaattggtaggggaggaggggtcattactggatcagggcactaccaaagcagaaatactattgctggcctttttttcttgttacgggcctgtagactttgtttgttgcggggggggggggctctattttatgttatgtaattgatttcaggaattacaacgacgttgcaacattttaatttcactggtggagaaggaaatgggcgacttgggcttggagcaaaagggcgcccaggggggaaggggcggacggaagaagcaatcgacgcaagaaaaggccgaagcatcgacgggcgcaacaaaaagaaaggaaccctcaggggccaccgcg

SEQ ID NO: 51676 - DNA, 274 bp, Heterodera glycines
atggccaaaacacagtattatggtcagtcgctgatggacaccggcacagcggcgttcatttttgtgaatgctatcgccgaccatgatggaatggcacgcggacaaagcccacggcagagggcggccaaggcgacaatgtcagtggacgggcggatggtttggaatgccgtggcacaatgccacactgggaaaattattgtgggcatttgtttcatttccttcgacagaaaaattaaaaaaaaaatttttttttattttcagtgcttttttgtaa

SEQ ID NO: 51677 - DNA, 126 bp, Heterodera glycines
atggcacggaaattgcatttttgtgccctcatttggctggtgttatggttggcgttgagcactgttcgccaagtgtttgacatcattggcaaactgtgggctttggtactgatcgacatggttcag

SEQ ID NO: 51678 - DNA, 329 bp, Heterodera glycines
atgacccacaccacaattggagggccgagagggttaaaggttattctcatcaccgaaccgatttccatggcaaagtaattgctttgaatgtaaacaaattgttagaaagactgatattttaataatatttatgtgtttaaaatactatgttaaattgacacaaaactaacaatttttagaatttttcaaatacataactttattttaaaaaaaatagttttcactaataaataattctttattttatttcagtgacgaaaggttcagtgacgaaaagtttagtgtcgaaaggttcagtgacgaaacgttcggccaccgataaaaataaa

SEQ ID NO: 51679 - DNA, 210 bp, Heterodera glycines
atgcaagaaaataactcatcatccgacgaagagggtcaattgctttcatcttcatctgggaatgaagaagcggctaaccaagaattaattcaattcatcgaatttaagtcaaagcgaggtgcctcacttcttgcacgtgatgggtttgagtaccaattcgagcgcaattcagccttagttgataatgttgaatattggaagtgtgttaaa

SEQ ID NO: 51680 - DNA, 426 bp, Heterodera glycines
atgaagccgaaaagacggaagaaacgcgaccttggcaaatgctttaacggttttatcctttgcttctttgttttcgtgataatgcccattaccaatttgtcaaatgcaattgttacgacactcaaattggacgaggattcgaaaagtaagtcaaaagagatgagaaattcgtgaagaaggttacgaaattccatatttctgatcaaatataatttgggttagaatgttccaatgcaatacatagatggcgaaattatgtcaaatgccatgatacaaattagaaattaaagtgccaaaattaaaatttaagtatcaagagccctcgataaattatcggttcaaaataacaataaggaagctgaagaatgtccaatctgtcttgaatcctttgaactgggcaagaagaaccctgtcttaaaatgttca

SEQ ID NO: 51681 - DNA, 338 bp, Heterodera glycines
atgaatgaacaattggctaagaaaaaccgcagaagagatggtgcgaaaaataattccataaatcagacagaatttctaagagaaaattaaaagctaaataaaatttagctcttaagaaaagcgaaaaattactttattaacttggataattatatataaaagaattttttaaagaaaaatcatgcaataaatctatatccattcaatttataatgagaaatgtagcgttgtcctatgggcattttgcaacgtacgcttggatgctatattggattctaaaaatataatttatattaaatatttaaatttaattattagtattcactcatatttgtaga

SEQ ID NO: 51682 - DNA, 1203 bp, Heterodera glycines
atggcggcgatcgaactcttttggccgacatcgaagcatctcttgccagtcattctgctggtaataagtggggaatggatcaaattaatggatcatttaccaataattattatttattttaaatatttttatgtttttcccctttttgatgagtgtgcccacagcctcggcttcgtccgtgccatgttcgccattgccgcctccgcttcttcccatgccagcaacaacagcgaatggcaggcattgagtacacagtttggtcagaaagtcactgaaattgactcgaaatgtgcagagtttggcattagcattggaaaagtgcccatcgatggccccaagggtaaaaacaattagagaagatctcattaattaattatcccgtacaattcaaggagaccactcccaacgaaatgtgcctagtacggacagtgtgatttccatgcccggattgaccggctcacacaaacattgaactgaatgatgagtgacggaatggaataacctaattgtggagttcgttctttgattgttataaatatttcactaatttaaaaaaaataactttttttattatagataaaattttccattaaattttttaattcacattaaacatttcagaaaaatttgattttgaaaattaatacgtaatttttcgaaaatttgaattttcaaatgactagaaaagctagagaatcagaaaataggttaagaaaaattaattttaattgtcaatttttaagacaagtatcctccgttcttagtggtttaagtcactcttttttaaggtgccattttttttattccgataaaaaaccaaaaaaaaaaacaatttcggcacaaaatgcacatataggcaaaattgggacgaaaaattcatcctaatagttcagaaccaaactaaaaatgttttttcaagcttatgacgataaaaaacataaagcgaatgacatttaaaaatgatgggcctaaattggaaaatttaatgaatttaaaaaaagttaaattcaaatgtttagcctgactttttatagctgttctttcgaatttaaaaagattcttttggcccttagggtaaaagaaaattcttttaaaatttgttcacttttcatttcacattttttgttcagcaaattctatttttctttctcaaagcgatttaaatttttattaaattttcgacttccataggcaacaaataaa

SEQ ID NO: 51683 - DNA, 190 bp, Heterodera glycines
atggagaaaaatttaaatttcattcggcaggcgaaatgtaaaaaccctccgagagcagtccagaaaaaacaacaacaacaacaacagttgcaattgatgcagaacggtgggccggatgcttatgagctgaaagaagtttttggctattataacaatggatgccatgaagcgtactatgtgtcgtggctca

SEQ ID NO: 51684 - DNA, 289 bp, Heterodera glycines
atgttcgccattgccgcttccgcttcttcccatgccagcaacaacagcgaatggcaggcattgagtacacagtttggtcagaaagtcactgagattgactcgaaatgtgcagagtttggcattagcattggaaaagtgcccatcgatggccccaagggtaaaaacaattagagaagatctcattaattaattatcccgtacaattcaaggagaccactcccaacgaaatgtgcctagtacggacagtgtgatttccatgcccggattgaccggctcacacaaacattga

SEQ ID NO: 51685 - DNA, 493 bp, Heterodera glycines
ataattcgagccttactttactattatattatccaccatcacatagcaaatgctacaatttgcacttctgctgctctttatggtgctaattattttttaaaaatatagtagggtaatttaatcaaataattgtccgatttaataggtgtcatcatttgatccctccgctgaatttatggccaatgaccaaattagtgcggtgcaacagcagcaagtgaattcaaaagattcaacttttgagtttaattatgctttttttcccattttaaggctgtaaaaccaattgttggctggcatttttggtgggacggacgaaatcgaaattggatagcaaaaaatgcggaaaatgttgaaaaataaaagaaagcaaaggaacaatcgaaaatggacagaaaataaatggcgaaacattttataaaaatggcagagataagtgaatttttgtggctttcttggaaaacgacgaaagattggataaatacatatatttgtt

SEQ ID NO: 51686 - DNA, 142 bp, Heterodera glycines
attttatggaaaattttatgaactttttatcatccaacaaaattaaatcagtatttgtagtccaacattgggatggccttgttcaaaaatatcaacatttctgcggttttcggctttaatctcgaacgtcgataatcattaa

SEQ ID NO: 51687 - DNA, 323 bp, Heterodera glycines
atgcccgagggcgtcaactgtttgcgcgttgggcacgcggacgcgcaccgcgactcatacgtgattgtgtgcggttgtggcacaacaatatggggtagcgcattaatttgtttaaaacatttcgccaaagtttttgttggcatttttaaataaatttggcatctttcagaattttaattatatttgtttataggcttccgattggatggcactgatgtgttctggaccgcattgggctacgaagtgaatgtgattgaactgtgcgacatggacggggacggccaaaatgaggcaaaaaataatggggaaaaattaatttaaaa

SEQ ID NO: 51688 - DNA, 912 bp, Heterodera glycines
aaatgggtgggagcgaaaatttacccctaacagtgccgtcggcatcggccagcagttcttcctcttcttgcagcctcacatttagtgagtttttgaggttaggtcagagtgaaatttatttaacaattcagctgaggctaagaaaagcattgccgagcaggaggagcagcggggagtcatctcaatgcacgtctgctggaatgacttttcacctgaccaaaacaagcgaaaagtgcgctggctgttcgaaattcaacaactttgtacgttagcggagaaatactctataaaagcccacaactaaaaacaaaacgggaatttttggatttgtatccgaaaatcataaaatccgaattttgtgtatttagtcagtgtccaacttcccaaaatgccgcgtgaatacattgctcggttggtgttcgaccgctcccatcgcaatttgatggtttacaagaaaaacaaaggtgccattgcctccatttgctaccgtccttttgccgaacagggatttgccgagattgtgttttgtgcagtagcagccgatgaacaggcaaatggacaaaacaaacaaaattggatcataatatacacaatactgaaacaaaatttgcttattatgcccatgcattgcgttattttaggtcaagggttatggcacgcacctgatgaatcatctgaaggattttatggtctctcagttgggcattttccatttgctcacttacgccgacgaatttgccattggatattttgctaaagttgttaaaaatcctatatcaaaattagttaatttagccgttttaagcaagattttgtcatgcaaatcccactgccgcaagggcgttacaaaggctttattaaggactatcaggtggctacactgatgtactgccaattgcatccaaagtcagt

SEQ ID NO: 51689 - DNA, 165 bp, Heterodera glycines
aacatccggaagaatttggaaccaccaaagtacgtggagcaggtgaaggcggagggcgatgcggcaaaaccgccggtgccggtcattccgcttcaattgcccgcggacgacggacaggcggcagcggcaccggccgaagcggcggcaccaccgccgccggaaaag

SEQ ID NO: 51690 - DNA, 2214 bp, Heterodera glycines
atgccgaaattgaacgacttcggatggcacttcgacgcggccgtgagacagtcgagcgtgagcgggaacggcacgcagatgaggagaatgcggcacgtgaacaaatcagccgtatgaagagaagatatggcatttttttcgtttttataatttaattgatttaaaaaaataatttaaattattatttgcgaattctaaacatttgctaggatatttatttttatttatctttaaaaatttatttgatttttggcatcggaaaatttaattgcttttttaagttgcgtacatatgaaacggagttggaatatgctaaacgactaaatcggcagcagataacagcaaccacaacaaataacaacgaagcaatggcagtggcaaaattggaaaatttggttttgtgaattattattgaaaatttattttttttttcacttttagattttttattatttctttttaattgaaaatgacaaaaaaaatatatatatatatatatatataaatgccaaaatttaaacagaaagagtcaaggataaattaaagaatattcgttaaaaattattttctttctttttgttttttatagaataatagttaaaaattaatcttataattttgaaattatttatattacatatagaaaacgacctgaatctggtccaggtgttgtttttttcctggatacgggtccaggccatttttgggcaacctgggttttcctggattttttttacaggaaatccaggtccaggcttttttcaaaatgtcgatatttattataatattttatttttaatttaaatttttaaaaactctaaaaaggcaaaatattttaaaattatcaaatttttccggcacaaatttccagatagttgaccatggtaagctgaaaacggagttggcacaacaacagcgagcagttgctgaacgtgaagcggcatgggacagagagcgtgccgaactcaaccaaacagtgcgctcgttgaacaacacgctggaggagttggagcaggagttgcgccaacgggaagtgcatgggcgtgaaatgcaattgcaatttgaacggacggtggtcgagcgggacatggcacaaatggaactgttggacaatgccaaacaaagcaatcataatcagcaacaccatcaccaacaggaacacataaatggtaataggaattcaggatttatctttgtaagaaaaatgggaaattttttagacgaattttggaattttgtaaaaaattttaaatgctgtcccaaataattattgataggggggggggtgaattggaatttatgataaaaataattatataaatggaaaattttcgatttttattaaattttcttcaaaaataataaatataatttaatttaatttttttttgttttttcttctaaaagatttttcataccatactagctgtattcgaaatttctttgctgaaattttcatgattttgaagaattgagaaattttgcccttaatttaatttgtaaaaattttctgtgtatatttcactttttatgcgcatattgcgattttatgtgcttataatttccccacccttataatgatagaacaattcgagaacatttgcatataataaatggaataatttatctaagaaattaagtttttatgctaattgcattttaaataaaatttgaatttacgctttcatttttgaaataaatttcaaaatcaaaaaacggtaaacatttccagcagccgcacatcgttcttcaatgctgcatttggcatcatcaaattcagctgagagcggaacagctgaagagcacaacagctcaactgcagcagcccatgtcgatggaggaggcccgtcattggcgagcagttcaggcattgacagcagcaccaccagtttttcagtgacagcggatgccaaagaaattgacacaaaacatttgcggttggcacgacgcaaactgattgaatgccgtcagaaagtggcacggctgctccgatcagcggagaaagcaatgctcggggaacggctcggacgggacgatttgttcggcagttatttgggtaaaacaaaaaagaaaagatttaaattttagacttaaatttttagtgaaaatttaatcccaaataattatttgaagaagtgatcagtagcgcccatattttttttgggcataaatcaaatttttttatctaacttattactttctataattaataaa

SEQ ID NO: 51691 - DNA, 514 bp, Heterodera glycines
gaacttggcggacgtaaatttttcagtaccttagactttatgtcaggttactggcagatcaaaatggaagaaaattccatcgaaaaaactgccttcacaacagaatatggcctttatgaattcatggttatgccttttggcttaactaacgcagtggctaccttccaaaggttcatgtctcgtctttttgacggaatgattaaccaatttttgttcgtgtatatcgatgacattctaatcgcctcagaatcattcgaagagtatttgatacacatcgaattagtcttttctcggattaaaactgccggtttaaaattaaaattggaaaaatgccatttttgtgcgaccgaactaccatttttgggtcacatccttacgagagaaggaataaaaatggacgcagataaactgaaaccagtgatcgaattgccaacgcccacaacaaaaaaagagcttcattctttgctaggatttaagacatactataggaaatttatacattcctttggtacaa

SEQ ID NO: 51692 - DNA, 2196 bp, Heterodera glycines
atggtttggctcggccttttcttcgcgccgcttctccccgcgataaacaacgttaagctggtgatctttcccttttattgtccggtttgtctctgttcatttgtgttgattcccttgccagatcatcatcatgtatatccgtggctgggcttgtgtcacttgcaatgtgccggcccgggaaatttttcgggcgtcgaggtgaaaagcaaaaaattaattaataatattattcatttgaagttttgtttttaaatcattcaaaattatttttataaatttatatgaagaataaaaacagatctttgtaaatttagttccaaatccttttgctttttatcattggaatatatatatttttttctttttttttgaacttttgtttttccatttcttttattttaaaaattttttgcattgaattttcaattttgaggcatcgttttgcccgtgaacagctgtactttctctgctggacattaaaccgatgctttgctaggccattttcagtgaaaattctcattaaattccacggattgggacgagttaatccgcatttaatccccaagtcaattggcggatgatcaaatgttttaaatcgggggcatttgctgtgatttcagtcaatcgacagaaaataacggcaaattctgttggaatatttttaatttcactgaccaaatattaaatattgaaaattcacagaaaaaaagcaaaataagaaatatttggttctcatttaaatgttaatattcctccaaattcaactgcattttctcaggtattttgcattatttaaaaataataatactatataaaatttatggactcatgaagagttttattaagatattcaactaactgcttttttatgtcaacaatttcgggcaaaatattttatccacagaactgttaaattttaaaaaattatttattgaattattaaaattggtaatcgcatctaatttgttgtattaataaaattttttccactgattaaatgaatccgatctgatttctcaaaaaatgtttcatttcaaaattacactaccccaattttaaattcatttccaaaaattgaaataaatcgagttggccaaattcgcccaattaaggtcctccaacttctttttggccattctcctctccgctctgctcttatgcactgtccccgttggttatgtgcttacatccaaacaaccttcggtgctttgtggaccattcgcgtgagaatttatagtgtattttatttaattaaattttcaaatctacaatgataagttctgttgaagagaacggcaccgtttctacgacgtgctcacggaactgatcattggaaatgtgccgaaaagggcgctcagatggctcagatacggcgcatcgccgggcgtaattatcccaaccattctcgtgctgccaattttatttattattttattcaaatcatctgtgtttttcagctcctcattctgttcattgtctttctgatctcattggttcggggacttcgcaaggcgaacacggaccttcaaaaacagctgatccatgtgagtaaatgaaaacaaaacaaaaaacattaatttaatgccaaaatataatgcaaataaaataatgctaatttatcatttaaaattattaaatttattaaatttattggttttttattatttaaatttttggtatttctaaaccactcgtgataatatttcttttttcattattattttctaaatttctttttaattccaatcatttttctcactaattaaaacatttttttaaactaattattttttattagtaattaattaactaattgcctgattaattgtcccatttttaaggaacgcaccgaagagaagcgaaaaatttttgaattggcgggcggagcaaatcgaaacaaaacgaaagcgtcgacaaaagcggaggagcagcggaagaaaatgggaggaggtgcaggacgcaaattggagcagggccaacatttgccggaggtggagaggaagaggcgcgagccgtggcgactctttgccaatttggcaaaaaatgtgagaaaagggacaaaaaagggaggtgggaagcgaaaaacttagcgaagggttaaaacatgaaatttatgggattttcgccagacgatttgagaaaaatttacattcaaaattttcctttctccaaacttcgttgattttggtgattaaa

SEQ ID NO: 51693 - DNA, 968 bp, Heterodera glycines
atgcacaccgacccaaagtggggaaaagcggcggaggaagcgatgcgctacttcacttctcttgttgaaacgctcaacacaacaccggtgacaaattgaaaaaagcgacaataaatgaattttgtgaattttcggaactttacgaagcgctgagactgtcgttggagcgcgagcaattggacgcggtcagcgaacggacgtgccgacttttgctggccgagttcgagcagtccggcatccaattggcttctgtcgaggcaaaaactttgcttttctttttattttgcacattttatggctagtgactcgtttcattttattccttttagcgaaaacaattcgtcaaactttccgatgaaatcttcgaggctggtacaaattttgtggacggttgtgagcggcccgtgaaactcagcagcgacgagcagaaccaattcggagtgcgcacttcacatttgaacggcccatggacccaacaggtcgaccgacggctccgatggttcagctacagaaaatattttgaacacaacgaacagcaggtgaagaaaggcagtggaaaacattgttttatttaattgagtttttggatatttaaaaccatttaaatttctttaaggaaacctttttacgccgtttggtctccgcccgacacaatttggcactgctcaccaatttccagtcgtttgcccatcgggcccaaagcaactctttgctgggcacttacgaaaacgttcactcatttcttggcactgtcatcgaagtgaaattagcttcattttttaatatatatttttctttattttcagaaatttgtgccaaaatgtgccgccgaactcgccgaagctcaacaaattgtgcaaaagtgctcactcaatttcgacgcaattggtccccagttgaacgaatgcgacgtcgaattcgcaactgcggtgcctttttgtccatttaacactctaattactatttaa

SEQ ID NO: 51694 - DNA, 351 bp, Heterodera glycines
caatcgacggaccaaaaactgttggttctgctgaccgcacttaccagtgtccagggccaaaccgtgcggttggttgatcggctgaatgtgctcgcccgtgatcggcttcagcatgtccccatcactttctaattgctttgcattcaaatttcactctcttctttttaggagcgttcctcgtttattcagcatcgccattgctccaatttgttcccgggcttatttggacgcttctaaattaaagcacagcaaattacctatttcctttgtctattgcttctgtttttgttgctttaatgtgtgtattttacgatttctgtctgaaattttacgataaattgaattttaaaa

SEQ ID NO: 51695 - DNA, 1264 bp, Heterodera glycines
atgccaaaagaatcacatgaatacaaacaaatacgagaagttttaatgaaaattaaaaagaaaaaatttattttatatggcgaggacaaagttgctgtaagagatgttgccacagcaataagaaacataaagggggtaattattgaaaatgttttttttaataaatcgaagttaattagttatccaaataaattaattagtattttataatttattaaagtagagcggggtcgggaattcttggaaaaaccgggaccgggacatgtcgggaccgcgatctggatttacgatcgggaccggaccaaccgggacttttacttgaaaaaagaattttttttttgtaaggtcaggcggtgccattaggcgctgtcaggaaaattttgaaaatttatagtcattttgccaagaatttaaagtgccaaataaaaatttttcactcagaccccccattcttaccagtgcttatttggtcccggttagtcgcggcccttcccaaaaaattgtcatttttggcgcaaaaccgcaaaaaatcctcctgtttttcgggccggtgctgaaatttttatatataaagaaaaaaaaatttggtctgaaaatcaaaaaacaaaatagcgcttcggattcccacatccgacgaaatctttttctggctatgggctgccttcccctatattgtcatgaatttttttttaatatcccatagaaattggaaaacatttttgaaattttagatattatctatcactcagccaaaaaaaaatgaaaaaataataataaatttgtttgaaaatttaggcggatcattattttaaacaatttgaaaaatttgttgaagcaatgccaaaagaatcacatgaatacaaacaaatacgagaagttttaatgaaaattaaaaagaaaaaatttattttatatggcgaggacaaagttgctgtaagagatgttgccacagcaataagaaacataaagggggtaattattgaaaatgttttttttaataaatcgatgttaattagttatccaaataaattaattagtattttataatttattaaagtagagcggggtcgggaattcttggaaaaaccgggaccgggacatgtcgggaccgcgatctggatttacgatcgggaccggaccaaccgggacttttacttgaaaaaagaattttttttttgtaaggtcaggcggtgccattaggcgctgtcaggaaaattttgaaaatttatagtcattttgccaagaatttaaagtgccaaataaa

SEQ ID NO: 51696 - DNA, 165 bp, Heterodera glycines
atgatgagtccacgaacattcaactcaaaagagtacagtcattacagagaaatggaggacaagatgacatttatggcattttgggcctatgttttgctaagcgccaaaagcaaaattttgattgacctttgggtaactggcgatgccacatttgatcacgattgg

SEQ ID NO: 51697 - DNA, 995 bp, Heterodera glycines
atgagcaaagaacggcggaaaaacaaattaatccaattctacgagaattggaaatctctgtgaattctgttggacccaaaaaataataatttgccaaatttattgtccgtttcatcatcgtctccctcccctcactcccgtctcatcaattctgcaaatttggcaataaaattctgtgtcctttgatcatcaccgcttctacccccttttttcatgcgttcactattttcacatcaccattttttttacaatttcacaaatatataattggttttgttctctcttacattttaatctttattgttgtcattcatgttcatcggggatggaattctgacgctccaaaaaatttaggaaatcggaattccgagcccttctccacaaaaaaaatataatcgagaattcattattccatcccagatttctctatcgtcaacagtaaataaactcgacaaaagtttaaacgtaaatgtcgtgcaaaatgattaatgtacagttattaggtgtcagtcaaaaatttgggttctcatctccaggcacatttttatttctgctctgttttttgctaaaatgaaaaggtaatgaaatgatttggtttttttgagagttaataaaacggcggcgcgcgtgtgcgtcataatgtcaagacaaattaaaacaaaataaaataaaaatttgaaaacgaacaaataaacaaacaaatggatggatggatggacatagaaatggagagagaggatgatgattaattaattatagcaattaattaattaattgctttttgcatcatcggctcttccttctcttcctcctccttcagcagcggcggcgggcggtggtgttttgatggtggtggcactgctaatgccgctgccgttgttgctgttgttcctggtcaacaatgcccaatgcaaactgtacacaaccagctcatacgtgccgatggtaaacgccgtgttgggcaccgatcggatcaacttgggggaacaaattga

SEQ ID NO: 51698 - DNA, 61 bp, Heterodera glycines
atgaaccacaaaaaacttgaacatgaaggtcatctttatgttttcttatcaaattttggag

SEQ ID NO: 51699 - DNA, 183 bp, Heterodera glycines
atgactccgccccacccgcaccatcgacgccagcagcagcaaatgccatcggcacagtctgtcggcagtgccgcccaatttggacgacaaccattcggagccggcggtgggccgataatggcgaacaatgcaatcgcaaatcgaaaaaagcgcagatttgccgacaaaatggtggcaccggag

SEQ ID NO: 51700 - DNA, 741 bp, Heterodera glycines
atgttcgggccagatttggggcgaagccaagagaaggaggtgagagtcgggttggcacttgtttgccgtggagtggggtggagacacttctttggaagggaggcagatgaggccacgtggcggtggaaaggaaacctttaagcatttgaggagggtgttggtggggggtttgtacccttttcggaggggtaggccgtgcatgaaattcctgtttttcccatgtcgatgtcattggggcgtaaggcggcaatagtttcggcagtagtccagcaatccgagcattgacttaacaaatgggaagcacaactttttaaaaatattcagaaaataaaacacattgtcagatggactgaccgaaccgggcaaaaacaatcgcaacttttgcgacttcagtctttgcgggtcactgtaatccacagtacgcacccatgttacgatggaacccttgggggatttcctctaccgaaaagactatacttgaatttaaacaattttgaatagcagacgttcacagggcaattgccacgtactaagcacatcttcttcggtcttctcaatcctgagggatcggcacgtgtcagggaatgggtttgccacttatggaaggttaggaatgtgcctcccggcttcagggactcagtccggtcaaactcaatggacgcagtacaatccttctcagttctggcacatattcgggcggttgatcgtccaacaatcactattcagaagtcaactttctga

SEQ ID NO: 51701 - DNA, 641 bp, Heterodera glycines
atggcacatttggggaaaatccaaattttcaccaaagtaattggttttcatttttgtggaaataattttttttaatttaaggcccagccattgtctccaggtgatttggatggactggagacggcagtttaccagttcaaggcatttctcgacgaacaaccaatggtgcgaacgcttctttcaaaaaagacaaaagcccatttgctgcttcaccactttgttccgtttgcgcgccaacacggatttttagcccttttggatgagcagggtgggaccatatcatttttgggggttcaattttaaaagttgtgatttttcaggagatgaggcactgcattccgtgtggcggcgacttgagcaactttggaagacgatgccggactctgaacaaatgcgacaacagctggagcatcatttcgtctcgaattggctgctggacaccggcagactcgacgaattgaagctggtgagttgatggaaggggatttaaaattttaatccaactaattaagcgggaggaggaacaacgggagcaagcggaggaagacaaaacgaatgaagaaagtgatcaagatgccgacgtcgatatcgttgactgatcgaggattgatggttatttttcattacacatgacaaataaa

SEQ ID NO: 51702 - DNA, 107 bp, Heterodera glycines
agtggtctgtgagaaggtcaccaaaggggtgggtcccaggttcgattcccagtgcatgctattgatgtatttctatgattttaatgaataaataaaaggaaaagtga

SEQ ID NO: 51703 - DNA, 859 bp, Heterodera glycines
ctgaagaagaaagaattggccaattccccgggaattttccaaatgatcactgatcatttggccaaagaccatcaaatgaatgattgccggtcactaattgctctttctgatgttcagacaattcgggacgtcgtccgctctctcaggaacaggtggtccgctcgaacattgccaatgcgtgtgtgccgcgactggacgaagcggaatgtgaacggtgggggacaataaatattgtaattatccaactaattagaataattaattaattgtctttgtgtcatcctctaatcaccccttccctctcctcatttctcagttccctctgctataacctccatttccgcacaatggacggaacgtgcaacaatttccgtttgcctctccgtggcgccgctttccgtccctacagtcggtaatgcttttagtatttggacttagggccttaataacaatttaattttcatttatttattaaatgactctgtttaattgccctaatcatttaattagcaattgtttaggctgctcccgcccgaatatgacaacggattatcggagccaatttgtaaataacacaaaaaaaaactatttcgaattaaacatccacaatttagcctctattcgcagcacactgaggccaaatccgcgtgagattaacctgaacattctgtccaccacaaaggcattttgctcttttcggatattccaattttttctgtcaaatcgcttttagcaagtgaccgtctccgagttcaacgcccttctgatgcaatttggccaatttatgtcccacgacttggccaaaacgacgttggtcccttcggccaaatgcaatgtttgccagaatatcacttcccga

SEQ ID NO: 51704 - DNA, 700 bp, Heterodera glycines
atggacgaggaaatgttggaatttggcgattcgctgccgtcgacatcagcgacgccaatcggcgatttggtgccgttcccgtcgacacccactgcaccaatggacactggagagatgacaccgccaccagtggccatcgacgagcgatcaccgcgcatcgaacagctggaaaagcaactgaaggaccgggatgacaccattcaatttctgcgcgagcaggtccgaaaccgagaagcgctgatcagtgatctacgtcgtgtgcggcaccatcaacggcgacaccaacaccagcaaaagtgagtgaaatttcgatgccttctcttttcccaattaattttctcaaaaattgatcattcattttttgtcaattttagcaacgccaaacagaggaagaccaaggaaggccatcgacgagctccaacgcagctcgcgaaaacggttgacggagcagattttggatgccattgatcgggaccgatcgagatcggcaagtcggtgttcactggagcgcatccaccgagaagtccggcacaaatacggccattatacaccaaaaaaggcaccagcgaagaagggcaaagatgaaatggaggccaatgacggcttgcttttgatgacccaacttggcacacagaaagcttatcagcggatgaaagcaacccttcgtctgatccacaaaaaattcgacattttaccgcca

SEQ ID NO: 51705 - DNA, 76 bp, Heterodera glycines
tagagaaaaaaagataatgtttttctctggcactctctatttattggtacacatctcgttttttgaaacggtgtgt

SEQ ID NO: 51706 - DNA, 966 bp, Heterodera glycines
atggccaacggaagggtttggggacggccaatcaacaaaatttgcccgttggaagaagcgccgccaaaaatggccgaaatggatgatcaagccgatcaagcagtacatgtacgacatgaagtacaaacagtcgagactcagagcgaagcgagggagcagaacacaccctcggcagcaagaaaggacggagaaaatgaaggaagtaaaggcgaagaaagtgccgaaaagcgaggacgagaagttgaagctgtacatcccgacggaagagtaaatcgagaaatcagggaagacagttctcgagaaaaggcccccaacgattcggacggagaaaatggcggcgacacggcgccgctgaagtcggcagtttccgaaaaagcagcagaagtgccgtcggcagcacaaggaaaagcgggaactttggcacacccgcattcggctcagagacatgagaaaaaatatttgggagatagttcgatggccccaagtctcctcaaggttcctaccaagtttcagccgaattcgacgagatctgaaggaggagataggtttggcgcagacggacctcaagcagttcaggcgggcgaaatcgggggcgaatttcccgaagcaccagcggtcgaacagcaccaaaatgaactcgaacaaactcccaacaagcccgtggaggaagtacacgacggaaaagacgtccgagaagttcaagcagtacctggagctgaacaaaggaagtcggccaggactcggagaaaccgggagatttggtccccggagcgtcatgtttcacgaaagcgaggcttaattaagcccaaaacgggaatggcgctgctgatcatgctcatcagcattgtcggaacgttcggctgccagccgtcaatgcgatcatcgggaatggacccgaacctgccatttcaagaaggcccaaaaatgccatgtaccatggaatgtgcaaaacgtggggtcacaatc

SEQ ID NO: 51707 - DNA, 1526 bp, Heterodera glycines
gtgcaagaagttatattttacatccgagttggacatgctgaaaagcgtgcgaatgggtgagctcagaaatgaatgaatgggtggtgggaaatgtttaaatatgtttataccgttcaattgaaccatttatcgcttttcaaaatttatagccctcttcaacgacctccaaatcgtcgaaggctctcatctcagcggttccaatcttagcgcccttttcaattttgtggatttattggccaaagtcaaacaaatgaccaattagcaaatgctaattaatgttttcttttctttagcattttccgtacagcacagaagaaggagaagaagcggacggaaatcgcactgaggtgaaagaaacgaatttggaggcgaatgccaacaatcgcttcagcgttttctgaacgcaagtggacgcgcccgcgttgtgttcagtcatttgagggattttgttgagagtgtcggattagacggatcggtcgctttggacgattggaaaagggaatttctgcgagcagaagtgagcaaagggaagagggattaatcgcaatcagcttaattaccaccgatcattccaatgagtgaaggccgatcaaggaagcccttttcccgtgacggaggaatgggaacactgcaaagggtgagaacgaaatggcaaggcaatggggggaggggcactatttgaacagtgatcagtttggtcggaaggtgatccttctgatcatcgcgatcggggagtggtccctctgatcactctgctccgagcgtttttctttcccatcaattttgagtttctgtccaatttttctgggccctccccccccctctcccctttgaaatgtgcgaccgttttgcagaagttcgcccattctccgcggcttcacctgcggcctttggatggttttccattcgctgacagtcaatgcttttcggcagaacagtaaatgatgaatgtgtgaagtgattgtgcattctctgtgctttcgcaggtgatcagcagaagcagttccatccggtcgccgttcttctcaccatcaaagattgggtgacgcatttcttcgcttgtgaacactgccgcgcccatttccatcggatgaccacaaaaacggccaaaattgaggcggcggtcagtcgttttcccaaaattcctctaacttttctttgctaaggttcgccaaaaggaggacgtctttctgtatttgtggaaggcgcacaatttggtcaatggtcggctgaggggccgcgagacggaggaccccaaattccccaaataccaattcccgccaaagttcctttgccccgagtgccgcaggggcgacaaattcgacgagggaaaagtgcgcgaatttctgctgaaatattacggccgagtgagaccaattgatggagagcagcgaacgacggagaacggtcgcggaaacggggaacacggcggaggaggggaggaaaaggaagaagaagcggataagcagcagcgaaacgaacggatgccaaaagtgatcgggggaacggcggaggaagaaaagtga

SEQ ID NO: 51708 - DNA, 535 bp, Heterodera glycines
aaggtgttcgatgccctgttcactgatccatgcgaaccacccccagcgctttgcaaagtctggaccatgggcgagaagccaatgcaatttgggggtgaatccagcggcattgtttgtgtcaaatgcagttggataggtctcccaattcttaaaaggggaatgtgagaaaaatgcaaaaaaattttttgccttgaaatagccatgaatgccgagatatttgtttgagaaatctgtgatttgttctgttgtcaataggtccgcacgtccaaaaacgtggagctcccgaatttcgtcaaggagggcggcaatatccatcgaaaagggtgttccaatcgatcggatttcggttgaggcgagaagtaggcgcttaatgtggtcgcctaaaatcgattcgaaaaaaagaaagaggggaatgtcaggaccagtatactcttgcgtcttggcatgccgaattgctcccgattttgccataatttcttctaattggcgtttttctgcggggcacccatttttttgaaaaaagtcaatgcatttc

SEQ ID NO: 51709 - DNA, 3308 bp, Heterodera glycines
aggaaatgcgcgatttgcgtgcacctttggatctgctctttaagaaggacactccttggttttggggtcctgatcagcagaaggcttttgatcaggccaaacaggttcttcaatcggatttgttgctgacgcagtatgatccgagtttgccgatcattgtcgctgcggatgccagccaatgtggaatcggagccacgatcagccatgtgtttccaaacggagtggagcgcgtcatcgagcacgccagtcgaacgctcactcccgctgaacgaaattacgcccaaattgaacgtgaagctttgtctctgattttcgcggttcaaaaatttcacaggatgatttacggtcgtaattttactctgttaacggatcataagcctctcttggctatattcggtaataaaaatgggatcccgatctacacggcttcccgattgcagcgttgggccctaattttgtccaattatgattttacaataaaatatgttaaatccgctaattttggacaggccgacgttttgtctcgactgatttctgagcaccggacagacgaagaagtcattgtcgcccacacatcggacaacgacgtggacagcactgaagaagtcgaatatgctcttcttgtcaacttggagcagctgccagtcgatgcaaaagaagtgagcgaactgacgacttcggacgatttgttgcagcaggtggcacaattcgtacgttccgggtggccaaacaaatgcccagctaatgaattaatgcctttctattcgagacgtgatacgctcaccctcgtgggcggttcaattttgacaggaaaccgagtcattgttcctgcgccgcttcgtcaacgtgtactcaagacgttgcactttgctcatcctggcattgtgcgaatgaaggcgctggctcgcaaccatgtctttggcccggtcttgacagtgacattgaggcaatggtaaagcattgtgcggaatgtcaattcgccgccaaaatgccgccgaaagcgccacttcgaccatggccaattcctggtgaagtttttggacgtgtccatattgattttgcaggcccatgtgccgatggaaacatttatctcatcctcgtggatgcactttccaaatggcctgaagtgatgcagatgcgcacgacaacagccaagggcacaatcgaagctttaaatttggtatttcaccggtatggtgctccaaaagaaatagtgtctgacaacggaccaccatttacttcccatgaatttaaagacttttgcaggcttaaaggcattaagcacaagttctccccgccgtatcagccgcactgtaatggtcaagccgagcggatggtggacacattcaaacggcaggcaaagaaaaacgcaaaatccaaaaatcaacaatggatttcggaatttttgtttgcgtaccggtcctcgccgagtccaattttgaatggtttttcccccgcagaattatttttgggaagaacactccgcacgcccttgtcaatgcttgaaccgagacagcacacgccgaacgagaacaacaaccaacgtggacagtaccaatcgaggatgtcacagcagtacaaccgacatcatggcacaaaaagccgttcattcaattcaggagactcagtcttagtcttgaattatggtaggagtggtaagccatcatggttggaaggtaaaattgtgagaggtagtggtttgatttggaaaatcgaaattccaatccttggaattacagtaacgcgtcacgtcaatcaaatgcgttcattttccccttacatttcaagtaagattgtgtccgatcagattcaagccgctccgcaacaaccaattcctccaatggcgccaattcaaattgatcagacacctgtccgtgatcaaactcctgtccgtgaccgcacacccgaaccagtcaaatctcctcgtccgcagcgacagcgcaagaagccaattcgctattcgcccggctaattgccacggacggtctttccaaaagagggagatgttggatgtgttgatatttaatattattaagtttcgacacgaatacttttattgattagttatttgttgatgggtcctctcccatcgactcattcttcgcatttgtgttattttacatttcggtgtttatttttcggactttctaatttgactccgtcgttattttattattattttgtgattctaattttattgtttattcatttaataaatttatcttgtttgtgtgttagcaaaacacaacaacactgatgttgggattcagttggcgacaaaggcagcagctgaagaacattctcgtgaacatgctcgacgccgaaacagctgaaggaatggattttttgtcttcaacacatgaagtcaatgccctgcgccgacgtctgacaagtcacgctcgttttgaagtgcggcacagcgaaggaggaacaacactgatatgtacgaacatccgtcaggtgttggtgcaaagagtggaggcgttgcttggccaaggtgggagaactgattggaaccgtgcagagtaaagatttaaggacgaatgaaagaatttgagcaaaaattgtttgtgtcaattgttggagatcgaggatgtggaacaggcgacacgactagggcctgtactggaacagctctagcaaatcgctgatttgccatttggccgaaatttgacgattgaatggtcttataattttttgcattttttgcacattttttcttaaggtttttgcccggcgacatggctttcatctgcgcttggatgggacacatgggaccagcctccgttttcccttgtgcactgtgccgaattccatacaaagctttgggcaacaccatcatcgggcgaaggacagcaaagtcgatcgtcggtggcgccgcaatttttagtcaccgaacagcagacacgggcaagcacacaactcgggactcaatttcgtgtggaagtcagaaagacttgcctctctttttcgtgccgccaacaaatgtgatcccttcaccatttcacacgcttcacagtgccggacggaaatgcattgacttttttcaaaaaaatgggtgccccgcagaaaaacgccaattagaagaaattatggcaaaatcgggagcaattcggcatgccaagacgcaagagtatactggtcctgacattcccctctttctttttttcgaatcgattttaggcgaccacattaagcgcctacttctcgcctcaaccgaaatccgatcgattggaacacccttttcgatggatattgccgccctccttgacgaaattcgggagctccacgtttttggacgtgcggac

SEQ ID NO: 51710 - DNA, 2515 bp, Heterodera glycines
atgaggtcggtggaattgagactcgaagtggcaagagattgagtgcggccgcctgcgaatgttcaccgattcaggcaagtcaaaaagcaatgccaaatacaggcaggaggagtttttttttttttttaattcaaaccccctagagttttcaaatattcaattacttttactggcatttttaaaaaattcagattttttgaggggggggggggggggggaaatctaaaaatttctttcccactgtccaattattttttaaaatttgtttctaaattcttcgtatcgtcatggaatgagaaaggagtttttagcagatttcttacttaaagtttggccaaaaaattagccactttttgaatgaatttgcgtcaatttataaaaatttaccgcaatttttttttttgggaatttccattcagaaaaagcaattcatgtaattttaaattcggagttcatttgggtgggtttattcccctctcccatgtcgtttcccccccgaaaaaattttaaaaaaattcaaacatagaaataaaaaaaaaatttttttccagtgagatttcgaaaattttttggaaaaaaaattcaaaatcacatgcgtgtttattcagtccacttcaaatgccacaatgttgcacacgttggacgccttggccaagtggaaacagtccacgttgtgcttcaacgcctgtctcaaatatcggtgcgatccgttgcgcaaattcttaatgtacagccggcaacacacgtgcagacggtgcaaaatagtcagaaagttgttacaaaatgaggtaacaacaacaacaaattggtatttgatgggacaaaattttaaaaaaaaattttaaattgcgtattttttggtcaaaattgcaaaactttaggccgatgctgtctgtccatccggggaaaagttcgcccttctccaaacattttttggtcctttatggaaaaaaataatataaaaaaaaaaaaattttattttgggtaattttttcttcattttcaaagaaaatttttaatttaagtttttaccatcgaaaaattgtgagttttcaaaaaatttttatgaaaatttgggctataacacgtcaccctggcacaccaattcctttaaaattctcaaattttgtcagaactccggcgggttcgggaattttttttttttttttgtccagctcatcttggtatatgacaaggaggagctggaaaccacgctgctcaattacctctatttccatgcgcttaaagtgtttgacgcgaacgccgaccaacactatgccaagaatcgacgtaaaattcacggatttatttttatttattcgtataacggagacgaatagacaaattttgagagcggttttcgaaaacaaaaaatcaaacaaacaagggaattagtgacgccgtcgaggaaaattcggtttttatcctttttgtcaccccccccccctgaaaatgttttaaaaatatttttttctagggtaattttggcgctgaacacgaatctaacattagctttggccaattccgcatcccggacccgaactcgaacaaaaagtcgaaattcgaatttttttagaattacatttatgttagaacctgtatagaatgaccagatttgtgactaatttatctagttttaatcagttttagggcaatgtgaaaaattttttaaattttaatttttgttcgaattcgggttcaggattcggaattaatataaatgaatgtcagattcgtgatcagcgacctcacaaagccccagggaaggcgttttatacgacttttttaaatttttattttttcgaaaaatggggtggaggggacaaagtacattattaccacgatatactgtagttgactggtaaaaaattccacgtaacacacctaaaaaacataagagctaaaaataaatgtcatatacgtgttcaacgcataaatttaccctagaaaaattattttaaaaaaaaatttaagggggggggtgaaaaaaaggataagaaccgaaaattcaaaaaaaaaattatgcttttccctaaaaatttctcagatttttgtgtcatttttttggagtcatattttcaaaaaaaaaaaaagacaaaatcggggcaacgatttggtgggtttcagttaagaaaattgattaaatatgtccaaaaaatttggttattttttcacgaaaatttctcgatgcgatgataccattaaaaaaaacgacgaaatttgtcaattaaatgcaatctaatgtgtttaaaaaaatgattgaattttcctaaaaatttttccacacaacacattttttgcagcacaacatccctacttcagcgcgtacacccagttccgggacttgaaacgcgtgctgaccacgaacattgtcgcctgtttcaacgtgccaattccgctgcaaacggcggcacttcgcccgttcattttccgcacaaagctgcgcaccaaatgggaaatgcaacaaattgttggccgctcatgcgaagttggtggtcgtcatttgtctgtctaa

SEQ ID NO: 51711 - DNA, 1171 bp, Heterodera glycines
atggaacatcaccagggacaagaaacttgggtacgttgacgctggctttatgtgattagtacagtatgccctgtgccgatgaaggaagtgattgatatgatcaggattaaatatcggaaacagtttttgaaaaaaatagtgattagaatagcgtttacggtaacaaatgtgtaaatgacatttcctaaatttgggttccgatcagcagatcttccgtctgatgttgagtgatcggaatagcttctgatcagacaattaactgatcagaaaaggaatagttcgataactaatcagaatttaaagcatgagaaaatgatttcaaaatgtataaatatgatcgtaaaggaattctattccacgcgttataagcatagcccataattataccttcaaattttcagatttattgaaccggaccgaaagggcgaggtcggaattttcagaaatttcgtttaaaaaaacttttttgtttccctgaaaatttaggaagttctccggcctcaatgcggcacaaatctttacgcatcacaagccgggcaaaccgcgattggagcaaaccgaaaccaagtcgaggagaaaattttaaaaaaatcgcaaaaaaatttaaatttaattaggtgcccctggtggaatacaaaaaggaatgggagaccattttggacaaggagggcgaaggcattttgccaaaacaatcgggcgactacggcttcgcctcccaggctggagaggtaaggtcaaaaatggcaatcaaagattgatcggatttggaagtgatcagttgagtaaaatgataggagtgacaaaaaaagtgatcaaacgaattagtaaggggtaaatgaaaaaagcatttaaattattggaaaaaagcaatcaaatttaaaaaggatattgataaaaaagatggatttaaaaaattgaatcaagtagtgatcactgatcaggcaaaaataatcgaataaatttggaagtgatcagaaaagatggattagaaaagcttcgtagttggttactgatcactaattaggacaaaaaaaataatttttttaaacttgaggttaacatcggcgcccgtcgaaaccaagtggcactgatcagaggacgtctgccaaacgatcgacgtaaggaggactaagttaaaagcccctaattgggctgcttctaagtgattaaa

SEQ ID NO: 51712 - DNA, 2358 bp, Heterodera glycines
atgtccaaatgtactaattaccatatccatcttaatatacagtactgtacacgcgagtatcgcgttactgtgattggattgagaagaacactgacggtgaggtgaaatgtttgtgaattggagaacacgaagactttgcaaaatgtgataaaaaaaagacgaacatttcaaggtttttgcaattattatccagattaattagttttatgcttaagtaaatatgctaatggataattgtcaaataatattgttggaaattgtcatttaaaatttgagacgtgaaaattttaaatttgagaagtgaaatttttaatttaatttatgcctttaaagctttccttactgttgtttctacggccaactagttgtaagtttgtttgtctttactaagttacaaaatttaagaataaaaaagtctttttattaaaatattttccataaaattgatcaaagttttttaaataaaacttagtcaatttacaataaattagggtgggtcgggaccggggcgggaattcccagtcctccgatgtcccggtcccggattttgaaaaaaaatcccggtcccggtttgccaataatttaaataaattttgtttgaaacactgattaaatatattatagtttaattttacgttaacttttgggttttataaaaaaaaaaacaaaaaattaattatttaattttttcatttgaaataaactaaaaatttgaattttttgaatttttttgaatttttaaaattccccggttggtcccggtcccggacaaaaaccgaggtcccggtcccggcttctcaggtcccggcaggtcccggttttggccaaaattcctggtcccgtactgctcaccccaaaatgcttgactcatgcttatgcgaattcctttggcgcgaagactgcaaacggcgcggtgctgatacattcgatgacattttacttcaaattgcggcttttatgcctccttctaaataatcccgccggcgccaaaactggcgcatttcttccctttttctacattttggggtgcggcagcctaatggaaaagtacccatagaaccaatgtataaatattatttgctatatttgttaaaaaaaacaataaatcaatttaaaaatttgaaaaaaaaagtctaaaaaatttttaaaaaattataattattaaaaaaggaaaattttttatttaaaatattgctaaaatctatttttcctagcaaaaactgacgggtgagacttttgtttttactcgttgacaatttgttattgctacaaaaatgacttaaaatgatgttttacacgcagtttaacacccgaaaaaagcaaagtattttgttagccctaaagcaaaactgtgcacgcaaataaacaattaatgaattttgaaatgctatttcgaatttaatttcattaatggtccatttgtttacacatatttcccaaaaagtattctttcgcccacattccaattatagttttataaaaaattttaattttctcatcgttaaataaatatacaaattcaaattcaaaaattaatttggcccaaaaatagtaatcaaattttagttcctaaataataagaatcattcatcaatccttgtgtaaataaaaaaaattattatttaagcccttatttgaataatgcttatccataacaaaaaaataattttcctttcgtttaacaaatgcaaaatcaattaatttaaatcgattatacttgcaattagtaagagaaaagtttttctgttgtttggatagaattaaatttaatatgtcctattatatataccaaagttagtaagacgtattgttgttataaatgaaaatttttcaatagttaaaaataaaaaaagcaattaaaattaaaattaagatttttattttttttatattcagttaattttctggctaaattttgaaagttttttttatcttattatgacatttttatgtttattttttttcattttacaatttttgcgttatttcatttagcaaataaaaattaatttaattttataaaatgttcaaaattctttgcctgttttcccttctgattgtgccaattcttacagcatcatataagccaaagtgcaaagtgaatttacaaataattaattattatgttattttaaaaatgaaaaataataaaacatttttaactttaagcttccatgctcaataattgagcactatggccaaaagaaatgcaacggatgtgagccgagttgcgacaatccgaacccaaagatatgtacgaaaaagaaatgcaattgctcttgcgaatgtttgccgggattatttcgcaacaaaaagtcgggaaaatgcgtgaagaaatgcccatacaaagcggattaa

SEQ ID NO: 51713 - DNA, 187 bp, Heterodera glycines
ttagcatatttacttaagcataaaactaattaatctggataataattgcaaaaaccttgaaatgttcgtcttttttttatcacattttgcaaagtcttcgtgttctccaattcacaaacatttcacctcaccgtcagtgttcttctcaatccaatcacagtaacgcgatactcgcgtgtacagtact

SEQ ID NO: 51714 - DNA, 329 bp, Heterodera glycines
atcggagtaggacaaaacgtcgtcagccgaaacgtcgtcgaacgaatttttcgaccataacttttttctttctcaaccaaattaaacattcttggtattattcgaaagcattcgaaaaatgctattagcctgcaaattttcaaaaatttttatttatgcacaaaaaaatcagagcaaaaaaagttcgaattactgggtttttgagttccttctggccataacttttttgaaacttaacgaaaatttttgagattttgcaaattaataataaacacatagagctatcgaacaacaccaacaattcttaatttgattgacagtgaacaaag

SEQ ID NO: 51715 - DNA, 1092 bp, Heterodera glycines
  unsure (1)..(1092): unsure at all n locations
atggaggccgaagcattgccnagggcggcggagaggcgaaaaggagcggagacggaggaggagcaggaggagcagcagctgatcagctggctgcaccatgcccagtgggacaccatagccgaacttctggagaacgagtgggtccgcgaacagctcaaaatcggtgagtcagtcacaaaatcatgaaaagaaaaattcagtcccgactcgatgattcataccaaacagacagtatttcggggaggggggggggggggtaaggngcatgtgccctttccggaattcgaaaattttttaattgaaaaaaaatttaaaattttgcgggcttaatgggcatacgccgaagtttattcgggcaatttttcaactcattcttttgaaagctccaaaccttgtttaaaaaaatctgaatagcaatttctttaatcgaattattagaataattagtgaatataaataattaattttgtcggcataggtttcatttcgaatgacgaagcgaaagagcgactgacatatttggttagttttgaaatggccaacgaaatagtggcatttttaaatttggcaacagaaaaagaaaaaaaagaaaaaataaaagagatgaaaaagaaatatgaaaaaactaaagaggaaaaagagaaaaaagaagaaaaggagcaaagtgagcaaaaaaaattggcagataaaaacatgagagaaatgatcagagaagaagagaaaatgaaagagttaaaggtgagaagggaacaaatgcagagagaaaagcagaaaaagaaggcagaggaaagagagagagaaagggaaaggagagaaaaagaaacgagcgcaaaaatgaaaagagaggaaagtgaagagaaaagtagtcgggatagagaagaaaaagaaatgaaagagaccaaagaagaaaaagagggaaaagaaaagggagcagcaaagagaaaagaaaagggaaagaaaaaggggaaaacgcagacagaagagagagaagagagcgaaagaggaaaaatggagagagaaaaagaagcggaggaaaagagtttggagagtgaaatggcacaagtccaattagacggtaaaagaaatgtttaa

SEQ ID NO: 51716 - DNA, 2315 bp, Heterodera glycines
atggttgccaaaacatgcaattggccccgatggaagttttcccgttacttgaacaaccaatacgggcaacaggaacaactcaagcatgatgcagttcagcttatgctacaggtcaatgcaccaatggatttggacggctacgacgcggacactttcgtgcctcacgtcgttgactactggaacaacgcgcagcgacaacaccgctttgctgtgttcatctttggctcgttgggacagtacaagccgctctacaaatacattgacaacacctacgacactccgctgctgttgtacttcaatgaggaccattttgatggtgtgcagaagcagggcggtctgcaaccatactgcttggagtgtgagcggccataccgaagaatgtcgacacacagtaaatcatgtaaggcgcgctgtgtgctgtgctcacgtgttggaccagcttttccatgtccatcatccgccggcttcttcaaaaaatgtaaagagtgcaacaaaaaattcacaaacaacggctgctaccagcaccatctacagtcaggcttctgcaaaaggtcaaaaaagtgcaaggactgcggtgctgtttgggatgttgtcaacaacactcaaaatggcagaaaagggcatgtttgtggtgaacgcttctgtaagatgtgcaacaactaccacaacatcgagcggggatgctacatccaacccattgagcccaaggaaagcgacgcctaccgcattgtggcatttgacttggagactatgcagcatactccatctgaaaagcccgaaaagcgtgagcatttgccgaatttcatcgcagcacgggtcgcctgccccgactgcattgaaaatgagagctggcgagaggcatcgggagggtgtgaagtgtgtggacccaatcgtacggttgcgttctgccagcgccacttcactgagacaacagtcgacaagcaagtggtggcggaaagcccattggaagcgtttgtcagctggctgataaacgacttgcctttggcctacgacacctatgccttctctcactttggcggccgcttcgatatggtgttggtgttccgcgaactgttcaaacgcggatataatccggatatgttgcgcaaggtaataattgactatttttcaaatttgaataatttttcaattttaagggaaataaaatgtatgaaatgcggattcggaggcttttacttccctctacccgtatgtcaagtgagttttgttatacaattattcacaatttctaattgtttgtttcagtttctccaccacttacccaattgaacacccaaaagtgctcatcttgaatgaaaatgtggaatggacaagcgtacgcgacaacccatacaaattgtctctgctcaaggtgtgggtgatcccgccacgcaagtgcgatgtgccagtgttgccggttaaagtcaacgagcggctatgcttcccgctttgtatgcagtgtgctcttgactacccaaagggaggcgtgaattttgactaccaatgtgaacacgacgaccaacaacgcggatgggtcacaacatgtacatccattgaattggatgctgcgcttgaggagggttaccgtgtgaccaaagtgttccgactgttgaagtacaagcatggcgacgacaaactgtttaggccctacatcgccgagttcatgtcgcagaaaattgaagcgagcggatttgacgccagcattaagggaaatacagagttggagcagcagttcatcacagagtgtgcagagaaattcggcatttcaatcgataagaacaacatgaaagtcaacaagggcaagcggtcgttggaaaagctgtgtctcaacaacctgtgggggcgcttctcgttgcgcaactttggccttgcccagacgctgataaccgacgacccttcggtgctggcggaatacttggacaaccgctcagttgacgtcacttccatcgacgagttggatgcggaccatattctgatcagctatgtgcaaaaggagtgggtggaggagcacgagtgctccaatattggtgagattttaaagaattttttaaaaatatttgtaattttcagtaatctcgctgtggacaacatcaaaggcccgccttttgctgttgaaagcgatgcagaaggtgatgagaacgccaggatgtcggctactctacacagacaccgactcgctgatctttgtccatccgatcggcatgaatccgctacagactggaccacacttgggacagttccccgatgagtaccccaatcatgaaattgtggagtattgtagcggcggagcgaagcaggttaatttatcattttaa

SEQ ID NO: 51717 - DNA, 1073 bp, Heterodera glycines
atggacaaaattgatggcacaaaaactgttgtcaacaaatgcattttaatccgaattttgaaattgaagaatttatttgatggtaacattttccaaaatgtgagcgatttaataatggttttgtgttgctgatgatgatgatgttagaagaagcatgaattgtaattggcttaaactttaaaaaaaattaaaaatttgcaccgaaaaattaaatttgcaccgattgtcgcaaattgtcagaatagcgcaaaataccgcgcgaatctcaaaatggaaattttatgctcctgactgactgtatgttgacaatttattttgatgttttaaggaaattttttaatgtttttatggatgccttctcttgtttcatatgatggattgaaattggaaattttaatgtgattatttgcttagcttaacgagtatatgtatgcttttgaacaaataaatgcgcccccccccccgcccttcaaaattttgaaaaaaaaataaaataataggagactcagaattttgaaaattttttataaaaactgatgacaagctaatgtgataaaacaggttaattcttttcctttcagtatccctgcaaagtttggggcgcttctgataagtttctgaaaaaaaagttaagcctaaactttttggcctgtttaaaaaggaattaaaaatttttaaaaatttattcagtgtccgtttggggtactcaaacatttatggggagcaaaaatccaacgcagaattaaagtacagactatagggaagctattcccgaaggattcggtctccccataaatctgggcgcatcggttcagggggactgccccgaaaacccaaaaaaaattttttggataaaaattatttaaatgaactgactagataatatttaaaataggttatttctcttcctttcagtattcctgcaaagtttggtgcgcttctgatcagtttctgaaaaaaaagttaagcctaaactttttggcctgtttaaaaaggaattaaaaatttttaaaaattttattcatctccctttttgatagaaaaagcatcagagtgcctaaactaacatgtaa

SEQ ID NO: 51718 - DNA, 1178 bp, Heterodera glycines
atgctaattgacgcggcggcgccaccattcatggaagaaccagtagcagcaacagcagaagaggatcaatttaaatcagaatcatctgatgaaagtgcttcttctttgtttgaagaagaagaatcggaaagtgattctgatcaggaattttccaacaaaaaatcactgacaaataaaaaaagacgaagcattgatgggggaaagcatcatccattaaagaattggagacaattaattaatgaatattatttaattaaaaatgcacaaaatattaccgacaaaaaaattgctgaacagtttggcatcaccagaaaaacactgtgcacgtggaagaagaagcatgaagcagaatgtggtatggtgctttatttttttggaacctttttttatatttttggcatttttcttcgacttttattaggatttagacatttgtggcatttcttttcagactgccttaagcagttcccgaatattttgtgaaatgttgaaaaatatgccaaaaaaacctctcaaatttgtcgaaaaataagccaaaaaatcttctgtactgctaaccacctaattgcagttgcgcaaaagcaacttgccccatttcaaaatgaacacaatgtgagcaaaatggaaaaattgagcaccaccataactggcaaagcgccaatgatggataaaagaagagccaataaagtgaaaattggcggcggcacttccatggcaaaaaaattgaaaattggcacttctgctgggtcttcaaaagcacaaaagattgaaccacaacaacatgataaagaaaagaaaagtatttccattttatttcgacaattttaaaaatctatataaatgcgtaagagttggcggtttcttgaaatttttgaaaacctagcccaatcggttttaactctgaattaattggacctcaatttctctgcatgtttagttcagagaccgttacgatatcgatttatcgtacgaaattttcgatataaattttgcgatattccagaaaaaattgatcgagaaatttcttgttttccattatttttcgattgcgatttttttgaatgttttattgaaaaatatcggtcgaatcagttgtctagtctcaagtttcgttttgttttggtttgtttcaatccgccagctttttggcataaaaattttttgaaaattctaataaa

SEQ ID NO: 51719 - DNA, 2218 bp, Heterodera glycines
atgttatggccaatcattttcggcttattatttttgacaattgaattggaaagtgttgatagggacaagaaccgccgagatcgtgttgagccggggtcaagtgtgagtcaaatcccgacaaacaatggaaaacatttaaaaatgttgaaaattgtaaaaaaaatttaaaaaaatgttgaaaaataccgaaactctggggaaatggctttaatattttttaataccaataatttatgggcattaaggaacaaacattgccacaaaatgatatcgaaaatatgccatttgatgattttgtggatgatttatttacattgccacaaaagcatgtcgaaaatatgccatttgatgattttgtggaggatttatttcaaacaaattatgcgcatgcaaaaccacaaatcccgattaaaccctcggctggaaagcaacgcaatgatcagccaacaaccagcagatttaatacagtacctaatcgcgccaaacagacgcagactcgaaggattgatcagccaacgactcaccaaactgatcactcaatgattaaagggaagggcattgaaataggaagacaaatttctgatcagtcaacaaccagcagatttaatacagtacctaatcgcgccaaacagacgcagactcgaaggattgatcagccaacgactcaccaaactgatcagtcaatgattaaagggaagggcattgaaataggaagacaaatttctgatcagtcaacaaccagcagaattaatacagtacccaatcgcgccaaacagacgcagactcgaaggattgatcagccaacgactcaccaaactgatcagtcaatgatcagagggaagggcattgaaataggaagacaaatttctgatcagccaacaaccagcagaattaatacagaaccgaagcaaaccaaactgacgcaaattacgcaaaatcgaccgactgatcagctaacgacccaccgaactgatcagtcaatgatcagagggaagggcattgtaatgggagggcaagtttctgatctatcaacaatcgccatgaaggataataaacaaacggaaaggcaaatctttgaaaagccaaccagcagcagaaataatacagaaccaaagcgcaataaacaaacgcaaactcgacggattgatcagccaacgagaactgatcagccattgttcagggcgaagggcattgtaatggaaagacaagtttctgatcggtcaatggcctctgatcagtcaactatcacgacgaagggcattgtaatgggaaaacaaacgtctgatcagtcaatgatcagcgcaaatgaacgtaaacaaatggaaagacaaatctctgatcagtcaacgatcagcacgaaaggctctgatcagtcaaaaattagcgaaattgaaccccagccgatgatggacaatcgtaaattgaaggaaaagcaaactgatcccattcagtcgtcgaacctaagcagatcaaaaacggaaccgatgggccaaaaacaaacgaaaaggcaactgaatgatcagccaaaattcaaccgaactaaatcagatttgctaggaaacgataagcaaaccgaaaaacagatgtccagatcaaattcggagccagcgaaaagtaaaaaaaaattgaattaacttcgaataaaatgaattgttcggattttacaaatttaaaattcattaaattcgaaaattatttgttggcccggtgatgccgaaacggccaaggaaatttgaattgaattttaaggatttaagatttatattaaaggcaccttgctgtattaaattaaagaaaaattaaaataataattgcatattattcactattaggagcatatccgaaaattaaaataatttttacaaaatcaaaatacaaagaattgtcaaaagtaatcaaaaatgagcaaccacaaagcgcagaagaagagccaagttggacaaaataataaataaattattatttaattaaattttaaaatatttttagaaactgacgaagaaaaacgacaaattgtccaccaattcattgaattaaaaaagaaatatttacatttaactgatgaaaattatgacctcccattcattgaaatggaggagagaattgctggagaaatgggcttaaaacggagcacaattctttcctggaagaaggaattcgagaaaaacaaaaaacgtaactttttaaagcctcatttttggaaaaaataggaaataaa

SEQ ID NO: 51720 - DNA, 753 bp, Heterodera glycines
  unsure (1)..(753): unsure at all n locations
atgtcgaaagaactctatcctctttatccatccaattcacgggttattgacctgagaagtaaaataactcctgcgcctatgtcaaaaaccaagcagttttttaatgagttgcaaagaattgctggatcatcgccaacaaaggttaatttcttttccattacaaacctaaccataaacaacaacaaaataacatactanattagccaaaattagatcactaattagatataagcactagttgcaaggcgatatactgatagaaatcatttttcttttaagtcatcatcgtcgctacacatgaaaagggcttacgaaagtgagcgttggtttagcccacgggtcgattctgaccaggcagacacttcgggaccgcctcgtcgttcaattttaacacaatcaagacttcaattattgtcggcacagcgaggacgtgaaacgagaaaaccatattggttagttttactatttaaattcggtattgttatagttgttaactgggaataacttgtgacgaaggttttgaccttaaacttataattgacacactttcacaatttcaggcgttgtccgatgccatcagcaagatccatcgatacggaaattacgcagccttcacttgttgacattattgctacgccgttagcgcgacagggaccgattaagccatttcgacaccgagagccggagacaggcagaaaaacgaattcgtttgctgtggatgaagatatcctaactgttgaggaaaaagaaaag

SEQ ID NO: 51721 - DNA, 736 bp, Heterodera glycines
atgacgacttcctttgcaattttggcacaaataaaacgcgatattgtgagtaacagtcataaaatacttaattaaaaatatattttggctccttttttttagctcatttgtcatggcagcgcatttttcacatattttatttatgtttttgccattttcaatgcgtcattgcaacagataatcaggtacagtgattttcgacaggataattaggttaacaaattgaacccccaattaaagttgtttttctcatcatgatattacattattcgcacgttttattgctgatttttgccgtttacactgcgtcaaatggagctgttaaccatgtctagaaattttctataaaaaatttgtcatgattcaaattacaatcattttaaatttccagaacgaaactgattcgtcgagcgaatgggatgaaaatgaagcgctggaggatgaggaaaaagaggagtctcaaattattggtgcgccatcggagctgttggtcatggcgacccacgactcggttcaagtgtcatggttaccaccgcgggatgacaatgtgctgatcagaggatatttggttggtcggcgatttaacaatcatacagccatattttttttccaaagatcggttggggtattaacataccggacgtggaaaaggcgacggttgacccggaggctcggcattttactattcgagggctcaaaccgaaccgtgaatatgtgatttcgttgcgggcgttca

SEQ ID NO: 51722 - DNA, 1631 bp, Heterodera glycines
ccactgacaactttgcgcttttgggtggtttccgtttttggtaataaaggacagaaaatggtatttaaagtttaaaattggcaatcattaaggaacaagcatcgcgttgtgcagcattgtggagaatttgtttttcttttatcttttctcgacaaggcaattaattattaatttcattttgcaatttacttaatttaacaaggaatatcaattgttgaatttattattatttatttatattataaaaatcaaattaaaaacagaaagcaccaccggaccacgttcaacatgtacatgatgttcatctcgttgttcgacattttcatcagcatttcctacatccttatccaatcaatgaacgttttgatggactttctccgatcactgacacttttcagaatatggtgggacaatttcaaatatataaaaataaaaataaattttatttttataaaataaatgaataatttaggcacatttacatggttccctttttgaccatctctcactgtgccatcacttctgcgtcttttctcatgtgagcttttttaattaattaaataatcaaccgccttaattgtcaaaataattaatttaatttttttttctatttttttagtctcgccgccaccattgagcgctatttgctcactgccaattcgaaacacattcgattggtgcagagaaatcgccgatacataatagcatttgccattctgatgggaatcatctccaaagtgaccatctgtttggagtttaaggtcaaatatttaattgcctctaaattttaacattaaaaaaaaatttgcaatttaatttttaaaatgtattaaaaatccaaattaaaatttattcagatttcgtatttggaagattgtgccaatactatgaatgaaattgaaataaactttgccgactttgtcttcgacacggattatcacttggtattcaaattaatagttacattatccatttaatctaacttaaatcagttatttttagtattggcgcttttattaccgcaattttgtaacaatatttttcccattcttcgcacttttaatgttcgtttaatcataatttattatttaattatttgctttataaataatttatacataaataataatgttttgattcaaaaaaatataaaataaattcgcagattgaatgccaaaatcatcagtgtgttggccaaggtcgaaaaagagaattacaaattccaaatgcttcattcgtccaccgcaacggccaaacaaatgaaacggaaggtaaaagaaaaattaaatataaaaatgaaaattttaatttaaaattaatttttcctcaaaagaaagtcactcgggcagcgaccatcaccaccattctgttggtgtgctcctatttggtgtccaacatcatcagtgtggcactgaccacttgggaacacattgacaaaccgtccctcgtcggcgagtacatacagtaagcctcagtaccgtcttcgttattcgtgccatcgtcctcccccctccctccaaatcagactctatctgatctccattgatatgtcctcgctgctcaccgtttgctcctgcgcttttcggcccctcatttatttgatctgccagccggcactgcgcaaggaagtg

SEQ ID NO: 51723 - DNA, 112 bp, Heterodera glycines
  unsure (1)..(112): unsure at all n locations
gctatagggaagctattccggaaggattcggtctccccatatatctgcgcgcatcggttcggagagactgccccgaaacanaaaaatcgattgattcaagtgtccgtctgcg

SEQ ID NO: 51724 - DNA, 396 bp, Heterodera glycines
aattaaaaatttttaaaaattttattcatctcccttttgatagaaaaagcatcagagagccttatttaacttttaattaacatttggtgcgtttcagagcagtttctgaaaaaatatttatgaattgattttgctaaaaaaataaaatagtgaagctttaaaaattaataaaaaattttaaattcagaattactggagttagcatcatagcagtgcttttccttgtctttttgatgctctcgcaaaatctggttcgcttctgaccagtttataaaaaaaaagttaagcctaaaatttttcgcatatttaaaaagcaattaaaaatttttagattttttattcatctccctttttgatagtgaaagcatctgagtgcctaaaataacttgcaaataa

SEQ ID NO: 51725 - DNA, 375 bp, Heterodera glycines
atgcagcagcacgtgcagaaacgggatgacaaacccgggactgagctgcccggacttgctcgcccaatgacggacccaaaatccgccaaaaagggccaaattcggatttgggttaaaggattcgttgttccgccattggaggcctggccattggaggaccggccattgaaggacccgcctttggaggacccgccattggaggattggccattggaggacccgccatttgcggatattcccgacattgagggaccgactttttgaggacccgacatttgaggatatacacaattcaaaaaaaaatgaatgaaaattttatttatatcattataaaaaaagagaaaaagctattcccgagggccggggaagcaaaaa

SEQ ID NO: 51726 - DNA, 658 bp, Heterodera glycines
atgtcaagtcctcaaaagtcaagtcctcaaaagtcgggtcctcaaaagtcgggtcctcaaatgtcgggtcctcaaaagtcgggtcctcaaatgtcgggtcctcaaaagtcaaatcctcaaaagtcgggtcctcaaaagtcgggtcctcaaaagtcgggtcctcaaatgtcgggtcctcaaaagtcaaatcctcaaaagtcgggtcctcaaaagtcgggtcctcaaatgtcgggtcctcaaaagtcaaatcctcaaaagtcgggtcctcaaaagtcgggtcctcaaatgtcgggtcctcaaaagtcaggtcctcagatgtcgggtagccgaaatttttagtttacgtagcaattcagaaaatattaagaaaagggaaccgatattttatgaatttttttcaaaattggggtattcatttaatataaggacactttggaaaactgagcaaaatcggtgttggttggttcagtttgattcagttggtcacaggtttgagctgattaaaaccttatggcccttaatttctcacggaaaacttggaaaagccaacacaactctgcctaaaagacagcttaaaaattgataacccataatttcgaaatttcccactgagacgcctaccgataaaattccttatcagaaaaatttctgaaaatta

SEQ ID NO: 51727 - DNA, 2117 bp, Heterodera glycines; identical to SEQ ID NO: 21145
  unsure (1)..(2117): unsure at all n locations

SEQ ID NO: 51728 - DNA, 868 bp, Heterodera glycines
atggcctgtacctgtacctggatccaggaaaaatacaggcctggatccaggtacaggccgatctctaattttcattagtagaatgtttatttttttgaactccccccccccccctttatacaacacaccgaatcagtttccttataaccagaagccattcctccaaaaatttgtgcttcaaaattttacggcaaagatgatgctccgattttgaaggctttttaatttagaaaaattttcctaaaagcatgtcatgcctgaaatttcggctctaattttatacatttcatttctattgccttctttaaacaatactaatcttttaattaagaatggatctgacacctgaacaagaacgcgagttgtataacgcctacaatcgtcccaatgtcccggaggacctcaccgaagcagaactgtcgcatgaagttcatttgggggcgtttaatcaagcgatgcaaatgcgtcatgcattgtctacaacagatttgaatgccgcgccaaaggacatcagcattactctaccattcacaccggaagtaatcagaaataaaaccattttttggtttcgggctgtgattttttaagcattttaagccataatttgacaatttgtgccatttaattgggtacttttacacttacgccacataaatttttttaattttgttgttttctggggtattcgggtgcgctgatcacgaatatgacattcatgtccatctatttagaaccccggaccagaattcgaacaaaagccgaaaattaatttttcacatgtattgtccaaaaacgattcaagtgcactaaatggccgtgaatctctattttttattatatgcctgtctatttgaatcggttttggaca

SEQ ID NO: 51729 - DNA, 402 bp, Heterodera glycines
attcggcatgcctttgtgatttccattcgtcagctccgtttggccatcgaaattggtgacccggtgctgatttcgcgctgcttcctgtacattgcgctcgcatttgcccaaaaagggcaattccttccggcactcaaaattgtgcggtacgttaagccatagaaatgagacaaaatgccaaataatttttcaaaaattttccctttttcagccaggaatggaacagagacactgagcttaggtccgcttttttgctgaattgcacccgcggcatttggtccagcatcaaatggctgaagatgaacagaaaagtgatgatgcttaaataatttcgcacacatattttttccttttaatttattgttttgtgttttggctaattaatcaaattaattgacaatt

SEQ ID NO: 51730 - DNA, 1653 bp, Heterodera glycines
atggaacggaacagcgaaccgctcgatgaggaagcggcaaacgggaatggaaatcagggggatctcccctccgaccgacaggacggggaacgagcgaatgcggcgcagcagaccaaaacaaagaaagggatggacgcgcaaggcctggggacaagccaaacgggtgttacacccgcggcatcgaagaatttgcgcagcggagcaattacggtgaggtcggcccgagatcggattgagagagcggctgaaacactctcgtcgcgaatcgcagaagcgcgggagctgatggactcggatttcacgaggggcgaagcgcccgagcacgccgcgcggctgatggcaatggaacggggacttggacaggtcactcggattttcgaaggacatttcgataagggaatcgcagaagcgggtgcagcacccgaggagcggcaggatttcttgtatgatttcgtggccgcccccttgccagcctcgacgaagtatctgcaactgcgggagcatccaactcctgccgaactgctccaaattgcggctgagcatctcggtgatatgcaggcgatgaggcaaacatttgaggacgaagaaagggagcagagcatctcccgatcgagcagatcagtcgacaccgaggacagtcacccatcgaaggagctcccacgcaccatggcaagacgaagcatgccagagtgggagacatcgttcagggatgccttggcgcggttccaggctggacaagttggccaagcgccacaaagattcgaacaagccaaccgggtggccccacccgtcatgccaaacatggctgcgctcatccaacgccgctcaaatgccccatcagtggccagtgttcgggtgaacaacccggtcagggaatggatggcaaggaaccgagggggagagaacgaacccccggcgcaacagcagccacaagctcagcaaccgctgcaagccgaacagcaacgatttgagcgacttacgctcaatgaccagggacaagcattccctcgggcatcccatcatgcccgtattcggaaggaggagcatcccagtcgggaacgcctccgaactcagggagcagctccctcacatcaccatcattcggaaactcgagcagacacattgacgactttcgaaacggttcgattgcagccaccgacgttttccgggaaaccggaggattggaccaccttttgggcctacttccaacgggcggtggacgacaaaccaatcccgggattcgaaaagcagcttcatctgctgcggtgcctaaaagaaggatcgccggcgcgaagagcggtggaggtgtacccaccgtcggatggaaattacccagttgtggtacaactgctgaaggagcgattcggcgacaccaacgatttgcaacgagcaattcgtgctcagctgctacatttgccaccagctaaagacaacgtggccagtctgacggcaatgatcgacgagttcgagaggggagtgtgccaactcgagcagctgggagccaacgtggacgacgagtcattcggtccgctgttggaagccaaactcccagtgagcatcctgactgagctgaggattcgggagagcatgatgggagcgaaatggacggtgagggagtcccaaaagcagtcgcggcaccagtcaaatgcatga

SEQ ID NO: 51731 - DNA, 648 bp, Heterodera glycines
gccaaggcatccctgaacgatgtctcccactctggcatgcttcgtcttgccatggtgcgtgggagctccttcgatgggtgactgtcctcggtgtcgactgatctgctcgatcgggagatgctctgctccctttcttcgtcctcaaatgtttgcctcatcgcctgcatatcaccgagatgctcagccgcaatttggagcagttcggcaggagttggatgctcccgcagttgcagatacttcgtcgaggctggcaagggggcggccacgaaatcatacaagaaatcctgccgctcctcgggtgctgcacccgcttctgcgattcccttatcgaaatgtccttcgaaaatccgagtgacctgtccaagtccccgttccattgccatcagccgcgcggcgtgctcgggcgcttcgcccctcgtgaaatccgagtccatcagctcccgcgcttctgcgattcgcgacgagagtgtttcagccgctctctcaatccgatctcgggccgacctcaccgtaattgctccgctgcgcaaattcttcgatgccgcgggtgtaacacccgtttggcttgtccccaggccttgcgcgtccatccctttctttgttttggtctgctgcgccgcattcgctcgttccccgtcctgtcggtcg

SEQ ID NO: 51732 - DNA, 56 bp, Heterodera glycines
gtcccagttcccggtcccgggttttgaaaagctcaggtcccggtcccggtagggca

SEQ ID NO: 51733 - DNA, 388 bp, Heterodera glycines
atgacaattaattgtgaaaaggaggaaaaagttaatagaaaatagactataaaatattattaaatgatttttttcatttaatttgctttattgagaatgaagtaaaattcatctttaatcagagatttaccagcccaaaattgctcactgacatagaacattacaagaaattaatttaaaaggttaaattaataaaacaattagctttaataaacacttggtaaaatgatattatatatagattaattaataaactataaaataaaaaatctaaaaaagaaaacgtttatcttattagtgcaattaaatgtaaataaattttagcagagaatatttatgttgaaatattacaaaatgtgatttaattttatattcaagtgaaaataaa

SEQ ID NO: 51734 - DNA, 826 bp, Heterodera glycines
atgaacaagcgcttgccgaatgagcttatttgggaaattgttgctgcaattccgataatgtaccttttcggaggagttgcaaagaagccaggtaatttttcaaaagtattattaaacaatttaaaaataaaggaggtacgcgtccaccatccggcatcaccgttgtcagccggacgttcgaaatttttcgtgccaagcggcatttttacttcttaaaaatagttggtaatatttaaaataacaataaatctgaatttttagatcgatcttgctcgaaatttcgagaggctctgtgcactgaggaagttaccgtgcggagaattgttcatacagttcggcttcattcaatttggattcgaaaatgaactggaggacgccaagtgtttcgccgactttttggtgtacctatattatggacgatctggccctaccgttacgacgagagtcgtgacttactcggcggtaagaaaaaaaaaatataataataatattaatattatttagccgattaaaattggagagctattcggcgccattctgacgcatgtgttgggaagcgcaaatccgctgaccatgaagaagcggactgcaggcggttatttgctgcgtcaacactttccgcggcttctccaactctcggcaacagaaatggcatcaggtggcattggtcaactggtccgctccgatgggatggaaatgtaccggctgatgaatccgcaccacaaaggagatgttggtcaattgattattattgaaacgtctcaacaccctggttcgtactattttaatttttcaatcgaataagtgttttttgtaattgaataaa

SEQ ID NO: 51735 - DNA, 1259 bp, Heterodera glycines
atgaaatttgcaaagaaaatgttaatgattcccgaggcggaatatttggctctacggagtgcgatgaatagtggtgattatctccaaaatgaaaaagcgagtttagacgcaaaaatttctcagaatttacaagaccccggcataagcgaggacctcaaggcgaagagacacgattggctctataaagaaaggcgtacggtaaaggggatacttgaaaatagaccacagaaggtagtgattgagaatcatgtacccggtccgaatgttgcaccatatctaggcctcaacactcaatccaaaccacaggagaccgatgaaccccggaaaataattattcctaggaaaagacttgaagagcaaactcctgatcctgaatcagataatgatacaataaatgagttaactccggagccccaaacaacatccacattaaaaacacccattccgatcaaaactattatacacccgacccttttaaacggtctttttaggtacgtgaaggaaaacaaagatttatttaaaattacggcggccggaaaggtacagtcgaacatgaatttgccgattgaaaacagtaattatagagatgttttgttgtatctcgcagggaagaaagatgaaacgccgcgcggtgcaaaatttctcaaagatcggttactgaaggatccaacagtaaaagacatggttgataaatcaaaggtcatgtggggacgtggaagaaaaaaggcaataaaatctataaaaacacccggcatagtgcgagagaagaaaccctttaaaccactaatatgggcaagactgtagagaaaattttatcgaaaatttattttaatttaaaatctccggcaagttttgctggaattcaaaaaattttaaatgaggccaaaaagattgacccgaaaattacgaccgatgacgttaataaattcctagaaaagcagaaaacatacacgattcacaagcccatcaggaaaagattcccgagactaaagacgataccaagtggcttccataccgattggcagtgcgatttgtgcatatttgaccagttgaaaaagcataacgacggttataaatatttattggtctgcatcgacgtgctgagtcgaatgatcttcagtgcaccggccaagtcaaagaagagtgaggacgtgatcgaggcttttgatcgggtgttcgaaaagtctaaaattatcccgatgaaaatatatagtgacgagtgggcagtgaattcccaagccaaggaaaagatgaaaaaa

SEQ ID NO: 51736 - DNA, 825 bp, Heterodera glycines
atgaatgctcatgtgcaggcgcaaattggctttaatgttggaatatttaacgcggtaagtgttttaggagttacgtaattcttgaaatattcgattgaatatttgtaaagagatgcttttcccaatgtttcattttttagaacctgggaggttccctccgttggaaccaagctgaagcacagagtttggcaagggacgcgcgggctgatcggtgccatcgacaacgcgatgaacgaaacgcggcagttcaaaatgctcgtgggaggactgatcagaatgcagcagcacgacgaattgacttgcgttttgcacgcgaagaagtacagcgttatgtggttgaagctgaaaccatcgcagaacaagcgagggacagacggcggcacgcggagaggcgtggaaagcagagaaacgaattgatgatttccgtcgtcggatcaacgatttgcgacgggttgaaaagcgagcaattgcacaagcagcggaagcgcggcgtcgctttgaccgaatcgctcgtgttcgtgagctctaaccttgttcatttaaagtacataatttcagcagagacagcattgagttggaagaaagatgggagccatttactccgcctccgttcacttcgtttcccaccgcttcgcccactcgaattgcgccttttgtggtgccaacaacggactttggcacggacaccgtacgacctccgccacacgtcactccgccgtcggatttgacatcgctgttcacttccacagtcatttcgccacggactcggcccaagccgtacactcggcacagcgcaactgttccatgggagaccggcattccgaa

SEQ ID NO: 51737 - DNA, 557 bp, Heterodera glycines
gtagaattcgacgtcatcgatggtgagaagggcagggaagcggccgctgtgtcggggcccggtggaattcgcgtgggcaccgccatccaacacaacaacactgcgcgcagtcagccgttgccggccaatgccaacaattccgccggacggatgttcatcgccggcagatttcggcgccccgttggcgcggttttgttcagtgttaaaatgggtccccactcttacaaatcattttgctggctattaaaattgacttctgatggacttgttatgtctgtccaaaagtgtcctgccttcggctgattccccgtcaaatttgttttttcccatcagccgaacaacaaagccaagtcggccgtcgcttcggtgcccgcggtggtcagtgccggcgacgacagtgcaaatggtccgccgctctctctgtccggcgtcactcgcaaaggccgtcgcatgttcaaagcgaatgatggcgaaaagggcaaaaacagcgacaaaaaggaaagtgccagtgacggcgttggcaaagaggacgacggaggacgggagggcgacaacga

SEQ ID NO: 51738 - DNA, 1581 bp, Heterodera glycines
atgattggagtcagtggtgccttactgaccacgctgggcacattgaacccggacccgcagacattgagccaaatgtgtgctgccatcgcttccggttccctcatcggctcaatcgtcgccactcgcataaaagtcaccgatttgccccaattggtggcactttttcacagttttgtcggaattgctgccacggcgacgtgtgtcagcaattacctagccgagttttcgcactttttggccgaccccgcaggcacggttgcggtgaagacttgtctctttttgggtgcttacatcggtggagtcactttcaccgggtctttgatggcctatggaaaattgcagggttattatttttagtttaatcaataacatgtcaaattggtcaattccaggtcttcttggcagcgcgccgactcttcttcccgccagaaatatgcttaattttgcacttctcagtgccaatgttgccgccctcggcttttatctgacaacggacagcatggccatgggcttgtccatgctcggcactacgtctttgctctcctctctgatgggcgtcaccctaacaatggcaatcggaggtgcagtcgattttttttttttttgctaaatttcccaatgcttttgcatttaggtgctgacatgcccgtagtgatcacggtgttaaactcgtacagtggttgggctctctgtgctgagggattaatgctcagcaacaatttgctgaccattgtcggtgcgctcattggcagttctggtgccattttgtcccacattatgtgcaaagttggtgattttttgcgttctgttcattatttcatcgttttaggcaatgaatcggtcgttgttcaatgttattttgggcggcgttggcacaaaatcgcaaaagggtggcaaagcacaggaaatcactggcactgctcaatttgcggaggtggaccaggtttgatgatggatacagtgaatttccatttcaaaaattctccataaatcaggtcgttgacatgatcaaggatgccaaaaacatcattattgtgcccggttatgggctttgcgctgcccaggcccgatacccaatcgccgaacttgtcaaataccttcgcgagaggggtgccaatgttcgctttgccatccatccggtggccggtcgaatgcccggccaattgaatgtgttgctcgccgaagctggtgtaccttacgacatcgtggaggagatggacgaaatcaacgacaacttccccgacactgacctcactttggttatcggagcaaatgacacggtctgtccaattgcgttcactgattgtgtgaaaagttttctcgtgcggtccaatgcttttcacacttcccttaattaaggttaatcgcgcggctgaggaagaccccaactcgtcaatcgcgggaatgcccgttttgaaagtctggcacagcaagcaggtggtggtgatgaagcggactatgggtgttggctatgcggcggtggacaatccgatcttcttcgaccacaacacgcagatgctgctgggggacgcgaagaaagtgtgcgacaaactgttggccggtgtcaaaagcggcacttaa

SEQ ID NO: 51739 - DNA, 483 bp, Heterodera glycines
atgaagggccttccgaatttagcgatgatgggcgaacttttttgcggtcttttgggaggcgcaagttttggcaaaaacgtgcgatcgtggcgagaagtgcaaaaggcagccaacctggtaaatgccgactttgcttgaccagtcgcttgtcggacgaattgccaaatccaatggcattattttcaatattttgtcccccagggccaatgcttcgtggccattgaccccgaatgctttgctccaacatttgtggactatttgcagttgttcctggaccaaacacgtgggcttaagccggttatcactgctcttcctccatggcattcgatcgcctcccttccctccttttagcgcgacccctccaaatcggtgttagtgcccggtgaccccgaaagaatgaacagcgaacggagcgcaaaggctggcggagttatttactcagcaggacaaattcgggatttgctcagtcggaggagcacttaa

SEQ ID NO: 51740 - DNA, 993 bp, Heterodera glycines
atggatgaagacttcgctaaagttggtgctaaaattgtgaaccgggaagaggcacttcgtgctgatgttttacttaaggtgaactgacaaagatttaagtctctcacaatttttaaatttccattcgctcagatgcgttgcccagaaacattcgaaatcgactcgtttcgaccaaattcaactttaatttcgttcattgggcctgcccaaaacggaagtgttgtcgagctgcttggcaagaagcaaatgaatgtctttgcgatggattgtatccctcgaatatcaagagctcaggtgacagacaatctcattagcaagtaattatatgaaattatatttcatttggattataggtttttgatgcgctttcttcaatggctaacattgccggctataaagcggtgattgaggcagcaaataattacggtcgttttttgtccggccaaatcacagcggcaggaaaaatcccacccactaaagtgttggtggtcggaggtggagtagccgggctgagcgcaattgcaaccgcaaaaaatttggtttcaaagtttcactgtattactcaacaaactcgtttttaagggtgcgattgtcagaggtttcgacactcgcccggcggtcaaagaccaggtcaaatcattgggagctgagtttttagaagtgagttttaaaactgttatttctcattaaatttttgttaatttgattcaaatacaggtcaaaattcaagaatctggcgagggcgttggaggttatgcaaaagaaatgagcccggctttcattgaggcggagatggaactttttcgtcaacaatgtcgcgaagtggacattatcatcagtacggcagcaatccctggaaaaaaagcgcctgttttgtttacaaaagtgattttgtttaaaatggcagttctttttatgccgatttcaggacatgatcgccctgatgaagcccggctccgttttggtggacttagcggcagaagcaggcggtaa

SEQ ID NO: 51741 - DNA, 985 bp, Heterodera glycines
atgacgaaatttctggtttacgagcacagagccccgggacaccaacaaatgcttttaagtttataaaatcgaaataagaatttaaatttcttcttaaaataaggataaaattatatattttttaactccatgtatcttttaaataaatatattatgtaaaattattaaaataaaataatctaaagaatcaatactgaataaaaaaaaccggtcttatgcaccaagattagtcaaaaaagaatatggatgatatgcttaattctttcaataaaacaattttaaaaaagtttaatcaaaattcttcatgacaataaataattttgaattatatacatgaaattaatataattcaaaagaaaaaaactcttcattcaataatgtttaagtcaagtttgggactgattctgataaatatttatttaactggaagaatatgagtgaaaatataataaatatttaaataagagaagagcattaaaaagccaaaattttttttttaatgtttaaaattcgattaatttaaactggcaaagtgaattgatatagggtaacacaatgatgggttgataagttatcaattaaaaaagatataaaactatataatttagaaatatcctcgcaaggacccacacagcgaaagcccagtgatgggtgcattgcccaactgaattcgtggcattatgcagaacaggaaaacgataaaaaaagtgaatatagtcaacaatggtgtgcaaaaaaagaaggaatgcggaaaaatagaaagttaaatggacctataaggatggttgaaaaagggcgaagcactgcgaattcaaaaaaaaattctctaaaaatttaattgttataactaataacctagaaacaaaactttttcctccagtgaatttaaatgctctgaaaataatattataatggcgaaataattagttttaaaggcatacataattaaaaagcgtttttttaaatattttcataaacaaataaa

SEQ ID NO: 51742 - DNA, 1899 bp, Heterodera glycines
agaatacgtcggcgaagtgccaacagtggagccaaaatttgtgttacaaaagaacaaattggaaattgaaggcccaataatttatgcggtgaattgcctgaccaaaatttcgcaattgtattttgataaatacagtgcgtggaattataaaagaaaattaaacaagctcttcacttatcattttgaaccaaaattgttaaatgagcatagattgaattataatgtaaaattggtcaacgaaaaaccaaaagtgccaattaacgaaatgattttacaattggcaattgacacagcttatgggtgccaaacaaatgaaagtgtcgacggaatattccggcagaattttaacgaaattttaggggaaatgtttaaaaaagcggaacaacgggcaaaaagggaagataattatggaattttcgttacgtatgacataattgtccgatcgatttttgatgattattgtttatgggtgagtcttttaaaaacaaattgttttaattaatgccaaaattaagactgatgatgcaatttttactgaatttgtgaaaggtcaagagacaaattttgagaaattttataggatgcttaaagaatattattcaaactctgtgaaatcaaaggaattttatttacaaaaatatggggcctattttggtcttgtgtatttaatgagaaaaaattggcaatgtgccaaagttggagaggatttaaaagaaaagtgccaaaaatacaaaaaatatttgcatattttgtatgaatatttcttcagaatatctgccgaaggtttttgctttccatttaatgatcatttaattaattaataaaataattaagcaaaaaacccaaatatgacaaatcaattgccagcggtaaagcctgtttttgaatgcagtaataaatattggtattcaataatttttattattcaaattctgaatgatttttcgatatgtttttggaaaaatggcgaaaaagaatgtgagaacgcctatggaaattatgagatggaattgcaaaatgagaaagaaacaaatcatgcaattgaagaggaagaaaaaaatgggcaaaatttggagagaaaaagcaaaaaacaatcgacggaaattggcaaacttcggacagaatttgaccaaaaaatggaagaaatatatgaaaatacaaaagaaaaagaagcagaagaaaaggccaaattggaaaaagcattggccaaagtaccaaatgatttggaaattaaaaagatggaaaagaaatatgaacaaatattagccgcaagagaaattgctgcggaagaaaagtcgaaattggtaaaaaaaatggccaaattagcaattaatcgtgaaagaaaaatgatggaagatgaatttgaagaaaaatttggcgctttcaattcgtcaccatttgcataagcaaattctcgtcttattctaatccaaaaggaatttgaaacttgaaagtgattatttgagctatataattaatttacacaactccttattctaacagaacacaaacactaagtcgatatttaatttttctcttcaattaaggtctaaattttacggaggtttgttatgggctgctttctgagaataattctagcatgcttaaattatttaaaaattatttatttaatttgatttaattttgttgctttttggataattttacgattttacactccactaaatttggactttatgacacctattttcccatttttagcacctattttgggggttttttataaccaaaaactaactaagcaaaaatttaattacaccaaaattgatttttgcaaaaattactacgcagttggtggccctttaataagttattttaagagtttcttataactttttaactcccttaattacccccccccccccagttcactacgca

SEQ ID NO: 51743 - DNA, 1215 bp, Heterodera glycines
attgaacgcaaaaggggccaccccgccgctttgcactcggacatcggattcaacgagcccggccaactcaacgatggtccgttgtgcaagtgctcctgggcttcaaaacagtcgggcataagacacgacaaattcgtgggggagcaatttgtggccaaatgtcagcagaattcgaggtccttttttcttaatttcaattttcttcatctgattgtgagacgattgtttcagttccatcgaaacgctttaccattacgttttggtcgtcgacccgtcgccctgcgctttttcgagacggccgaccgccattcaatacgacggacattcctacgaattcgaagggttctccattttctttcaccggcctttgccccgaacactttccccagacaccaattaatcagtggacgaatgactttcagttgaggctggtcaaagagaatatgcctgaagtgaacttctacccattaataatattaaactaattccttttttcttttaatttattgcttttcaaaggcgaaagcaaaaaaaaaaacttaaatttcagagtttcacagtcgatgatctcgagcttttctacgagtttttatttgaagaagtattggaactgtacgatctcaaccgtttttcaactgacaaacattctgtcgatgacccaaagaaagaagagaatgaaaacttgggctgtcctttttatcactgtatgcccagatttgcccgaaaattgccaggtttgaatttactcttaccattagaaaatgtcacaattcctttggtcagatgatggcaaagaattgcttccgatgtccgccgttctcacccattttactcgcgaattttcacctttggtcgatgacaatatggccaattacttttgcagagacaaaacggcattcatcgaatttgcattgcaaaagaagggccaaatttgtctaaacccatctaaggttgaagtgtttgttggtggaactttacgtgggaatttgctctcttcagcgtccaatggcgctcagagtggacatgatcgacgggtacaattcggacccgacaaaccgcgacttttacccaattttggtccatttcggcgtcaaaccgactgcttatgcctttatgaagcggccacagtggggcaaaaagaaaatgaaacttttttaagctcaaattgtacattttcgcagataccaagaggcactgaaaaaacacatcaaattt

SEQ ID NO: 51744 - DNA, 1605 bp, Heterodera glycines; identical to SEQ ID NO: 21167
  unsure (1)..(1605): unsure at all n locations

SEQ ID NO: 51745 - DNA, 1075 bp, Heterodera glycines
atgacgcccgatggtaaacccacctttaaatttttagaaatttttaaaaagatgtggaaattttttttaaggggtttaagggatcgctgaacacgaatgcagtacctatttcatccgccaattcaatcccaggtccgaatttgaacaaagggggtagaatctttaatttttcaaataacacatttgtggttcaagcgcgcttaggtaaatacagggaatcagactgaaagtcagcgacggagttcgaataggtcgaaatggaagccggattgtggtcagagaccctggaagcatgttttcatgactttggaagcaaatacaatttttcagaaaaagggggcaactatcggcagtattaccattacccctcatccccatcttttttttcaaaaaataaattatataaaattaaggaccacttgtgcacaaaattaagttggctcagttggagactttggtggactcactttgtgccaatatggtgagccaaaatgagcaattgcgcgacgtcagctccatcgctctgaagacggtgctcaatgaacttccaagtggatccataaccactcaaatgtttctttgtgtgagacgggtcattccgaagctcatcgaaacactcagtaagtaattacaaatgtcatttaaaagaatctatgttaagacgtgtctttttgaataattaaaatgttttttatgccaagtttattaacaattacgagaaaagcgctacttgtaaattcgtgtcttaaattttattaaacccaaggggagtgattttacgtgaaaacttattccctggcttatcgtggtcgcagatctcgaacctaacatcatttttgtaccaaatcctaatcactataagccgaactcgaacaaaaagtcgaaattcaaatttttagaacttgaatttttgctcaaatttaggttagggatttggaattgtgaacttgatgctgggtttgtgatcattgatcccgaaaaactccaggatcaagttttcatgacaaaattttccaaccaccctttgattttaataaaattcaaaaagtaccaatttgcaatcagcgcccaataa

SEQ ID NO: 51746 - DNA, 129 bp, Heterodera glycines
atgaacgattacttgggcaccattactacaaacatcacaaaaactttgactgacagtgcggcggacggaactatgaaaattgaaattttgcgtttcatttcgctgttgttgaacacccacgaacctgag

SEQ ID NO: 51747 - DNA, 902 bp, Heterodera glycines
atgtcgtcaagccgacagaatgcccatcatgcaagaagtgggagtggcgcagatgccgtcagaggcaattcgcgcgagagaggtcatagatcggcgcttgaacttccaagaggccgactatgttggtgagatgacgccagctaacaaaggcgacgacaacagaggtagccgaaagtgaaaaattttgtaagatttgtcttcataaggacccggttcacatccgcacttcacctctgtgaacatgcgtattttgggaagaagggaggaaggaagacaccagagaacggacagcgtgtgcctcatttgccacctgcagcttctgcgtggacagctgatcagcgttctgccttgtgaaaggtccgtcagccacaccttccacacgatatgcatcaggaggtggctggcgacaaatcgcacgtgcccagtctgcaggcgggatgttcgaatccgtcctttgatgtatgagacgactcataaactgttacaaatcaagaacttaagggaccaaacggatgatcacctgcgggcattcaacgagtacgctgagggcttgaacaaccagccgatctcgacacaacggcaggacgacgattttgtggccagggcttggtatgaattcgtcagaatcgataaaaatttatcggttttctaggcggcactacgagcagcttcttcaacctgaacacgacagaaacggagcagtcatccgtcgaccgatgcggccacggctcgcctacagacaggtcatgcaacacatcaacagaggaaacttcgacagattttgtggccaacatctcacctgggacatcaccgacccgaggaacgacgaagaagtcgcataccagatgtgccagacacttcttcaggaacgagccaaagaagatgataaaaattggggataa

SEQ ID NO: 51748 - DNA, 468 bp, Heterodera glycines
atgcaacgcccgattctgatgacggctgaacaagcaaaggcgttggaggcggagagaatcgaggcccagaagcgcatggcagcagatcgccgagtacaagatcgattgcgccaagccgaccaattcctcaagcagcaccttgaccagcagaagaggcttaagcagcggaatctggtctggggcaggcacgccgcatacgagcgatacatcaatgagcggttggagaagctcaaggctgacgtcaacgctctacggaaatctgcacgcgagtcgataaacttcacagaaattaacctatgtttgtaaaaaaaacattaaggtcaaatagtgcaaaaaatttagttctgccaactcgccaagctgttgaagcatattgcgctgacatcattcgctatgctaatcatcacgctgaacttgatgtgcaaaaagcaataaaggaacatcagcagattctcgagcggcgaaagc

SEQ ID NO: 51749 - DNA, 1236 bp, Heterodera glycines
atgggtgatggaattgttggacaagttcaggctggacaaccgagtgaggttgacaaacgatttgggaaaactcgaaaaaagaaaattcactttaaaaaacggcgaaaattttggaaaaaacggaggcctacccggtcacaatgtttgtgcttatgtccaaataggcaccgatttcttcaggcacttcgacaatttctggggaaaaaaggattgggataaattagagagaaaaattgggataaattagtggatggatttttgaaaaaattgaattttaggaaaataaaagcctcctagaggaggggtcagagttttacgtttgaccaattttctgtttttttggtgaaaataagcacaaacttagaaataagtgttcacattttggggaaactggaatatgccaagttcgtgacgatttgaaaaaagatttggcccaaaattattcaatttttaacggatattttatttgattttacgatataagaaaattcactaatttaccattatacataaacctaaaaaaacatgttggctatgacattttagaatgtgataaaaatagttgaaaaatgaaaaatgctaaaaaatgaaaattaattccaaattatttaccgtatcaaatatttaaaaaaatgcttaaaaattaaaattttttccaatttttttaccgtgtcaaatatttaaaaaaattgaaattattttccgtaataaatagtctaaaaaaattcttaaaaatgaaatattatttccgcatttggcactaattagccaattaattaattgcccacattcaatttgccaatttccattggcaactcgctgagaatttcttaaaaaataaatattattttataaatgtaaagcaaaaaattttaaatattattataggtatatggggaaaaaaagaaaaagaaatatttggaaaaataaaataaaaaatggcgtgcgttcgagcggactcgaacttaatgtatttaattgagagcagcaacgctaacgactgcgttatgcacgacaacagcaaacgatttaatttccttttcaatattccaaaaaaacttttgtatatggaatttgagagaaaacaaaggactaaaatcgactaattggattggcgccgaaaagtctcgatattgcgccgagaaaggtttacggggtgtgatcttcgagctctgagggccaaaaaaatgtaaaatttgaagtcatgaaaccgacattggaatttttgaaagaaaa

SEQ ID NO: 51750 - DNA, 778 bp, Heterodera glycines
atgaagcaccagaaaatcatggtcaaactgaacacactgcaggcgaagatgctcaaaatggagcaggacaaacagcaaacggaaatggagaaaaatggtagggaaattttaaaaaaaaaattaaattaattatgcattcaaaaatttttaataatttttggtgggtttagaattattttttttcaataattcggaaaaatttgaatttttattttctcaacttttacatttctccggggatccatccttaaaaagttgaaaaatgttttaatttttttcctgtgcttttggtcaatgtaattttcgattttttgacaccttcgttatatatggaaaaaattttaatttaaataaaaataattaaattaaattttgttttaatgtttaagcttcggtcgaccaaatcaaaaagttgaacactgagcagcaaaggcttttccagaggatcagcacattggagaagattaatcagcaacaaaatgtgaataaatttatggggaggggggaggagaaaaatttttcgtaaattttttaaaattttataaaaattacgcacacattttcaaaccaggttaaaaaaaaattgtgtcataacaattattgggttcaattacagaaatccttagcccataattacgcatttccataaatgacatttatttacggcagagttcccaagtttttttttttcaaaataagacaaaatggcctaaaaactaagattctgaccccaaaaataagatttttctaaaactaatatttgcgtgaaggaaacgca

SEQ ID NO: 51751 - DNA, 1220 bp, Heterodera glycines
  unsure (1)..(1220): unsure at all n locations
atggagatggagctgaaggagacaaagaatctgcacatgatcaccaagctggagcttgagaatgtgagttgggcttaattactaaaaaaataaattacaaaanataaagatttaaaataaaaatatatattttanatttaattattttttcaatttttaggtggcacttcgagaaaggatgaagcaccagaaaatcatggtcaaactgaacacactgcaggcgaagatgctcaaaatggagcaggacaaacagcaaacggaaatggagaaaaacggtagggaaaaattttcgaaaaaaattaatgatgcatttttctatttttttcaaaaattcggaaattcgaatttttatttgctcaacttttacatttctccgggggtccatccttaaaaagttgaaaaatgttttaatttttttcctgtgcttttggtcaatgtaattttcgattttttgacaccttcgttatatatggaaaaaattttaatttaaataaaaataattaaattaaattttgttttaatgtttaagcttcggtcgaccaaatcaaaaagttgaacactgagcagcaaaggcttttccagaggatcagcacattggagaagattaatcagcaacaaaatgtgaataaatttatggggaggggggaggagaaaaatttttcgtaaattttttaaaattttataaaaattacgcacacattttcaaaccaggttaaaaaaaaattgtgtcataacaattattgggttcaattacagaaatccttagcccataattacgcatttccataaatgacatttatttacggaaatgcgtaattacgggagtcaaaaaggcagtcattaacccgtaattagtaattgcttcctgccttaaccacaacaacgcacacagaagtgtattatattttttttaacttgaatttcaccataaaaattccaattttttttttttgtattttcgaaacttttttaaaaactaaaaaaatttccacccattaactcttagaaattgtcataaaatttaatggaaatttttggaatttttcattttaatgaaaatttcaatcttttttcaacttctcattaaaaaattataatttatcaatattattaaaaatttcagttgttttacaatttccaacaaaattattgggatgccaattcgtgtaacggtggtcagctcgcaattacggatgacaattgtttgacagtgcattaca

SEQ ID NO: 51752 - DNA, 565 bp, Heterodera glycines
atgcgtaagtgcccttgcgcattcgaattgcgccatccgattggttgacggcaaagccgaaatcggcatagctaaatatttttaaaaattagtaaaattgagatactcgagaatcgagtttttctggatcaggaagaggagacggagaattaattaatcgagactcggaagcgttaattgaccagctgagccaagaatcggtgccagagattcgagaccgagaatttgaccccggacaagggcgtataatttctaaggaaaatggtatactttttcaaaaatttccaacttttcaatttcgggtcccctccctgctggctaagccattgacccggaaatcgagatgtagaactgatcagactcgggagcttataattgagccagggaattcgagaatcttctgccaagccggggattgagccttcaataccctagtaaaaatgcgacagactcgagaccgacactcatgaagaaactttaattgagcccgagagtcgaaaatggaaacagggagccgaagccgagaattaaaaaaacatccaaaaaaagagtttctcgaaataaa

SEQ ID NO: 51753 - DNA, 1725 bp, Heterodera glycines
atggacgagcacgagaaagacccggacacctacggaaattggcaatatgaggagaagccatgtgcctgccattgttcgtatctgcgtgccaagaaattctaccgagtaatttcgctaaaacaaacaaacaaattgaacacaaataaattgagtttttcacaattttgttaaaggttgattgtgacttcatggaccgcactaccaaaattgttttggatgctttcttatcggatactgcgctcagcggactaggtaattaattaatgataaagaacatatgaggtgtttcattttagcattttttggggataaattccccgtcagggctggacgaaatttcgttttcgtttcgtcctacattttcggcacctttttgagtttcgttttcgtccgccaaagttttttcggtttcggttttcaaaattttgtttttcgtttcgttttcggtttttaaatttttggattttcgtttcgttttgttttcgtattcgaaaattttttttttatgattttcacacacccctgttcccagtccccgagtggtgccgtgccatccccgaatccctccattccttcatcccatcaattttttttctgcacttgggttttaagtacgtgctttgattccattccatgcgtgaactagtgttagccctacttaataacgaaaagaattaagccaattttcgcatttttcaaattttcgatttcgcacttttcttctaaaattgattaaaactaattgaaaaaaatcacaggcaattttaacagcaaaaataagtcattctatgcaaccttgaaaatgaatgccattttgtaaaatttttgctattgtaaaaaaatttttcctattgtttaattttcttgaaattttgcataggcccatattttgatcaccttgatcgaatcacagtttattttttagctgtctagtttttaactcgagatcggctcttcctttttataagggaaagtctcggcaatttttttaaattagcggacttttttgtccttaggcaataattgtcaaattgatcaatgatcatatatggtgagatcaaagtactgtataaataaatggttcgatttcataaagggaacaattttactccaagattttaagtcgaaattttgataaaaaaaaattggcattttgaaaatggatttgctttatccattgctgttcgttcatccactgttccttccttcatcacagacattacccacaccgctttggaggtgcactacgaatgcatactttgtctcgaaattgcctacaaaacttacgaaattgtgtgtgaagacgaaacgagtgacagatggggccgttacatgacaacgtacggagatgagcccatcgttggcattcgcaccacggattttgatggcattcagcgcgtgtttgatggcatgtggaaggactacaatttaattgtcagcaattgcaagcattggaccgataatatgatcagacgtctcatgtcagttaaagcagaaattcccataaataaataattagatttgatggatttcacaacggaattcgaagttttaattatatccattggaatttgttaattgaagcggaaatttgttgttttttccaattttttagtgcctatttgaaaatttttcgtgcctaaatgtttggacccaaaaaacaaaaaaacataactgagaacattttaacgacattttaaatcaatgaaaaagtcaaaaattaaa

SEQ ID NO: 51754 - DNA, 1607 bp, Heterodera glycines
atgcaagttaaacttattttttatgtattttacgcgaccgttttggattattcggacaaatggtttaatctctttgacgatgttagcgaagccaatcaaattctcaattcaatcccaaaggacgaattgcagaagctcaactcagaacagaaatggatgaagttatttgaagccgatttaccgcacttgtacaagttggtcagcattgtactttccgtgccggtctcaaatgcatttgtcgagtgttttcgctttgcggctcacaatggactgatgttcggaatctgttgaaagttgaaaccgtgaaggagctggttcagacgaaaataaattttgatctcacttgcccagaaatgtatcagatgctcatttccaatcacaaactgttggatcagatcggtggatgggaaaaatactttgaatgacacttttttgaaaaaaatattattttcaataataaaaccgttgtaattgtgccaattggttgtattttgcttttataaaagccaataatgcttttaactgtttttacaaggtaaaaatccattttttcaaaaaatctttattttggggtcaaaatcttagttttagcctcgtttatcctttttttgaaaaaaaaacttgcgaaccctgtgtaaaattcaccaattctttaataaaaatgcaatgaaaaattttttgacgcgatcactttttggcgacttgttcaaaaactttcaaaaaactttccacgaaatttattattttttttttggtggtcgaacatttcttcgtcaatgaacctttcgtcactaaacttttcgtcactaaaataaaataaagtattttaaaaaggaaaaaattaaaataaaaaattaataatatatgtaatatgcatttgaaaaaatataaatctaatacagggctcccattcgtccttggatgccaaggacgtccttggaaatgagcatttggaaaagtttaaaaatgaaagaaatttgataagtttttgtaattttcaacaatatttggattaaattatgcattatgtaattaaaatgcaaatttaattgcccaaaatctcaaaatttggtcatttttagacaaaatctgctaacaaacactgccggaccgcccccccctgttccccgaaattttttggaacaaagcgcgccacagcatatgcggtgaaatgaggaaaaatcagtgaaatcaaaaaaatgtagaaaaaaatccattccggtgaaaaatgcaagcctttgagtaaattattaaccatttttctttcatacatataataaaaatttaaatgtccttggttttcatgaattttccccactatgttcttgcaaatcggcatacccgtccttggaaacggagcatggacgatggtaaccctgatctaaaaaatatccattctttaaacaactagcggtagtacggttgtgccaaccctcggcatttcatcactggatctccggcatacacatacactcatcggaactctatttcagcaattcctctacatcccaatcgccgggactcaattctccggcattccaatggccgggactcaacccaccagcattccaaagcactggaactcaactctccggaaatccaatcat

SEQ ID NO: 51755 - DNA, 77 bp, Heterodera glycines
ccaaggtcagcaccaaaaaagcgctccctctttctgaagcgtctgacaataggttgtgtacacaaaaaaaacaaaaa

SEQ ID NO: 51756 - DNA, 427 bp, Heterodera glycines
atgtctgacaatccaaaagaagcggaaaagatggaaaaagcaatgtaaaataattaaaaatgccaatttcaatttttgttttcctttttcttcagtacagcgcgtccgccgttgcttatcacttgtcaggggattcctttggctctactccagtttatgcgtccaatcgttttttatgcgtccaatcgacttttatgcgtccaatcgctttttatgcgtccaatcaaagttttatgcgtccaataacatttaccatgtgaaaattattatcccttgccactgtttgcaaaaaaaaatctcttacactacacatgataattgcgtttcatttcttccaaaatatgcatgatatcattctgtaattttccaattaattacatgaacatattctaggacgagaattttcggaagatatcacacaattaaa

SEQ ID NO: 51757 - DNA, 456 bp, Heterodera glycines
atgctcgtcaagcggctctcccaacagaagcgccgttcgtccgcttgtgattcactcgttgccaaagcgaacatggccaaacgcgacgcttttcggcattttggctcccatgtgcagctttgtgtgatgatcaaaatcacaacgttttccttgacattcaacgcagattattgtggagctttgacggaaaaggtgctgaagaatttgcagacgaacaaatgcgaagagagggaaaaacggacggaagtgttggaggagttcaaccgcgagcactttggcaacatgctcacttcccttcttatagatttcagcgaaatgaacgccctgaagcaacttctgaagcatcccggagcaaaaactcgccttttgcgactggtcggcttggcagaactgtttgaaaagttttgggaaaagctcggactgacgggagaagaatttacggatagtggtaaatag

SEQ ID NO: 51758 - DNA, 1201 bp, Heterodera glycines
atgcatgtcgccacgcatacggtcgagcgtcgttatgaagaagaaatagccgaaattgatggccgatatgatgaagaatttgcccaacttgatcgccgttatgacgaccaaagtgccgaaatcgaccgtcgctatgatgaagcaattgccgaaatcgaccgtctctatgatgaagaagttgccgaaattgatcgccgttatgaagaaaaaagtgccccaatcgagcgtcgttatggcgacgaaaccgccgtaatcgaacgccgttatcgcgaagaatcagccgaaatcagtcgccgttataacgaagaaaaagccgtcattgatcgccgttacaacgaacaaatggccaaagttgagcgccaaggtccaaataattacagtaaatggcatttaaatgaatttacagacattcgttttgccgcaggtcccccggcttccgctgcttctgctccagcgcagcctttggctccgaatcacggcacaaattttggcctatcaggccattctgctggtccttttatcactaatttaaccattgataaattaacacaactttcagccattcctttttccactcgtcaaccgaatcccgtcgcgtctgttccggtacaatctttggcacccaattacgccactaattatggccagcaacccttgggccatcctcctggtccgtttatcactaatttaaccattgataaattaacacaactttcagccattcctttttccactcgtcaaccgaatcccgtcgcgtctgttccgctacagtctttggcacccaattacgccactaattattgccagcaacccttgggccttcattttgccgctcgtccaccaacttccgcctcttctgcgctgtcacctaattacggcactaattattgccagcaacccttgggccttcattttgccgctcgtccaccaacttccgcctcttctgcgctgtcacctaattacggcactaattatggccaacacctcatgggccatcttcctggtcattatcatttgatctcatctgtgataatcccaaaataagtttcaggcgctcattttgtcacacgtcctcaaacttccgcagcttcagctttggcacagcctttggcagccaattacggcattaattacggcctacgccctttcggccacgcttcaggtccttttatcactaattttatcagtaaacctaattaaa

SEQ ID NO: 51759 - DNA, 815 bp, Heterodera glycines
atgacccttggaagtgcgtatgctgtgcaggtgtgtgaaatgcgattttttggaaaaaaattttgaggaccggcggaagggtgccgataggcgccactggaaattttaaaatttttccccacttttgtagcccgtgctgatgctcaacgccagcaaatggcaatggccacacagtgtgcgacgaatgcagcgactgttaacgaaagcgaccactgccaccaatgacgacaaaacagcaacggagacgacaacaacgacggcaccgcagcaacagtcgcaggacggcgccgcaacgacagcagcaactgcacagccaagtgtcaccaacacggacagccgaatgatgttcacgataaagtgagtggtgggagaagcggtgggaaaagcaaaaatatacatattttcgtgtttataaacaaaaaattttctgttatttttaattttaaatacttttaaaacacaaaaattttctgaaaaaaatagtatttttttaaaattcataaaatattttagaaagactaaatgtacaaacgggacccacgcgtttcggcgctcgcgtttcggcgccagctctttttctacgatagcttttttctttgacatccaaatacaacattgttggtatcactcgaaagctcttaacatgctctattagccttaccaaaagcgaaaagattttcaagcctggaaaaaattttattacgaaaaaacttcaaaaatttcgaattttcgaattttcgcaattttcatgtataacttttttggaaattgtctaatagcgaagcaatagcttagaaaaaatttctgttaataaa

SEQ ID NO: 51760 - DNA, 1291 bp, Heterodera glycines
atgactgactgccttcaaattttcaacaaatctgcaaagtccaaggatccaccaaagaacagaaaattagttatcaaacagctggtgaatttggcgcaaagtgagatagaatgggccaaaaacaacaaattctgcaaagcagtggagcagggcattccagcggaggacaataagaccaatgaatgatcagcgaagtaccaagcgattcaaaatccataattttccatcatgcctcaccctcataaaaagtcatatctcaaaaacctaaacttttctagtgtagtctggcgtcaaaacaaaatttcgatttatggggaaggatataacggaaataactataaatctttgcgcctaattttcataaaaatttgttagtaattagtgcggatgggatttttatgtttttacattactagaaaagcccaagacaagcattttttgcattttctctaaacaattttcgatttaaagccacttataaaaacataaaagcacattttaacgttttggcacataaaaacatatcgcacatagttcgatgtttggcacatattttacaattgaaaaatttgtaaggaaaatgtaataatttgaaaaataccactcctaaaaattaactttctcgtcatttcttacagcattttcaaaaattatttatttattccgaatgctgaatcttgtgtgcttgattcaaaattatttgaaattgaataattcctaaaggcgacgtatcaaattattattctttttagcacgagctttcgtacgaacattgcgatcaatctctttgttaatttttctaaattttcgggtctcttttcaattttcatttttttggctcgttaagaaagattttatcatattttcatatatcccgtaatctgacaatttttttctttttttctcaatatttcgacataattattttcatttatattatttctttaatatttttgtgcatttctttcatttcttttttcaacgggaacagtcagcaattttttcagtgacatttttttatttttaaatgaactataatattttttgtatataaaaccaatattttgattagtaattttcaatttaatttaattttgctaaatatttttcaagaagttttattttttctcgattaaagtgatggaatgttgttcatttgcctttttagcggttaatgaagtatcagacatagactggccaccttccaatatgcaaattaagaggcacagtattagtaaaaacctaagaaccgcagccctaattatttattaagttcttatttttcaataaa

SEQ ID NO: 51761 - DNA, 420 bp, Heterodera glycines
atgttccccacttttcttcttcttcttcttccactctttgcgctgcttttgagtgaatgccgtggcattgaattggtcttacgcaataactcatccctcaatcaattgaacatctctttgccccatgctccgtctacgaaaattagcaaaaagattttggtcaaattctccgaagagtctttccgacccatttttgcttttgctggcacttcgcttgatcggccctatttgtatgtggacgagtcggacaacattaaatcagttaaccataaagccatggagaatgccataaaaaatgatttggcggtgcagaagaaaaatgccaatattaaacatgcaattgaggacacaacttacgacattcagcaaatcaatttaaagcagcatcaaattaagaggcaagtggattgtaaattttaa

SEQ ID NO: 51762 - DNA, 1037 bp, Heterodera glycines
atgaatacgtcttttgaaaaatgcaagtatattgtaattggtgagtaattttcaaaattattagctaatcaagaaaggacaaaaattgtcctcaattagtgaaaagaaaaaattcctatttttactccgcagtattcaaagtcaaacagctgcagacagaaaaagtataactacttttaaatgaaaataattaagagatgaaaattttaaaataatttagtagtatccgctagtcaaatctattttacattaaactcattattttgagcaggagggagtccgagatagaattacacaaaatatgtgaatatgttcttgtgtttaattaaggcctttatgcgcatcttttaaccctttaataatagaagcgagttgaaaacagtctcactataaatatgtgcttattttaaaattatgaatacctcttttgaaaaatgcaagtatattttaattggtgagtaattttcaaaattattagctaatcaagaaaggccaaaaattgtcctctattagtgaaaagagaaaattcctatttttccgcagtattcaaagccaaaaggcagacagaaaaagtataactacgtttaaattaaaaaaattatagttcaaaaactggctggcgcgaaaacgacctggcctgcattttttgttcgaaaattttgcgttttatcgcccttattcgccctttgaaatccttattttagatgttcgcccttaaaataagtgtttgcccatattttggcatttcgtccttattttcgcccttatttctagatttttaaattttttcatgtaaaattcacaaattctttaacaaaaatgcaatgaaaaaaactttttttacgcgatcacatttggcgacttattcaaaaattttcaaaaatttttccactaaatttgttttttttcttgaccaaaattttgatttgaaatttatttattttggaaaaatgtattcaaaaatttcgaatatatacaattatttgcaactgtaatcaatgcgcttcattttttaggcacaaaaataggcaaataaa

SEQ ID NO: 51763 - DNA, 435 bp, Heterodera glycines
atgcgtgccaccaatgttttgttggccgtcgtccctttcgtttacgtccttttcaatttcatgtacaacctcaaaaactttctcaaattcttccaaacgaacaaaagtcagaatatttttctcgagcatcactattggttcgttgtcggcagttactttttattctgtgccaattttgcgctcaatttcatcctttactcaatgataaggtaattgtacaaccatttaatcattttggtttgattatactaattagttaattaattaagcccggtgtttcggaaagaattttgtcgcaaatggcttcgaaaacgggcaactataaggccaaggtccaccacaatgacgacaaaagatgtgcagacggaaagtgccaaaaagagtctccaaatgaaaccaatcgaaacgaaaacagcggcagagacaataatttaa

SEQ ID NO: 51764 - DNA, 572 bp, Heterodera glycines
atggacggaaaagaattcatgtcacaattcaatttaatatggaggaatccatggtcagaatcaaacaaagttcatttgattagaaagaaaataggtaataaaaaataataattaataaatttaaattattgaagggaataaatcattcatttcaattttttttcaccaaagttgtaattttttttgttttctaaccattccaaatgtgctagaaaattttaaactgcaaaattgaaattttagatgtaacttccatctttaatcattaaattttgatttaattataccaatgctataaaagaattattatactttttattaaaggaaaaaatgccagctcatattgtgtcaataaccttggcataatttttgatgaacaaatgaaaaaactcaaaaacggcacacctatctctttggaaccaaaatgtaaccgacgattacatctacaagttttttggcaattgcgttggacattggaaaaaatgccagagtttacttcgatttcagcccaaaaaaagaatgcgatcgcttttctggacggatgtataaaagttcttcgttacacagaatga

SEQ ID NO: 51765 - DNA, 141 bp, Heterodera glycines
atgacattgacaaaggttggttatattacaaaaatttattgtaataagctgcataatttaattgcagaatgtggaaatcgtcacccgaactgttggcaatgggcaaacgaaggccaatgccaacggaaccttttttggatg

SEQ ID NO: 51766 - DNA, 337 bp, Heterodera glycines
atgtgccgtcggggaggccgtggtaagcgtcagattagcatgctgttggaaggagctgctggttctccgcccggaggacattcagaagaccagaaaggtgatattttcatcaattaattttcaaaattttatttttaatataaatttaataatttatttttgacattttttaaaatgaattccatcaaagattcacttggaccgcccaaaactgctgcttcgggagcgaaagaatttatttcaggacaaaaatcaatgccggaaagcaacggaatgccaacataaaaaccacttaaatttgaattctgtttcccttctgacccaataccaaaatcaa

SEQ ID NO: 51767 - DNA, 1488 bp, Heterodera glycines
atgcctattcaatgccaccatcgctggaatacattgatggagcagcagcagcaacgcctccacccaaatgatgagaatgccaacaaacagttgaacgcaactccgctgtgccaatcgcggcgtgccaagtcgccattggtaactttttaaaatatatttacggtttttgtaaattttaattcctctaaaattttttaagaaaatttactgccatttttttagattagaaaccaaaaatgcatctcatcaacattttaatttaacaaaaataaagaattaaaaagtgccgaaattgttcgtaaacaaaaattaattccttatttaattaattatttttatttttatgttttttttttgggataactttattatattaaaaatttatgaaatttttacagaatttaacaaattataaataaaactaaaaataaataaaatattttatttctttgaaggttcaattcctttaaattaaaacaatctgagatttatattaacttaaaaattaaatttaaaaaataattaaattatttagattaatgaaattatttggatttttctgctttaatcaaaaaaattttttttatgaattttgtgaattttaacaaattttattctaaacataaaatcataaaatgaatatttattttctatttgaaacttcaattcttcaaatgtgaacggctttagatccttgattaaattaacttaaaaatgaaaaaataaaaataaatttatttattcaatttgtcaggtgaccggtctcggcacaattggaaaacgccatcatcagtttggaaatggaatgccaaacaattcaaatagctctcaggaaaacaatgccaattcgccttgccaacttagcaccgattcggaagtgtaagaagaacaaattcgatacacaaatttttgaattttcaaaattgcccattataattgatcatttaccataattaattgattcttaactaacacgaattgatgactaattaatgcacgcggacaaaatttttcacctacgaaattatggtggtttttttatttttttatttttcgaaatatttctttcaggctaaatataaaacttaaaaacgaagttatgaattaaatttcttttaaattatatccgaagaatttaaaatttataaaatattttcattattaaatggtgaaaataatttggagttttgtccgaaaaaatttaatcattaatttaattaacgcaagattttaattatacattcgctacttaatgctgctttgatcattaattgaaaagttttgctttttgaaaaataacttggccattattacaattatttattcaatattccaaattaacttttggtactttcgtttgaattatttttcactttcaattaactcttcccatctcagggatttggtttcgttataattgtattttcttcttatttattttttaatttaaacttttttcatatttaacttccatttttcatggcttga

SEQ ID NO: 51768 - DNA, 233 bp, Heterodera glycines
acattgcgaaaatggagatcaattatgaggacgagtgtccctacaatttgggctttgctcgtgccatgttcgacttggccgctgctgctgctggccatgcgggcaacggcacagaatggcaaaacatgaaaagcaaatttgtacaggaaagccaagcaatcaaagcaattggccaagatttgaacattaaagttacggatgtgcattttggagccacaagcaaaggcaaataa

SEQ ID NO: 51769 - DNA, 1888 bp, Heterodera glycines
aaaaaatagttcggaaaatgattcttcgccctctaaattttcaaaagcttcatcttctaaatctgggtcctcagttagccgtggtcaattgaaagaggaaacgcgcactttggacgagatttacatggccgcgctgaaggaaggcgacaaatttattctttatgccggcggcgattttccaggcgatattgatggcattaaaggagcattcgaagcgcgcttaccgatggaagttattgtggactactccaaattccatggccctcgaattgacattcaggttgcgcttgttttcaaatagcccattttattggtcaattaaccgtgatcggtttaaaagctggtctcaaaatatcgtatatccgccaatatgcaaaaaatctcattcggcgtgtgacccgatccaacctagtcttcaatccagaccaacactacatatttttcagcttgagaacaactcactggtgccagatgttgttcagctccagactctccatgattttcctcgctggaaaaaacggggcatgctgatgcagtacaagcccaagggatggaatgccatttacgagggctaccgcgaccgggacggttatttcacaggaattatgattgccgtgttcagcaacaatgtcaacacccatatggtatccaatgagagtgattggctacgcaatgccaccgactgtctaaaaccgatatttgccaatggaagaattattcagacctacccaaacgatgatgatgcagtacttttttggtttaaacaagtaaattataatactaaagtaataatatcggtaaaatactttaaggtagtagacaaatatggatgggattatatgacaaattggctgctcgaaagccagtgatggtccgcggcaccggtgttgtatgagcacgtcttacgctacgctaactagcatgggtccagcagttctcagcaattcttcatattattttaaataaatatttattgattaattttactcttttgtatcatacgatagtccttgaattgcgttattagtttaataaatttcaaaaaaaaaatttttattaagagcaccggggaaatacgaatgaaatgggtcagacacagtcaataaagaaggggtagagaaatgtaataaaacaaagaatggaatgagaatggactttggtcatatccaacaatggtcaacaaagtgtttttctgtattatgaattttcttgctaatatattccgctttttggcggaaaatccttgaaaattatttggaaatataaataaatatttatttaaaattaatttatttgcctttgcttgtggctccaaaatgcacatccgtaactttaatgttcaaatcttggccaattgctttgattgcttggctttcctgtacaaatttgcttttcatgttttgccattctgtgccgttgcccgcatggccagcagcagcagcggccaagtcgaacatggcacgagcaaagcccaaattgtagggacactcgtcctcataattgatctccattttcgcaatgtcttaatgaggtaatttgaaacaataatttcattttaattatttatatcttccaatgatctgctgttagtattgtaattactcttcagctgtcggtcgatttcgttcacaatttgtgcttctcctccgcttgggcatcccccgcgataggacagttcattttttattccatccacagtaattttcgcggttgagcatactgtagatttgtccacaccagtgaaagtgttgatgtatttggacatcacagcaggtaactcttcgatatttcgcgcaaaaaattctcgaataatccctttttatcaaaaatttattactttaaataagtgtaggacatgtcacaaaatggttttcggtgctatgaattt

SEQ ID NO: 51770 - DNA, 395 bp, Heterodera glycines
atgcgtggatcagtacaaacatttgtttgtcttctcgacggagaatttacgctctgcaaggctggcggaggtaaaaataaaaaataaaaatgcaattttttgtcaaaattagggaaggggcggcataaatgtcacaatggggagagggaggggggacaaatgggtgacaatccgtggtttttttcgatatacctccttttattcaagcccttaaagtgtttgtgcaattatcattttcttgggaaacccgaaaaattgaaaaaaaaattttttttttaatttttgcttttgaaggtccgccaacatttcaagcagaattcgcggattttcttcgccaaaaacaatttggtggccatggcattggacaaatcggcacaggacgaacaggtagatag

SEQ ID NO: 51771 - DNA, 2575 bp, Heterodera glycines
atgggaattgttcttacggtatcctcccaagaagaagctgatgaccgacagattttggaagccaatttacgtgcggatgagtggcaatatgctggcgatgttcaccaacagagaggagacgaggccggcgcaggaaatactcattcaggcaaatggcaattaaagaagcaattagtgctaattggttaacgaccaatgaatctatttgttgtgtttgttcactgatcacttccgttgtgcccaaattcaggccaattattcgctgtcggacattgtgctgcaaccgtacgacgctttcaccaaaattcacaccgtaaaattgcaacacattctatacaatgagcgcaatggtattcgctccggtcaaatctcgcacctcgtcgaaggctatttgaccaaatatggccttcctcttgagcacgcggctcacaatcagtgcacagtgctggctaagtttgggtcattgaacgaacggaccatcgccagtttcaccgacgcattagaaaatgtgctgttccattacccgaaaaagcgcgagacggcgccgacctacaaatatgacgaagtgcaggtgaaaaaaagagagaggagaacgatgcgagagtgaaagagcaatagtcgagaatgggtatgctggtcaagagtttacgacggaaaaaattggcactttgaaatgggagggacagagaataattagtcggcaatggacatttagtactttgaatattgacacatttgcattcagattaattgttacgatgagtgcgaggcttcggttttgataattttcggaatcataagttgctcgttgctcaaaatatcttttactcacccggatccgaacctaaccatcccctcccccctcagaatgtttctttggggcagtacgatggcatagtatgagttgggtttcgtccgtgcacttctccttttctggtatttcatttttaagtaagaaaaccaaataaaatataaaattatcccaattttcctttattttttaagctttgttacactaagattgtccaaccctgaactgagtatgaatttacaaaaattaccacaaatttcccgggcccaaaaaataaaaattttcaaaatttaaaaaaaaattccaactttctaaaacgtaaaataaggttcatattccgatttcaatattttggggagttttaactggaatttttcgaatttttcatatataattcagaaatttaaaaaatgcaataaaaatgatttttttttgcgcgattacatttttggagacatattcaaaataaattttcaaaaattttccatcgaaataaatcagttgaaattggctttattttgtaattgggcgccattgaatatttaaaaaattaaaagtaatcttgctgatgatttatttaatattaggtaaattttaattattttattcgagatccaaaaaactttaagaataatgtgtatttaagcacaatttaattaaattatgttttaatttaaaaaaataataaaaatcataaaaaaatcaggtttttgatttttcactttttttgtgaggcgcccaaatttgcacttttgtgaagtggccaaccacgattaataaagtattggtgctaatttttattttttcaattaaatattgttttaaaatatttttttggattaaaatgatggcattaatctccaaaagttaacaaaataattgttttcaccaaatattcatgcactttttacattacaaatattttaaaatttaataagtatatatttaaatggaaagttttaaatgaattttttttttttgtattaaaatattgctttttctattcactcattaagttatttttttttgattgttcataatttttacaaaaatattatgaataatttcaaaaattctattaaaaatggttatctgttctgattatatcaaactttgtgaaccagtcataattaagctggttagcgtagtaataaatttaaaataaatcattcttcattaacttaatttttgtttaattgtatttctttcgcataattaataattaaaaataattctttgcacggtttttgatttttaattttcatttacattttttataatgtatttttaaaatattgttattaattattgtttttaagtattttttccgttactttatgaaactttgtgataataatattatatcaaaatactatagaattttatgaaaatgttatttatttcctttgtttaccttttgacgtttacagaagctgatgaccgacagattttggaagccaatttacgtgcggatgagtggcaatatgctggcgatgttcaccaacagagaggagacgaggccggcgcaggaaatactcattcaggcaaagcggaaattaaagaagcaattagtgctaattggtttacgaccattgaatttatatgcttgtttgttcattgatcacttccgttgtcccaaattcaggccaattattcgctgtcggaacaacggacggaagaaaaggcggaggaagcgaagcgcggagcagcggaggaattcgaggcggacttcagcaaaatggacgctgagaacccggcccaacg

SEQ ID NO: 51772 - DNA, 82 bp, Heterodera glycines
atgccaccgcatttctgttcacaccaaaatggacgaaccgtttgggctcggaatgatcgaagcaatggccacggggacgccg

SEQ ID NO: 51773 - DNA, 1311 bp, Heterodera glycines
gccaattattcgctgtcggaacaacggacggaagaaaaggcggaggaagcgaagcgcggagcagcggaggaattcgaggcggacttcagcaaattggacgctgagaacccggccaaacggtgggcggccgcgtttgagcaggccacgcttatgccgccgtccgactcggaagtgaatttggcacataaaatgaactcggacggatcggaggacccattcgacattagcgccgcgttggagggcacaaagcgcgccacagggggcgagccattcgcaccaatgccaacggtggacgaaaatgattaaatgcctttttaaattggaaattcggcccctttcagctcgaatcgtccccctccttcgacccttttgaggttattcccgtggaggaactgatagcgaaagcgcgagaaaaagccgagttggaaagggccaaacgcgaggccgagcacgagggcgaatttgtggccgagaatcgaatagcgcggcctaacgaccacctgtccgcctcgcacctttcgtccccaacgccggaagggggcagtcccgtgtcatccgtggcacggccggtcggcttctacgacgacttcaaaggggcacaggtgagcattctgctgatgattaataattgaaattgtttttataagaatttaatgcgttttccctcttttaaaagaccgctgatgacgaaagtccgttgttcgacgcggacgattctcttccacttcccgaatttccgcttccgttcatcggcgatggatgggaattgttcttacggtatcctcccaagaagaagctgatgaccgacagattttggaagccaatttacgtgcggatgagtggcaatatgctggcgatgttcacgaacagagaggagacgaggccggcgcaggaaatactcattcaggcaaagcggaaattaaagaagcaattagtgctaattggtttacgaccattgaatttatatgcttgtttgttcattgatcacttccgttgtcccaaattcaggccaattattcgctgtcggaacaacggacggaagaaaaggcggaggaagcgaagcgcggagcagcggaggaattcgaggcggacttcagcaaattggacgctgagaacccggccaaacggtgggcggcagcgtttgagcaggccacgcttatgccgccgtccgactcggaagtgaatttggcacataaaatgaactcggacggatcggaggacccattcgacattagcgccgcgttggagggcacaaagcgcacagggggcgagccattcgcaccaatgccaacggtggacgaaaatgattaa

SEQ ID NO: 51774 - DNA, 577 bp, Heterodera glycines
ctatttgttgtgtttgttcactgatcacttccgttgtccccaaattcaggccaattattcgctgtcggacattgtgctgcaaccgtacgacgctttcaccaaaattcacaccgtaaaattgcaacacattctgtacaatgagcgcaatggtattcgctccggtcaaatctcgcacctcgtcgaaggctatttgaccaaatatggccttcctcttgagcacgcggctcacaatcagtgcacagtgctggctaagtttgggtcattgaacgaacggaccatcgccagtttcaccgacgcattagaaaatgtgctgttccattacccgaaaaagcgctagacggcgccgacctacaaatatgacgaagtgcaggtgaaaaaaagagagaggagaacgatgcgagagtgaaagagcaatagtcgagaatgggtatgctggtcaagagtttacgacggaaaaaattggcactttgaaatgggagggacagagaataattagtcggcaatggacatttagtactttgaatattggcacatttgcattcagattaattgttacgacgagtgcgaggcttcggtt

SEQ ID NO: 51775 - DNA, 474 bp, Heterodera glycines
gggaaaaagaatacaaatcatccgatcaagggctaacttcccccagatcgcagtgtaaaagctgctctactgctaacaactccctgaccagtagtcaagtcgtataaaagtgattttgcgccccgacgttccaccatggcacacgagtgctacggctttggcaatgtgcgagcaattaagcacgcacatcgggccagatgctggggcatttgggctgcaccgcaagcggcgcataagtagtgcctcccgacaccggggagcaagaatattgcaatctcgcttgagcgggatttcaatagcttcacatcattggtctatcgaccaaacacatgaaccaaatacctgaacctgcggttcctctcgtacttagcaggattactatcatagcatcaggtctttggtagggtaaaattaaccagtctcgcgacggtttaagcctagctcacgttccctattcattggcttaacattcag

SEQ ID NO: 51776 - DNA, 873 bp, Heterodera glycines
atggaaacaaaagatgaagcgatagcattcactgagaaagtaataaaacaaatgttttaaatatatttattattttttattgtttgagtacgaacattttattgtcatcgaatgcaaaggctcaagtcacaacgtggacaaattctgcgattttgtcggaaaaaggctgcgctacgaactgcttgaatttgtggagaaccccttggccatttgggtggacttttgccacgtccgcccaaaaatgatcggcccaacggaatgcccttctgccgacttggagaaaaatgggtaaaaaaatactaatttaaattcgaaattcaaatttggacagaaactcaattggcctgaggcattggctggtgggcattcaaatggcggcagaacaaaaggcaaacagcgcatttaagcgcaaattgagggacaatctgaggaagaagttggacgtgaagatcaaggaggactttgagaagggcagctttcacaatgtgcagctgaaatcggaatttgcagagaaagaaaatctgcgaaaatggtaaaaattaaaacgaaaattgaaaaataattaaaaaataattttaaatgtttaggcattttcattctcaaaaattaaaatgaaaattaaaataatttaaatgtttaggcacttccacacgcaaatttaaacgcagaagcgaaagacaaaagttaacgacaaatgtttacatttattctttctttattttatctcattttatgaacttcgatcacattattaaatttatggcagacaattaagtcaactctgacttttgactttacagttgttcgaattgaaatgttttttgttgcgaaaacggatttaattctttaaattgggccctctcggccaataaa

SEQ ID NO: 51777 - DNA, 1061 bp, Heterodera glycines
  unsure (1)..(1061): unsure at all n locations
gactcgactgatgtgcgtcgcgaaaaactgaacaaagccatcactgttcaccaatttctgcgcgacattgacgaggaggaatcgtggataaagaagaaaaaagagttccaaaatttcatcggccgtgttgaggaggaggaagcctggctgaacgagaagcaacagatactcagctcgcccaacgtcggtgagaacatggctgcagtgcagggactgttgaagaagcacgacacgttcgaggtggacctgcagatgcaccagcagcgcattgacgaactgcagcgccaaggcgaacaggtgggagacagaatggcatggcacacgcgggggagggcgaaattgacgcataataaagccaaaatttgtcttaaaaagggacagattaaaatatttttattcaaaattaataattttaaagaagctaacatatttgtttccttgggtgactttataaacactgtcgaaaaaatttctcaaaacgaaaatctcagaaaaaagatcagctactgtattttactaacattaaattcctttaattttgttaattataattattaattgataattacagctcatcaattctggcaatcaccacgcaaagaacatcggcacgcgcacggaacaattactcaagcatttgatcctgatcaaagaattggccgtccaacgattgcaaaagttgcgcgacaacaacgcgtacatgcaggtagataattgactcgttgttgactggtttctcaagaagactgaaagtctgtctaataatattgactttttcaatactctcgaaatggtggaaatttttctgattattttaaatttttgcatgaagactgatcagtcattaatataatccggcattattggattcagagacatggcatctaattgtttgaatgacaacttctatttattcgagacttcttaattttgagactccccttanatgaagcgggattcgaataatttctgtccaccttcaataattcgcatttcttatattgtttattaccaattgttgcttctttcaggactcgactgatgtgcgtcgcgaaaactga

SEQ ID NO: 51778 - DNA, 297 bp, Heterodera glycines
gaccttagaaagacggaggaagagctgaacttgctgaggaagcagtacaacgaaagagggacgcttttgaaggaggaaagggaggcaaaggcgaaggcacggagggagacggacagactgagggagttgttgctgttcaacggtggagacgaggaggccaaagacccattggacaaattggaagaatttgaggggggaaacgtcggagaaattactgatcagacaaaagccgaagaaagtgatcaggcggaggagggaaaagccgagcaaagaggccaagtcgaccctttcactgaa

SEQ ID NO: 51779 - DNA, 1701 bp, Heterodera glycines
atgaacgacgtattaagaggacaaaacgacgcactgaacagggagagggagaagctgaaggcggaactggacgagctgaacgcatttctggacgacatcgaagcagaaacggaacttaagtcgatgtgtgagtggacaatttggggggggggtcccgagagttggcccagtggtcgagaccgacactatcgagtagcggagttaagaaatttttcattggtgctagtcttgcgagaacgaatacatttagtggccaacatcgaacgacgttttctccaagctttgagagaacagtctgagtgcgcggaagagagagaggcgttggggtgcgaattgcgaaggagcgaacgcaatttcaggtgattagtcagaagcagtaattggcagcttcaagatggcactaattgatgttaattgggctgaattagtgccgtcgtccctttcagtgagacgcgtgatcgttggctgagtgaacggcgtcgactcgtggacacaattggccacctcaactcggctctgcaacggcttcaccgtgaccaattgctggccatccccggctcggtccatgtgactacttcacaattagaagcattggccacccatttgagaagggcatatcagaaggagagagaagcgagtgggagagagaatgagttggaggagagggcggaagagatgcagagggcggagagtgcactcatggcgaagagagcggcgctggagacgattttggacagagacggagagttgagggcagtgcatgccgtgctgcaggggtacgcactgaacgaagtgacacttagcgcggaattgcaacggacacgcaaaaaggtggatagatttgggaaaactagagagagaaagggagagagagagaagacaatgccaaagtttgaaaacaaatgaaaaaaaaatttaaattttaagctggaaaaagtggaaaaggaaatgaacgaacggactgaagaattggaagaaatgagagaaatgctgacgcactttcaacatgtaaaggaagttgatttaaaacaattggaacaacaaattgagcaaagacaaaagagaggggaagaaagaatggacaaaaaggaagaaaaacaaagggaggaaaaggaaaagcaaagggaggaaaaggaaacgaaaggcgacagagaggagaaacaagcgcaaaagagaggggacagcagcagaagaacagtgctaatggtggacaattcgagcgaatgggccgaacagctgcagaaagtgcgggaacgggccaaactctgtgtggacacttacaaggtaaaaggagaaaagagagggagagaataaaaaggaaatgcgaaggaacaattggaaagtcgggacaaaacattggacgaatatcgccaattggtggaacaactccgaaccgaactcaccgaagtacggaacggaagaagagaagcggaggaacagaggaagagagacggagcggaaacggaagaggagacgagcaaaagcggagaaaggaagcggacggacgaatgggaagcggaagaagcggaggagcggtgggagaggcggacgagggcattggagaggcagctgaagaggatggtggaggagcaggcggagatggagagggagcggacgaagctcagagagaccatcagagccaaggaagagagcgagagacggcacagagagggagagggcacgagggatgtgaaagtgcag

SEQ ID NO: 51780 - DNA, 1309 bp, Heterodera glycines
cttggttgaacgactggatcagcagagtcgacggaaaagcgatctacacaactgatgggaaggtcatttattgtcaggcatgtcaacagcaggttaaagcatcacttttcatctacaaacaacacgactacaacaacataaacaacgaaaagcattttcaggtcccttctaaaatgttttatcaactgaaacaacacaacgaaactgctaaacacaaagcaaatgttgaactttttatgcggccatgtggaagcaaaaaacaacaatttttgaccactcaaacgacgaaaaaactggatgaattctcaatggatttgtgtaccgctctcacctcggcgaacattccattttttaaattggaaaatcagggttttagaggttagtattttctgggaatacctagcggaaattttcttacagattttctggaaaaatattgcaagcgagtggttccgcataatgatgccttgcataaaaattatttgcctgcatgttatgagcaggttatccccctttccattcaaagagatggtaaaatttagaaaatgactgagattaaaaatgaattcaaacaccaaaaaatttgggcatcggttgatgagacgactgattctcgtggcagatatgtcgcaaatttgatcattggcattttggatgggaaattgcacaaaccgcatttggttgcggccaaatttctggacaaaaccaaccatgaaacaatcgctcgctttatcaacgacaatttgagggagctaatttcagctgacgaccttttgttacttgtcactgacgcggcacgttacatggttaaggcagcacaggttaacaatgaaaaatttataaaaagtgctatctatgtaaaccaattttaagggcctcaaaattttctatccaaatctcattcatctcacatgtttgtgccatgggctccatcgtgtgtgcgaggaaattcgtggcctctttccaaatgttgacaaattgattgcaagtaccaaaaagacttcttcaaaagcgccatcccgcttggccaaattccgcgaacgttgtgatctccctctcccaccgcgcccaatcatcacacgttgggggacttggctcaatgcagcggattattactgtcaaaatcttaaccaaattggtgcgattattcgggacttcaacccatccgattctgatgctattcgccaatcacaaattgcctttgactgttcaggcattcgtggagatttggcctttataaaatcacattttgacattttacctggagcaattgaaaaattagaatcacgcaatctcacactcattgaaa

SEQ ID NO: 51781 - DNA, 392 bp, Heterodera glycines
atggccatccctccactgaaagccttttttgggcaaaaagtcaatttgactgggcaattggcgaggactgtgccgcgccatctgaaattcagtaaagatttacagatcctaagtaagtaacctacataaaaacgtttgtagcgtttgtcccatcggaaacggtagactgtacggtagtccaacagtacggtaacgccacttttacggtttgtgaatgcggcgttcacacgccggggaccgttcgggaaaagctcggaaagagcaaaggcacgtctaaaaaggaaggcattgacggcgaaggcatttgggggccgacttttgctgaaggccctgagaatcgcgccacacttcgtaaaccatcccagcggagaacagatagagatgcctgttga

SEQ ID NO: 51782 - DNA, 656 bp, Heterodera glycines
atgcccggaggaaggggtggacaaggaatgtgcgaccttcttacaccgctttgtgcaaatgtacgaaaggcctgttccggtgggttttacggctaagtccgtccacggatatttaaaatatttctctaacaattttagtacaatttattcaaaaatcccaaatttccccttaaattcggttgtttaggagggtatttatcgtctcgcctacatctttcgtcaaaacggtggctcattcagcagaatcgacttgctcgagaggaaatatttggacacgtacggcacccgattgagcacaagtgaggtaagctaatcaaaattggcaaaaaaaattgtaaagcatttcccctattctttcagccgagtaaatcgaacaaaaagtaaaagattaataagctgaaaagattttcctattgttttttttgaaaaagtttaattaattttgtaaaatcgggggggggggggagggaatacgaatttggagccccgacatttgcggccccagccaataaccgacatttgcggcccgacttttgcggcccgacatttgcggcccatttcttaagtgttatttcccgacatttgtggcccgacatttgcggccccaaattactcatttaaaaatttaacaaaaattaaccactttattcaataaa

SEQ ID NO: 51783 - DNA, 86 bp, Heterodera glycines
atggccaatgttctcggcgtctccattttcattttggtcattttctaccattacatcgtcgccaaccaaaagaaacagtcgccgca

SEQ ID NO: 51784 - DNA, 721 bp, Heterodera glycines
attggccataaaatccgggccctattcataattaggtaattaatttttaatttaatcgaataaaaatgcaaaacttccgactgcagaacagagagcccccaacagaaattgaatacataatgtgataaggggaagaaaggaatctaatcgaacttttcaaataaacaattgaaaaaagagatgagagaaaaaaagggaggaaatgtgcggtgaaatgaattgaatgacaacagcggaagagaagagagggacgcgcgacacaaagggaagaggcgaacggaagacatttctaatacatagcgcagcagaagagattcatcggattgttcgaattgcactccgacagttcgaacacggtgattttgcttcccaagaaaattgaaatggagtgaaaactcgaaacgaaaaaccaacttttaccatcttatttttaatcctcggcttaactttgcacaagttacgcccctctctaacaaagcatttgcttacattaaactcttcgttcaaataagttcgtctttctttgttaaatgataagcatgaagaaaaggataatgataatttcgttctacgaatttttttcggaaacatttccggtttctaaaatttttattttcttttcattttcaaacttatttttatgtatgttttcgcgcaactctactggggatggacggccaaaaatcgctgcttttatacacttttttacattgcatttgcc

SEQ ID NO: 51785 - DNA, 227 bp, Heterodera glycines
atgggcattgtggcgcggcgtctgctcaaaaaccgggccattcaaaagcagttggaccgtcgacaaaaaagtcggttgaattatgtggaaaaactttaaaagataaaaattttttttttaaagatctgaaaacgcttcgccgtcaacacgcggcagctggccggccgcccattgttgtgcattcggcggtccttggtttgccaggaccgcggccgtacatcaagtaa

SEQ ID NO: 51786 - DNA, 868 bp, Heterodera glycines
atggttaaaataaaaataaagtggggtaccaaagaacttaatgttgacgccaatcccgaagaacctcccctattgctcaaggcgcaactattcgggttgacaaatgttccacctgaacgacaaaagttgatagttaaggtaaatgggccttcatttttatatgcataatacataaaaaacaatgatatttagggcaagacgatatctgacgaagcatggaacggaatcaaaataaaagatggaactgttataatgcttattggaagcactgaatcgatgttgataaaggcagaaaatgctgagtcgtccggccatgcaaattcgacagagacggaaccgcgccaacagttccccattggtctacgaaatttgggcaacacttgttacatgaactcgagtttgcagtgtttgaaggttagtcccctgctgctctgttcctattgggttcttcccttcggtgttttttgcttactcccccctgtgatagtcgtgtgaattaatgcgacggaacgaaccaaaaagttagaaacatgcattaaaagcatttctcttaagattgtgccggaatttgaaaccgccttgaagcaatacaatcccaaccaatctgttgacgggtcgaaccaacgcataaaactcttcaccaattctatgaagaagctttacaacgagatgaatgttttggcgaaggaccaaacggcggactctcccgaagtcattccgttgtttcttgtgcatgtcctccgccaaacctttccacaattcgacactcaagatgaacggggcaaccaccagcaacaggacgccaacgaatgtttttgtgagatgctgcggatgatttctgatgaaacggttttcacgcccgaaactg

SEQ ID NO: 51787 - DNA, 1206 bp, Heterodera glycines
atgcattccgttgccttttcttctttatcaacagaagaagctcgcttgaacttcgaacaaattttccatgagaatggcttcgtccgaatcgatggtgtattttcaaccgaagaattagctgaactccgtgatgctgtaaaattaattgttgaaggctttgacccgaaagaccacccacggacaacatttaacacaagtgacgaggaaaaggttaacaaaatgaaacaaagaaatgccccccccccttgtgggttttgacgatttgattgccagcagcgtgtttcgtcgccgcgggtcttccaatactcaaaattgacgaaaacccgtccatagttaattagggttcttgagaaggagaataggcattttcttaaccaaaattagcggcagaattctcctgttttcgtgcctatctcaattcgaatattctttgttctgtctctatcaaatatttcttttaaagcatgtgtccgacagctacttccttgaaagcgtagacaaaatcaggtttttctatgaagaaaaagcggtggacgagcaaagtggcaaattgaaagtacccaaagaaatggcattgaataaaatcggtcacggtaatttagccgatgattcggtccttcctaataaattacccttaattaagccttacattggctggacccatcttttcggaaaataacttttcatgaacgaattaaagtataagagaagcacagttcaaatgaatcgttttttaagaaaattgtcagtctgaccggcgctgttcagcctcgcgtgatgcaaagcatgttcatcttcaaagtccgttggaattccgtcctttccaacgaatggctttgattcaaaagtttaagcaacccaaaatcggaggctcgactaatgagcacgtcgattcaacgtttttgcacacagaaaacggagacaatcttttgggtgtttggatcgcagtggacccggccaatttggacaatggctgcctatggtttcttcccgggtcgcacaaaggcaaaatttacaatattaaattattcaaaataatgtttttagacgccaattatctttctgctactaagcaatacaaattcacaagaacagaaacaaagcacaatgggaaaaaggcatcctccgatgggccattgttaaaatttgttgggaatcggccttctttcgaaggatgcaatttcattgcattggaatgtcaaccag

SEQ ID NO: 51788 - DNA, 326 bp, Heterodera glycines
atgaacgaagtgacgaatgaaaagctgacactgaaacttagcaaagaattaggctataattgcctgtataattggctgttgcaacggtgcccaattggggagacggcgccagcaattaaatgggaagacagcgtaaatccgagtgccaatttgaacaatgtcacttttgatctgtgtagtttcgataaatccattgggtgagcagcagcaatagcatttgattttgccgaataataaaatatttaattcattttaggccattgtcgccaccaacgaaagaagaaaaagaagaagcggatcaaagcaacggaaatgtcgtctgctga

SEQ ID NO: 51789 - DNA, 572 bp, Heterodera glycines
tccacctacgacaaagtgttagctttattggaatccaaagaaggcggaaatgaggagcggaaacagcgggcggaagagttgcgcaagcgcacaaccgaattgttggcaaagattaagcggagtcgggaagagaaaatttgtgagctatttttttattaatttatttttttgtttttttaattttttttagccctgattgaacgtgctgattcattagatgtggaactgaacagttttcatacctcaactgaggaactcagtgatcagattgatcaggtgaccagcgaaattgatcgacgcgttgagttccatgccacatgcgatgcctaacaactaaaaagcccatcattttgccacatttttgccttttagtttataattgaaaaaacgaaaatgaatgtttaattgtttgattcttcattgttcttaaaattgttgcttgaaaagcaaaaatctatgtattgccagacattgtatgccttttttaaatgctttcgtatgtacttgtggtccttaaaatgcaatgtattccaatcccttacttcaaactaatttttgattggctgaataaa

SEQ ID NO: 51790 - DNA, 694 bp, Heterodera glycines
acactgactcaatttattatgttgcaaaaaatgggagacgattggttcccgaaggagaagggctcggacaaatgaaacgtgagcacactgaccgacgaatttttgaattcatcagtggtggcccaaaaaactatggctttcggcactgtgatcgtgttacgcgggcagatgaaaaggcggagctaaaagttcgaagctttcgactctcttatgccaccaatcagctactaaatttcgaatcgatgaaacaacttgttctggaacattacaactttgatggagaaatgttctttttaaaaaatttttacgtaaaaaatacatttaaaaattcagtgatcccgctctctatatgaacgacgaatgttatgtctgccccggatcatcccgttctatccgtgttacttttccacaaattgggcgctccccttgctcagatttatatacctatcaagcgcataaggattatcgcccccattacgtgaaaggccgcgtaaggccaggaatggagacactgccttttggctatcgcaacgggtttacacgtgccaacacacaacaacaacaacaacaaccgcaaatcaacgaaatgcatggaagaaatgtcaatgatggtgatgatgctgcattccgtgatttgccgggctgttcacattggcaacccactcattatcgcaatcgatataattatcaatag

SEQ ID NO: 51791 - DNA, 555 bp, Heterodera glycines
atggaggaggaggaggacagccatattgtaagagcggaagcgttgagtgaacgtgaaggcggtgttgcagttgctgcagccaacaaagggcaaacccaaaagacgagtgatgataataatgatgatcatgatggcgcgcaccagcaagtcgtcgtaatggcacgtggaggtgaagacgcccgtgcaaaagctgaagcaagcggaggtccaagaagtgtcgttgaaacacgaattagtgataaccaacgagggggagaaagattagctttgggttcggccattattcatagacaaggaagaagaagaggaggaggaggaggaggaggaggtcgaaacagaaaccgtcagagaggcaaagaagaacaagggcgaggacgaagacctattgccaacgataaatttcacccccgccccccgcaatatatggagctaaacaatcgtcagaaaggaaatgagcaagtcacagtcaacaacaatgtgcacacaatgagccctgtcagttacccatatttgttgaggaaacaagttggaagagaatgtttttgtacctgctga

SEQ ID NO: 51792 - DNA, 1334 bp, Heterodera glycines
  unsure (1)..(1334): unsure at all n locations
caaaaaaggtggcagggaaacacaaatgacaaaattatcagcaatccgttttatcatcccatttatcatcgagtccgttaattatccaaattatcnccacaattacccaatttgtaacttttgttaggtcgtcttgcgaatgggcggctttcgagagcgaattgaaaaggttaagcggctgctggacgagggagtcgagttggagcaatttgaagccaaattgtcagaaatgtgcgaatgggttgaggagaaggaaaagcgcgtcaaagcacaaacggcggaagcgggcggggcgtcgttagagcaaaagttggacagactgaagcgacagcaggcactgcagcgggagatggacgccaatggcacacgcattgacaaaatgagagagcgattggaacggctgagggggcgccatggcacggagacggcggtgagtcaaacggtggcgagagggacggggaggggaagggggaggacatgacacggagacacggaaaacgttggcatcatgcccaaaatggccccattggaactcattaatttattctttttgcttgaaaggtctctcgggcggatgagtttcttttgcgttggtcaaaactcagtgaggcgatgcgcaaattgcacgcggcgttagacgaagcacgcgacttgttggagttggagcaattagcagaccgattgtgcacatttgtgcgggccaaagaagggatggtcggtgcggaagatttgggaaaagatttggagcattgccaatcactgtcagtgattgggggagcacaaacggacaacggatgaccacccaccccttcaaatccaggctggaccggctggacgaaagtcaaggaatcgacgagggcactctggcggaggcgaatcgcctcgggggacgattgatcgggcgaaagtctgccgaatcggactatgtgcgcaaaaggctggcggaagtgaacgaaggctggcaacggctggcgggccgactgagcatctaccgaacacttctcaacgcggcactcgcaggtcagcggagtgaccgtgccaacggaagtgacggacgcggcactatttaagtgcaccgattcaatcacaacgtggaagagaccaacgaacgcattggggaaaaagcagcgcaattgggcggcaccgaaatgggcaaagacatggaaacggtggaacgactgatcagagcacaggacgcggtggagcgcgacatgagcgcgatccatcggaagctgaacgaacacgacgagtgggcacaacagttgctgggcaacggcgagttgcccttgcgcgattcggtgccattcgatgtgcttttcccccttttcattttg

SEQ ID NO: 51793 - DNA, 675 bp, Heterodera glycines
atggccaaggaagcggcacggggtgccgggtcggtattggcagtgcgttcatttttggcggacggagcggaattggaggaatggatggagcaacagaagcaaacgacgaacagcgaagaatgtggcaacgacttggagcagtgcgaacaactaaggacgaagttcgaagagttcagacaatcccttcggatgggcgacgaaagaatggccaaagtggaagaagcagaaggcgaactgataagccacgtggacgatgaaaagcttgcccaaaaagtggcgataatgagcgacagactgaggacgacttgggcacaaattggccaattaaccgaacggagaggacgcaaattgaaagaagcggagcggacgcaccgcctaaggagagaagcggaagtattggcggaacgaatcagagaaaaaacggccgaaattccgacggaagtgggcaaagacgcgaagcaggcgtacgcactgatgttggccaacgaagtgttggagaacgaagtggcacaactgcacgaacagcttcaggtcggcggaacagccgtccccgacggatttggattaattggttcccattttaagcttttattggagcgcttcgaatcggttgaatcaccgaaccctttggtcgactttctgccgggtactaatggctttgtccgccttccttag

SEQ ID NO: 51794 - DNA, 416 bp, Heterodera glycines
gccactttttgggcaagcttttcatcgtccacgtggcttatcagttcgccttctgcttcttccactttggccattctttcgtcgcccatccgaagggattgtctgaactcttcgaacttcgtccttagttgttcgcactgctccaagtcgttgccacattcttcgctgttcgtcgtttgcttctgttgctccatccattcctccaattccgctccgtccgccaaaaatgaacgcactgccaataccgacccggcaccccgtgccgcttccttggccatgccctccaatgcttttgcttggttctccacccgttccattcgctcggctacgctttcatgcccccttttggccagctgttcgccccgctgtctcagttcgccgaatgcctttctccacggcactatctcattttgcaa

SEQ ID NO: 51795 - DNA, 1756 bp, Heterodera glycines
caaatctctctttttcgtaaatcacggcatcctttcgccgatcgtaaacggcgctttttcctcccgtcgttttcgttcgtgggcggcccgggccgcggaaaaggcacacaacgcgagcggatcgtggaaaaattcggcttttacacatctcgagttctcggagatttcgttcgcgcgctcgaagttgcatctcggctcagtgttgggcaaacagctcgaaggcaacgatcggacgcgggtgggctcgtcccattcggtaagaacatttgaccaggggtccggacaatcggtcagtggacaattcgtcagaaaattttatttatttttcgatcaatcgataatcaaacgattcgagattcgctcaatttaaattaaatcgggttgggtttagaacctttctagttatttaatagaacaattttcgtttatcattctttaaaaattatttttaaaaatgttcattcattacttttaaaaataaaacaaattattatttaaattttttcaatttaaattcagtccttgtataattacaaaacatttgcatttaggatacagtgttggccattgtgaagggggctatgctcaaaaagcgagaatcatcgaatggttttctcattgatggtaaaaaatgatatgcggaagaaattagaaaattgcagttttactatttaaaactttaaaaaaataaataaaatacaaaaaacgaaaaacgaaaaaatgtggaaatatgagtttttattcggcgattctaaaaatagattagtgtaacagctttaccaattctaaaaatttaacgcaaaaatcttttaaccaaaagtaaaaatgtgggcgaagtgacaaaagtatgggtgtgggatgtggccgaagatgagtcattgcagtccaaagattaaaattatcattttaattgataatttgctttttcaccgggcccataaattatttattttcattatttatcaaaaaaattattaaagagaaataaaacccaaaaccacattcgccaattcattcaattgcacttttacttttctaaattttattttaaatatatttaataatcatttaatgatttagaatgaacttttcaaacttctaaaatttcttactattttagaaattattcttcaactcgatatttgtctccaacgaaaccgacgactaattaacatttaaaatttaccgaaatttgttaaaacaagtaaaaaaaattgctgtactttgatttatagttatttaatttttaaacatatattttaagacatataaataataatagggtaattatttttattttaaataattttcatttattagaatcatttttgggactgaaatgatccatcctcgtgcctgtccccacacccattctttcttttgtcactcaaatgattattaaccttttagggtatccccgtgaagtgacacaaggagaacgctttgagcaagaggtgtgttggcccattaaattcaaatttcaccaaaatgccattttcagatccaatcgcccgttttggtcatttatttcgaggccggcgatgaaacgctggtcaaacggctgatggggcggggacgaagtgatgacaacgtggagacaatcaaaaacagactgcacacatttgtggagtcgacaaaacccgtggtggaccattacggaaagcagggcaagctggtcaaggtcagtcagtcagctacgacaaacaaatgttggatatgttggatatggaaccgttccgttagaaaatgcagggct

SEQ ID NO: 51796 - DNA, 3193 bp, Heterodera glycines
  unsure (1)..(3193): unsure at all n locations
atgggcaaaattgggggaaaatgggaaaaatttggggaggaaaaattggccaaatcggacgcaattaatttattgttggaaaaattgcatttgctggacgatgagctgaatgagctgacatttggagggtgaaaaggtcaaattttaatttaattttaaaaaatttaagagcgaatgaaagagaaagtgccgccgtaaaagcaatggaaatgattttgaaattggaaacggaaaaagagggacaattcgaatttgggaggggaaaaatgggcaaaaaaacggacaaaacgacacaacaattgcaccttcagacaattggcacattaaaagccaaagaattgctaaaagcggaattaaacggaaatgaaaagcaatggaaaggccaaaacggaaaaacaatgagcacacaaaagaagatgaagcagcttttgttgtcgaaggaaaaggcggagaagaaatttctaacaaaatttattaacggaatgaaagcgatgataacacagcaaaaattgggtaattaaattaaaatttaaaaaaccaattaaaaccaccaaattgaattgtcaagttaataatccgtcatggacttcggtcttcgaaagaagtcaatacaatttgatcagaacgaacgcaaaaggacagaaaagagacgcggaaatatcgaaaaaggcaaaataaatgaacaaaactcaaaaaaataagctaattgttgcactttaagctgatcgaattcactcaattatattgcattgaacaaaacaaacgaagggaaaatgtggcataaaaaggccaaatcgaacggatcttttggccatgggtggagaaaaaatggaccaaaaaaacagaaaaagtgcaatttgaatgtcattaaattaattggttcaattttaaaaaggcttttggtggccaagggtcctttttggttaaatccggaaatggacgggttgaacttggatttaattttgggttggcccggaaaaaaaaatttttcccattttttggggccccccgggaaaatttttttttaggttttaaaaggggaattttttcaaattcccccggaaaaaaaaaaaaaaagggagaggggggggcccaataaggggggggtttttgcggggggccttttaaaaaaaaaaaaaaaaagggaaaaaaggggggggcattttttttttttcccccaccccccaaaaaaaaatttttagaaaaaaaaaaaaaggttggttgttatagttttgttggggggggaaaaaaaaataaaaaaaaaaaaaaaaaaaaaaaaaaaaaaaaaaaaaatattttttttttttttttgttggggggggggggggggggggggggggggggggggggggggaccaccaattttttcttcttcttttttttttttttttttttttttaaaaaaaaaaaaaaaaaaaaaaaaaaacgcctttttttttttttttttataataaataaaaaaaaaaaaaaaaaaataaattgggggggcccccccccctttttctttttttttttctttattttttccaagaaaaaaaaagggaggggttttttttttagtttttttttccccctttttttggggaataaaaatttccaaaatttaaaaaaaaggggaaaaatatttttttttcccccctttggacacaaaaatttttaaaaaggaaaaaaattttttggcccaggcttttggaaacggtttgggttgggcccttgtttttttggccaaaccccccctccccccttccttccatttaaagaaggggtagcaagccaaaattggcggtattttaactggcaaatggcaagcaaaaaataccattgttaattcatttttaaataaaaatttcctgggaccgacaanaatggcaaaattcgttggcattgctcttctctcgctgaccatgtttttcgatggcacttgcaaaaactggcaaaagtcaacggncaggtgggtaaattttanaagactgaattttttttttcttatttattgtattagggagagtttgaataaatttgtacgcaattataaattcaattctaaatgtgcccaatgaaattgtaaaatgaaaatgtcattgttaaattttaaattcatgaaaatcattttttcatctaatatttttagtttttgaaaaactcaaacttttcccaaattaaaatttaagtatttagacattttcgctgttttttttggaacaagcgtaatgcattggtgtaaatcccactttgaaaaaattgctcatcaaaaattgaacatttttccatgtacatgagatggactgaaaatttggaaaaacaaataataaattatatattatatttagacgaagttgagggatttcgcaatatgaacatcggcgacaacaataagggtatgtataataataaaagttcgtatttggatggtaagcatacctatctggaattggcactcaattaaactttttcggattttataattagaaaagatgtaaaaatattaataaattatatgtttggcatttccatgacataatttatcatgcatacattacaaattttgcaatttttaaagaatgtacatattttttatattttgtaaaatttagaaaaatgagcccactaattgaacatttgattacgcacaatacattcataaaaattaatttttttgtaatctaataatatatgtctttaggaatttcaaggacttattcttcggaaatatattttttttaattttatcaaatgagccggattaaatttcaaagaaataattttcactcaacaaaccaatgagttggaatctaaggactggccaagggcttaagggtgtccttggcatctgttgctcattcgacaagaacacccttggacacgaatccatgtcgctctgttgtttttacaaattgccattttaacagttgacgccggaaaggagcccgcggctgataaagcaaccaaaaagggaaaagctcagaaagccggaacgaaaccggcggcggccactaatgagcccgcggctgctaaaggaactaaaaatggaaaagccccgaaaaccaaagcgaagcaagaggtggccactaatgagcccgcggctgctaatgaatggaacgaccaattgatgggcatgagcgttgagaaatttaacgaggagcttgctgtgttgttgccaaaagaccgaacacttttatggaaaatgctttga

SEQ ID NO: 51797 - DNA, 771 bp, Heterodera glycines
cttttcgaaccgcttcgttgagtacgtctcggaactttgtcgtgttccagcgtgccgggtcttctccctttttggttaggattgtgcgcaggaatccgggagtaagcttcttttcaagcatgaggaaggtcggtgggccttcgatgtcttctcctgtattgttgagttcgcgtgtgagtcgttcgagttgcaggaggaattctttggtgtcgcacaggtttttgcagggcttgaggtttgccaattcgaagtgaagtgccctgatgtgttcgtccggtgcgccatatgtgtccttcagcaattggagggccgtgtcgtaattgttgtcctccagtcgaaagccggccacgacttctcgggcctctcctccgagcaggttgcgcaggagattgaacttttccgctttgctgagtgcgtgtgtgccgattgctgatttgaacgattcgtagaactccggccatttgcgtttgttgccgaagaacttgtccagctggattggctggaattggtagaacggaggagtgaaggacggcgtcttatttggttgttgctgcgaggtgtgttgcattgcgtttgcatgagctgcttgagcgtcccgctcttctttgtccgccttgctgcggtagagtcgggattgaactgtgagtgtgcttatgaggtcgcgcaagtcgcgcagcttcagtgctgcttcgtcgactttgtctgttgttcgctcctttttctcgaacttgttgaaatctgcttctgctggatcgcgttccgttgcaggca

SEQ ID NO: 51798 - DNA, 1725 bp, Heterodera glycines
atggccgcaccaattcaacagaaactcagcgctgctctcaaagttctctcccgaacccgaactgcggcggagctaaacatccaagccgatcaagcggcatcaaacctcgaaaacgcattcaatttcgaggctcaactggagaaggtccaaaaggaagcaaaaacaatggacatcttcctcgacgacgtacgagaatcgctcacagcatgggcggatttactgcgcaaactgcctgcaacggaacgcgatccagcagaagcagatttcaacaagttcgagaaaaaggagcgaacaacagacaaagtcgacgaagcagcactgaagctgcgcgacttgcgcgacctcataagcacactcacagttcaatcccgactctaccgcagcaaggcggacaaagaagagcgggacgctcaagcagctcatgcaaacgcaatgcaacacacctcgcagcaacaaccaaataagacgccgtccttcactcctccgttctaccaattccagccaatccagctggacaagttcttcggcaacaaacgcaaatggccggagttctacgaatcgttcaaatcagcaatcggcacacacgcactcagcaaagcggaaaagttcaatctcctgcgcaacctgctcggaggagaggcccgagaagtcgtggccggctttcgactggaggacaacaattacgacacggccctccaattgctgaaggacacatatggcgcaccggacgaacacatcagggcacttcacttcgaattggcaaacctcaagccctgcaaaaacctgtgcgacaccaaagaattcctcctgcaactcgaacgactcacacgcgaactcaacaatacaggagaagacatcgaaggcccaccgaccttcctcatgcttgaaaagaagcttactcccggattcctgcgcacaatcctaaccaaaaagggagaagacccggcacgctggaacacgacaaagttccgagacgtactcaacgaagcggttcgaaaagaaagccaaatccaagaagtcatgggcgagtacggacactcgccacaacaacggccgcaaccacaaaggcccaatttctcggcatcaaaattccgagaccgcgcaccaatcccacagcaacgggaacgcacattcatcacctcagcggtggatgacaatcacaaaaggctgatcaatcgacagcctcaacacaggccacagcaacaaaggcctcgcgcaccacaaccgcaacaaagaaattgcgcactttcaacaatcaaaggcaattttcaactcaacgtgccaatgcgaccaacaatcaacgacaatttccaactcaacgtgccaatgcgatcaacaatcaaaggcaatttccaactcaacatgccaatgcgacattcaatcaacgcaagcctccaagtccatgcatcttctgtgacaacgatcactggaatgaagaatgccggaaatacagcacaattcaacagcgaagagaagtgttgcgcacaaaggcattatgcttcaaatgcctcaaaagcaatcatcaagcaagcaattgcccacaaccgaaaagatgcttcaaatgcaaacaacctcatccaacggcattatgttatgcagacgaaaaaccaccgaaccaaatcacagcagcaatgttggggcaaacacaacaaaatgtgtcaatcacaactcaagacggaagcaacgaaccaacggcatcgacatcgcaaatgtgcaatgccgtaa

SEQ ID NO: 51799 - DNA, 979 bp, Heterodera glycines
atgccaccaatggaagcacctacattcacggcaccgctctatcaattcagccaatccagctggacaaaattcttcggtcaaaatctaaaatggccagaattctacgagtccttcaaatcggccatcggcagccaattaatcagcaaagcacagaagctgaacttgctccgcaatcttctgggcggagaagcacgggaactcatcgctgggttccgcctggaggaccaaaactacgagacggtccttcagttgctgaaggacacttacggcgcacccgaagagcacatcagggcgctacactttgagctggccaatctcaagacgtgccgaagtctccgagacacaaaagacttcctgcttcagctcgaacgactgacaagagagctgaacaatgccggagaggacatcgagggaccgcaggtgttcctcatgttggagaaaaagctgactccagcattcctacgcaacatcctcaacaaaaagggagaggatccggcaaattggacaacaacaaaattccgggacgtgcttaacgaagcagtccgcaaggaagtccaaattcaagaggtgatgggtgagtacggacaccaccatcagcaactcaatcgaccagcaaggccgcaaacacaagcacatcaaactcagcgagcacgcatgccgacagcaaatttccggaacagaaatgcatctcccgccaatcaggaacgcactttcatgtcctcaacaattgaggaggttcagcaacgaatgaaccacaggccgcaactgcggaagtcccaacagaggggaccaaggccaactcaagcgccttacaacgtgccaatccggaatggcacagcacaagcagggtcaaggaatccgccttcaccctgcatcttctgctatggcactcactggaatgagaaatgccagaaactcagtaccgttcagcaacggtcagcctttgttcgagaaaaaggcttgtgcttcaagtgcatga

SEQ ID NO: 51800 - DNA, 2295 bp, Heterodera glycines
atggaagacactaaggtgttgggcatcaagtggacgccaagatacgaccaactcgttttctccatgccacacttcgacagcccaatcaccaagcgaaacattctttcgcacattgccaaagtatatgacccactggggctcatttcaccggcacttctgccagcaaaacacttccttcaaatcgtccaaaacgcaaactacaaatgggacgacccgttggaagaggatttgaaattgatgtggataaaactgatgcatgcgtgggacggatttggattcaactcactcgtcgaattcccacgccacatcatcgctgggataagcgaagagttccattgctattgtgatgcgagcaaatctggtctgggtaacgcgttgtaccaggtcgcagaaacgcattacaacaaaagggaaagcaatttgatcttcggcaaaagccacgtcaagccactcaaggtcgcgtaccacaattcgaccatacccaaattgaaactccaggcactcactttgggagtcatggctaccaagttcgtccaaacacagctcaactttgccgacagccaagtcactttgtggacggacagccaatgctcgattgagcggttgaaggaaaaccgcacccacgacagattcgtagtcaatcggctaaagaagataagagaagcaaacttcaaagtccgacacatccgaacagctgagaatccagcagacatcgcctcacgccgcacagacccgcaaagcctccaagcctcattgctttggcgatatgggccagcctggctcaccaaaacacacaaatggccagaaacgaacgtcacttacactcccggagaagagacacgggaagagctgagccaccgatcgtcgagtggagtgcagcactccaagaagagcagaaattcagcccgtcaatccaatttgaaaggttttcgaattggaaccggctcaaggcggcagccgcctatgccattcgtttcgctttggcacttcttcaaaaaagaaatgtcgttccggcgatcgattcacttctgtatcagcaagaaagacaagcggggctgcttacggcaaaggaattggaaaatgccgaaacatggattttgttggaaacccaacggcttcactcgcccacagaaacagccacaaacaatttaaaattgtccagctcgagctccatcgagccactgagatgccaggggcgattggaaaacgccgatctgcccaacgaaagcaagcacccgacctttttaccggcagaagcctggaccaccaagctcatcgttatccactacgatcgggcgctgaagcactgcggcccacggacgcttctctcaaaacttcgagaaaattattggataacaaaagggcgacagacagtccagcacatcctcaactccaacaaattcggatgtttgaagtgcagactggtgagactcaagccatacgcttatccggacgctcctgacctgcctgaggactactcagctgaagcatttctgagagccttccggcgatttgctgcacggcgcggcattcctagtttgatgatgtccgaccaagggacaaatttcaccgccggcgccaaaacgatccaagaaaattggacagtgcaattgttcccaaacgaaatcagtggacaattggcccaccaaggagtcacatggctcttcaacacggcacacgcaccttggcgaggtggtgcctgggaacgacttgttggcataacaaaaaatgccttacgacgaagcatcggtcgaaatctcctcacgtgggaggaattctgcacactcaccgttgagattgaaacgatcgtcaattatcggccattgatattcgagtcggaccgtgaaccgagccccgtcattcgaccaatcgattttctgattccgtactggcctgcggaaacgaatttccaagtgatcgccgtggatccagaggatcctgagtacacggagcacacatgtcgccgctggcgactgaacgcgtggaaattgggggacagccctgaggatcgctcggaggacagcccggaggaccgctcggaggaccgtttggaggaccgcccggaggaaagaaatgaggaagtcctgtggaggacggaagaagattctcgaatgttcccttgtgatctttgtgattaatattcccgaagtttccccatttttcatttcctttcaggtgtgttttagaattttccctccctgtccaaatcccatatataaacccgaatatttttccctttagaatatctctcgaaaaatcattattccatcctttgattgtgcgctattccgacaa

SEQ ID NO: 51801 - DNA, 762 bp, Heterodera glycines
atgagcaacctaatccggatggtactgggcccacaagtggcaattcttcgtcaacgagtaaacacggcacggacacatgtcgaccgtgaggaagatgaagaagtcaacaacgctgcgctgatggaagcaaaagtattgctgttaaaagtattgcagcgtgtggaagctgaactagcgaaatgggaaaacgtgatttctggacttcaaggacaagaaaaacagacagagcaagaacgactcgagacattcatcaacgaaagagaagtagcgaatttgctagccgacgcacatgctacgatggatgaaatactagtggcacttgcaggagagtcagaatacgatggttccgaaaacggggacaatgccgtgcgagaaaatgcccaaaggcaacggcaatcacctgctcgagaggaaaggcaactcccttctcgagtacaaaggcaatcacccgtcagagaagtcctgcatcaaccaaggatcagacttcctgaattacggatgccgatattctccggcgatccgttagagtggccgacattttggcaatccttcgagaatgcggtccacaatcaggctcacctgcagccaatcgacaaaatgaattatttgatgggatgccttaaagggaaagcctctcgtgcagtgataggctacagaggtggccaaaattacgaaaatatggtggaaacactccgccgattgtttggcaatccgcaagttatcgtcgaagccttgcaagccgaacttttcaatcttccaaat

SEQ ID NO: 51802 - DNA, 228 bp, Heterodera glycines
ctgcgccaaatttttgcatgcggtacggcttgcgtggtgacgccggttggccgaattctgtacatccgccagggcaatgggcgtgccggccgaatggaggacatgcaaattccgatgccaaattcggatgaagaaccattgaacatcatgcagagactgtacaaagcaatcaccgacatttattatgggcgacagaaacgcgaagaatggactcggattgttgtctaa

SEQ ID NO: 51803 - DNA, 683 bp, Heterodera glycines
atgaaaatatggtgtttgtttcgacatttgatgacaccatgttcgtgatcagtgactttgaaccccaaaatatgaatttttaaaatttttcgaggggggagggggtagcaaaatacggaagtacctactaaactatattttcgtaaaatttaaaagtttcaattttcttcaaaattaataaattttagcttgattttttgttttaaaataatttttcattttccatattgagctatttccgagattgttagcttaaatttattgaatttaaagaattttggaaaattttgcaaattttaagatgattttcagacaccattgtacgtgatccgtcaacgctattccccgccgaaaagcaaattaattattctgcgggacagaaaaggacagtgttcaatttgacttttgtaaaatgtgtggccgaaattgcgtattttcgagtgatcaatgaaaatgatcagtcaaaagatgcgtttctggaattcaaagtggtccccgggatcaacgcgctaaacgaatttttgggctttttgcattttgaccaatcgattggccagcaaatttctcacaaatttaaaagtgaatttttctccaccgaaagtccactcgccgaatccgtggtgaaccaagtgatgcaattggccttctcatttgctgcccgtgtcattctgtgcataatgtaa

SEQ ID NO: 51804 - DNA, 696 bp, Heterodera glycines
atgtgcatggcattgccgaccaaagtgttgaacacaaaattcggcacgctttcacctctgtcggcttcccagccttgcaagcatccatttgtaaggagattgttggatgatcggaaaatttcccttgggctttgtgtggcataatgttgcgcattgcgacgaccaaatgcccggcattttggaccaataaaacaacaacttaaccctccgaaaaatttgccaattttgaggcaaaaattatttttaaaaatttcccaaaattttggaaaattaaaaatttgaaatttttcttaatttcttaacaaatctcaaaaaacgtgcaattcttccattgacgcctgtcaaaatttcatttttcatagattttcccaaaattttgcgcttaggccatgggaaggtataatatttttcattttatttgttaaataaaattaaaattttcaaacttttttcctctttccaggcacttgcatttgcgtgttgagccttgcgtttgtccaaatttacactgctcaggcccgtttttacgggaaaatttcaaaaatttacaaaaaatttttccaggtatttgtccgggttctctgcgtgtgcattgttttgtgtgctgtccattccctgtttttgttgcccgcacttttcacatttttggacgcaatttgcaaattgttccggcaatttatgtgccaacgacgatga

SEQ ID NO: 51805 - DNA, 769 bp, Heterodera glycines
atgatcaaaatcaccaaagcaggcaccaatgaatcggttggtgttacaaatggatgcttatttgtaattgatagaggccggattaactatctcatcaatttgggttgttcttttagactaattatcgaactgtgttgtatacaataattttagcatgaatacttcttcacagaaaagcagcttcttctttataattatcgtacttcttatggccataacgtaccaattgtgctcggtttcggcattgaaccatcagtttataaaacattccaagtacgctatgagaatgcgcggatcgccagagaaaattatcgttatgtagtagaatatataataactgtcaaattaaaaatggacaattatcctcagcacttggtgtcagagaattttataagaccgttgaaatccacattcatattaatcagcagcataatcattagtaagattgaatagattaagttcatattttttgcgctatgtcgtttcttaaatgcgccagctcgtatgggttttcaacagattttaattatatgttattcaaagtaaccgaattaacatagtttgaaacattcaatagcattaattttctatatcataaatatttaattaatttatgaaaaatattatagcggcccattttgtatggccaaaaatgttttcatcgcgaacaatgcattcgaaattgatttggacaccacatattacggaagttcatatggtcgaattagaccagtgtcaagaccaattaccaatgtcgaaggtggcataa

SEQ ID NO: 51806 - DNA, 134 bp, Heterodera glycines
aaaggaaggtccccaggtgtccgtgggatttccaaatgaaatttggtgggtggatagagcacccatgggttcttaagaaaaatgtttttattttctgcgaaatgagtctgagtgccgaattatgacgtgccaaa

SEQ ID NO: 51807 - DNA, 656 bp, Heterodera glycines
atgatgcgcgaacgcacattcacgccgaagagtgacacgtgggcctacggagtgctctgctgggagatcttcagtaacgcgcaacagccctaccagttcatgtccaacaacgacgtagccccgatggtgagtgcagtgggggggggggggggttgaaaacgaaaattcccattttcagaatcagctccccttcccttttcaggttttgcgcggcacacgactccgcttccccaatgtgacgccacctccatttgcggaattcatcagcgcgaacgtttggactgccgacgacggtaatgttttttgtttttgttttaacattttcaattataatgttttcccttccctttcagtgcgccgctattcaatgagggatgtactcgcctggattgagcaacacatcgatgagctgatcgacgataccacagcatcgcggcacgacacaacgacgactcgaaaccgcggatcccgtcaaggctctcgatctggcccataaaagatggtgatcaatgtgtcgctgatgtgtgtttaatgtactttatgtgtgttgtatatatgtatatgagtgtatattacgtcgctgttgtatcaatatttactgcattgtctcgtatttcgatcaaatgactgtcatatttgtatttgtcatgaataaa

SEQ ID NO: 51808 - DNA, 657 bp, Heterodera glycines
atggtcaccaaagtgttccttctgttccccggcgaaacttcggtgacatttctattggaaaagtttttcctcatttactcgttttggtaagtgtttgggttgtgccgaattgatgaaattgcgaaattatgaaattcaagagtgaattaatcgcaaaatccatttaagggtttggccaatgccattgcaattaaaagaaattaattatgccaaagaaggggcatttctgaattggtcccctgaacgagaatggtttgagagaaagcaaagcgaagttggccatgcccaaattgggatggaaatgccaatcatttcgccaataattcctcacaaaaatatggccaacaaaattcagccttctgtcgctaaaaacattctaaatgaatttttgaatggtaaattaaataaattaatcgaaaggaaaaaaatccaataaattaagtgattaattaattaatttacagaatttaaacaatttatggccgaagaaaatttgagtaaaaactcctagaagaagctgattgacaaacgtatttaaatcattttttttagaagtgatactttttatttgttatcacaaaattctaaacatttatggacttttctttcaaacgtttattattcgtcataaatttttattgcaaatttggaattaaa

SEQ ID NO: 51809 - DNA, 534 bp, Heterodera glycines
  unsure (1)..(534): unsure at all n locations
atggttnttctcagtgtgttctgtgctgagcttctcaattgccgagtttcacagctttgcgaccgactgaaccatcctgaagaccgcacttacatattaaattcactaaagggtcgcaaggtcacgacaacatacaaggacagaaacggaatgaccaagactttcttcattggaggtttatcggaaaagggtgctgcacttacaatggcctacggttgtctctctcgccctttcaacatcaacatcgcagctcatttctatgctcgacatcgcattaagcttcatcatccttatatagtctgcataattgaacgattctcaaaaggaaaagaggatcgactctatcccatggaattgcttgagcttactgaggacaaccctatttggcagcaatggtcaggacccttattcgcagagagggacccgaccccaccacgcacttcgggccggtttgaaaatgatgtggatgatgatgaaacgttaaaagatgttggccgcaatcagtgcacacaatcgccagatttattttggtga

SEQ ID NO: 51810 - DNA, 1332 bp, Heterodera glycines
atggctaataaatttttgctcgttccacaagaaatttaccgagggctaacctcagcgtcggatacgggagtcattaatttggatgcggtaaggcatgacctggaccgtgccaggggtgaacggactaatccgacaacaaaaaatgtccgatacaatcaacagcttaggcgctatctgcaaatgagacgggagcttgccgataggcctaccaaagttgagttaaccaagggcttgagtgttttgctaaagcaagatggaggtgttgatgatgacgacggcgaagtcgtcaacactcagccacggcctcccgctccaccaccaccaccaccacctcctccacctcctcatcaataccaccgtcgccatcccagccctcccgatcagcaatcttcctcgtctgacgatagtcatccgcctcaccctcctcgtccaccacgtcctcagcgaacaaagaaaaaccatcattcttctataaaatatggtcgactgaaccaatggaagcaaaggcgacgtgacttacaacaacaaccggtagtacgtgatctactcgctgaggcagcagctgctcctttacctgaaagtgacgatgacgatgaacaaatgctcgaaggtgggtatctgctgccaacaccatcacaaaattatggagacatgccaatattgcctgattatgcagatgaaattgaggaaatggacaccgcccaacaaagacttgcaagcagaagaaagataaaaggagagggaatagataaaaacaaaaaatacaaaatttactattctcctccaccatctcccacactaccacccgtgtacaaacgaccagaccatccccctcctccgcctcgttctatacccaaagttgaactgaaaaggggtccacaaccaacaaagttgaaaaaatctgcttcacccccacctccaccacttcctccacatcgcgcaaagagagaaccaaaaatagagctcgcccctcctccacctcctcgcaatgtctccacaagggaactgaaaattgaactagctcctcctcctcctcgtcacttcaccaaaagggaaccaaaaattgaagttgacccacgaccatccacatcgaagcaagccgggtacttcccgcccccgaaaatcaaaaccgagccaaaacatgagttgcaacctacaaagaggccagtgccataccgtatcccgaaaaaagagccaaaaattgaagaaaagccattacagcagcagcagcagcagcagcaacaacctcctcctcctccagctgttgtcgtcgaaagaaaatgccctatgttcctccacctaggagggggaccaaacgcacataccccgtaa

SEQ ID NO: 51811 - DNA, 2564 bp, Heterodera glycines
tccgacgaaaaaatcattttcattttggtaaaaaattcgtcctcttccgatcagccattgttgtcgccgatcagcagcggtgcagaagaaaccgcagcagaaacagcagcagctcggggaaacaacagcaggtgtgaaggtaaagaacctcggggatggtcaccgaatcgtttcgttcgaaactttaattcgaatttaattaggatgaaaaaatattcgaaaatttaattcgatttcggcattcgactatttcgtgtaggggatttatagttttttttaatattataattatcttaaacatatataattattaaaagtttatcaaattaaaaaataatacattatttttaaaatacatcgaatatatcggatataacaaattgttttatttttaatttatataaaaaaattttttaattacatcgaatcttgaaaatacattaaattattaaatttataaagaatttaaatttaattattcattaattatttcagatttaaattcagtaacgacaattttatttattttctgtaatttattcatttagctcaattttttggtcacgtcgttcgatgttcaccgcaatttttattacgcttacattgcttattggcacagtttctttagtcaactctttttctagtgaaaatagtggtgaagatggtgacatattgggagatgacggcatttcacaaatattttcggatgacgatgccaaagtaattaatatattttaattaataaaaaatctatttcaaaataaaaaataaacagtgcaataataacgggaaaatctaatacgtaacgaagttacaaattctcagaaacctaacatactttctattaaccttagatatataaaaatataaacataaaaatattttaaaaataaaattgtcaaaaatatagaaaaaagttagatttaaaataaaaaaatatttttctagaaagtaagttaaacttttttcaaatatatttaaatttaactaaaacgaagataatttcgtgtattcaaaatattttatttattcccatataatattttttagcattaataaattatttttttgccatggattttcaatttttttaaatccattaattccagggatatcttaatcgttatggttacattgacaatattctgtcgtcccaaggtcatcatcatcatcattaaataaataaattaaaattttttaaaataaagaacaaaatgctgatgccacgccacgagctcatgcccaacaacagcaaagcaaatccggcgaattagttggtgaattgacattggattcaatccgatcggctgtcaggaaattccaagagtttgccggtttgccgacaaccggcgatttggacaatcagacaaaacaaaagatggcaaagccacgttgtggcattcaggatgtgcaaatgctgaccagtgggagtcagatttttgatttattttttttaatataatttttataaaaattaatttattaatttttttttcatatttcaatattaattaaaatattttaaatgtttaatttgtttacataataaattggattggttatacagacaataataattaattttttttaataaaaaatttctatttgaaaatttctttcccattaaatcattagggattttaaaaatttatttatgtttgtaaactgaaaatattgttttaatttttaaaacctaaacttatgatcaaaaatatttactattaaattattttgggcttttacaaaatgaatgattatttacaaaattttaattagctttttttcaaaagattatgtaatgaaatggcgcaagagacgcgtaacctttcaacttatgcagtcaaccaatgacattccagaacgcatgcaaaagttagtaaaaaaaattttgaaaattcaaaaaaaaaaatttttttttttttcattagacaggccatccaaatggcatttgacacttggtcaaagattgtgccattggattttagcgaagcaagcagatatgatacgccggatgtgaaggtgttgttcgcccggagaaaccatggcgatccttggccattcgatggccgaggtaaaattaaaaaaaaattaaatttaattaccctaaaacgggtgcttacaaataaggacaaatgccaaaaaaagtcccaaatttcgacaatttatgcccttctttttaaggtggcgttcttgcgcatgcaacctttcctcaagatggcaaactccattttgatgatgacgagaactgggttttcatggacggaagaaaaattggaaagtaaaaaattttaaaaaacacccattttgccaatatttttaaatttttagccatcgctttacggatttgtattgggtagcgctgcatgaaattggccatgtgttgggcttgtcccattcgaacattgaaactgctattatggccccattttatcaagtaaaaacactaaatgaatttttaattaatctttttttaaggacccacgtgatttggtcgattggcgtggcaattacaaaaggccagagctgactcaggatgatgtccgcgcagcgcaacaaatatacgg

SEQ ID NO: 51812 - DNA, 325 bp, Heterodera glycines
atggctgatgttttgctgttgacatacataacaaaactttgctcggcaatatttatttctgcacacaatctaaaaattatttatgtaattataaacttttttaatcaaaaaatcttttattttcagaagccgtttctttaattatagttttttattatattttggaaaatgttatttatattattgtcttgacaaaaaaaaacattcacaaaattacagccgccagaccaaacaaatttaatatggcattttgggcatttgtcaatggaaactttatccaaatgtctttgcctaaatataaaaatcatcattattatatattaaa

SEQ ID NO: 51813 - DNA, 1022 bp, Heterodera glycines
atgaacgccgtccgactgcgcgtttgggtaagacaagagatgaaaaaacaggaaggataataaatggtatgatgagtccaatgttaaaggatatatgaattaaggcaaagcacagccaccttttttaaggacattaaggacagaaaaaacataatcagtgaattaaatctattctgaaaaaagagtgatgggtgcaggcagatccaaagctcaggcagggttgggtagaaaatcaacattaaaagctctgttttttttaaatttcgacatagggaaactgattgtaaccacggcctgtcaatagaggatgtcgagacttgagattgagagttgaacccaagactcgagacggagaattggatgaacttaagaatcgaaaccttgaattgaatctgaaattctagaccgataaatgaaccagagactgacaaatagaaagtaaaaatatcgagaaatggtcttaaggtgaatccgaccggcggatgtgcagcacccctggtttatggtaaggtcggaaacacacagttaaaaaattaaaaattatttatctcaagaaccgtactgatatggtcgctctcttttgttaaatttacacttttcgcaaaacgtttttttccgtaaaagtaaaaaccaaaaatttttggttaattattaacaaaaaaatctcgtatcgtctcgtctcgtgtctcatattttatttttctttcgcaacatctctgctagcacccattttttgtttggtcatattgcagcaaagactaatgctcagtttttgacttttttgtcgattttttggtgtttttcgtgattttatttacccctcccgagtgatgataggaaatttgtaatttttttcattataattattcggttaaccaaattttggtagtaaaataagaaatctttaaaagtgtcttgattttttatagtttcagaaaatccttgaaattttgttgtccaacatttgtgcaattactttgaatgtttatgcataaattttttatcgaaaacccaaaaataaa

SEQ ID NO: 51814 - DNA, 404 bp, Heterodera glycines
atggcaaacaattcacatacactcattcagcctccggtgcaatggtattttatgaatttttgatacttaaactttttttaggtttactcgatgtctatcgtcacgttcggtcagtaagataataaataaaataatcctttcaacacttttttttgttgaagttgaagctgacaactacggacttggatgaattcttgttccattatctttttccatttcaattttcaggtccttttataggttaaatcacctaataaaagaaatttgtttttttttatttctaaattaaaaaaaaaattgctcgataattaaaattgccaaaattttagttggctttattggcgatgcgcttaatctgtggattcttcgctctcatgaaatgcggaatcgtgccaatgatttag

SEQ ID NO: 51815 - DNA, 95 bp, Heterodera glycines
atggccacagcaggaaaagcttatgatttgacgatgaaaatttgtttcatgcatcgaccgacaattcaaaaaataatgcaaatctcttctgctgt

SEQ ID NO: 51816 - DNA, 174 bp, Heterodera glycines
gagagacgagcagccgatgagtgagagaaaaatagtggtgaaatggtcaactgctgcattggcagagtcagagaggggtcacaaagagttcgcacagcatcgaatattccctcattttgggcgtcattcttccccactgcacttctttcttcggtttaattacccaagtttgag

SEQ ID NO: 51817 - DNA, 80 bp, Heterodera glycines
gtcctgcccataatatctgtggcatggaataaattttggaactgcgctgcctaacggcggtgcttaaagtgcgctaaaaa

SEQ ID NO: 51818 - DNA, 845 bp, Heterodera glycines
atgaagaagaaaggacaacaacaggagaacaccgttttggagaacaccgttttgggaaagagtaaaattccatccgacggcaagaaaggtttgtttgcactccacggggtgggtcgactctaggaggaacttgctccggccaccccacggggtggggtgggtcgccttggagacaattctttttaataaatttaatactgaattcaactttttcagctgcaaaagcatcaggcaaggaggtcaaggtcatgaaggagaaaggacaacaacaggagaacaccgttttgggaaagcagaacggttttttacatttctattaacaacaaaatataaaaaattatttatggcaattaaactttcagctacagctaagctccagtgcaaaagagattgcgtggtttcaatgataaaacacggctggctgaacaaagacaatcagaacgatatcaagacacagctagtgagactgcaactcttcaagtcaaaagcagcaataccttccatgcatgactatgaatcagaattcggagacaaaagagcacagagcactgcactagctaatgtttccgttggtaaggccatttcggacgatgctgattttgctgggtatgtacttttgtactgtatatatatttatgttactccatttcagcatgttgctgatccgcgctggccgttggtatcgtacaaaaatgactgaaactgcattgaccaaattggcttcattcgactctgcacaacttcatcaattgcttgtgaggaaaattaaccaaagcgtttggaatgaaatattttctgatgctgcacctaaaacaattccatccggcgcagagataggtaataaa

SEQ ID NO: 51819 - DNA, 367 bp, Heterodera glycines
atgtacactgagcctacgaaagacatgactcttgcacggacgcctctttttaaaactccatccgatggaacagacggtaacacagttaatgggaaattgaacgtgtaattataaaaattttatttttgaagatcaagaagatgacaagagagacgacaatagtttgagtggctgtgaaaacagcactgattcagacgcagagaacactgacgaagagaacgcttcgctcgaatacaatgcagcaccctcacccgaaagatcgaacaagaaggaagtggtggcagcggcggtgacaaaagccgttaccttctcagatgttgtctatgaaaatgtaaaacctgttgccaaaccccgtggcaagaaatga

SEQ ID NO: 51820 - DNA, 422 bp, Heterodera glycines
atgtcgggccgcaaatgtccgattttggcttgggccgcaaaatccaacaaaaaagtgttaggtatgcatttttaattgattatttcagttttcaaaaaaaatttattcatttaattgattatcagattttgaacatttttttctccatacagaaacaacaaaaaacaaccagctgtacgtggaacgcatccgaaaagtgcgccaacaattgcaggagcgtcgcccgctgttccaatggaccctcaaggacttcaaccggtgcgcatttgcggaactgctcagctaaattgtcctgcttccactcttggagcagtcggttccccgccccctgcgtcgttcccatccaaaattatgtccgattttgacttgggccgcaaaatccaacaaaaaatttggccgcaaatgtccgaaaatggccctta

SEQ ID NO: 51821 - DNA, 77 bp, Heterodera glycines
gcgtctccgctcgcaatgctttggccgatgcgtttcgcggccttttgcccgcctctgtagccgctgccgtcgctccg

SEQ ID NO: 51822 - DNA, 1005 bp, Heterodera glycines
atgaagaccctttgcaaaattcaaatggcgaatgtttggcgcaaaaatgggccaaattccacgggcaaaagcattccaaaatggctggacattcttggctttataggagaaatgcggcacgtgcaaatccaaattgatgcctttgtcaaaaatttgctaattggcacggagaaatgtgatgacggaatggtcaatgtaactgaaaggcaatcctttatcacatcccaggttaaaataagtcaaaaattctttaaaaaataataattttaaaaatcatctttttcatatattttccccgtcttttttctgcttttccgtcaaaagtgtatgccttgctctaccgtttagtaaactatttttctcgatcttcaatgttttaatgagcaaaaaaagatgaaggaccaacggacaaaggacacacaaaataataatttaactaaaatatattttttggcgaaatcaaatcttaatctgttaagattagtttttttgatcatataagtcatatagcatttttctcacagtccaaattgagtaaattagtcacagtttattttttaatctttttaaaattcaaattattattttgttggttctttgtctgttggtcggtcctttgtctttgtgggtcctttgtctgtgggtaaaagaacggcgattgtcaggggaaaacttttgcttttttttcttacgggcgatgccattaaaaaataaatttgcctaaatggaaatttttgtatgaaaagaaactaatgaaatttaatatatattggattgtgaaaatataaaataggaaggtctgaagcttaataatgccatcaacattaatgagcaaaaatgagcacaaaaatatcagatccatcacaatttgtccgttcaatacttcacaattatatttcactgcttaaagttaaataagcaaccagcaggacaaatgggaatcgttatgtctccggatttagggctttaagccattttaaactaccgattaaaagcattgacaaa

SEQ ID NO: 51823 - DNA, 216 bp, Heterodera glycines
atgcaagcgccgcaaccgttgccaaatttgcaccaaattttccaagcggtggaccgcgaccggtccggtcagatcagtgcggacgagttgcagcgcgcgctgtccaacggcacgtggcagccgttcaacccggagacgtgccggatgatgatttcgatgttctactacaacaacgatggcggcatcagttttgcccgagtccaatcactgtggaat

SEQ ID NO: 51824 - DNA, 105 bp, Heterodera glycines
gacacatcaacttcgacgacttcatccaactttgtgttgtgctccaaacgctgaccgctgcttttcgtgaaaaggacaccgacttggacggatggattcgcattc

SEQ ID NO: 51825 - DNA, 299 bp, Heterodera glycines
ggccgatccagcattatactgggaagttaattcacaaaaatggccaatgattggtgccgttgtacggaaatttctttctccgcctgcaacaagttcagaaagtgagaggcttttctcaacggccggcctgatttcagatgacttgagaaagagtttacaggcggaaaatctggcaaagcttttgtttcttcaccataacttgcttctaaccggattttcaattgaatgattttgcttttataaatttgctttttaatatgtttttaaattgctttaaaagatttataggattttttaaa

SEQ ID NO: 51826 - DNA, 567 bp, Heterodera glycines
atggcaacaaaaaaagagaggagacaattcacaaatgtgatgattagagctaggcctacaggtccagggcatttttggcaacctgggttttgtccaggaaatacaggttacagtcccaggctaagcacgaaaaaacttggatttctacacaaaatgttagaatttattatgtatttcaagtgaccgatgttttttcaatttccaaaaaatgaaaaaataaatttaacacgcttatcattgtaattagatatattttgagatatttttcctggatttttgtcaaggaaatccaggcccaggcttttttcaaaatgtcgagctctagagaagataatgtagaaattcgttcgcccaaaatataaaattagccacttttaaaatatttaattgaaaagatttttcatttttttggatgggattaattgattttttcttttttctgttggctcatttttcgccgcttctgagccgtggagagagattgtaatcacttgttgcggtcagattgaatctgccggactgagaaagtaacggcacgcgaaaatgggaaatatttttataaataaa

SEQ ID NO: 51827 - DNA, 438 bp, Heterodera glycines
atgtttttaatttggatttggttgcttctgagaaaggcatttttcgaagcgttttgtcaaattgccgataaaagtgccgttgtccccgcccgatttgtcactttttctctcagttttcattcgttccatgccggctcaaagcgtgcctaccgatggatgacggaacaccgtgaaaatggtggtgccaccgccgaaactgaggcgacaacagaggcaaacggaacggcagcaaaaaacaaagtgattaggccagaggcggaggaaaatggcaaacaagtgccaaaaatgtaaagaaaatggttctacaaaatggatattttgaaaacagaaaagcaatggcacgggcgccgccctttggccggacaaaatcgacgccataaatatgggcaaatttgggaagagtgccgaggcaaatgaaaaggtgggaaatgttgaaaa

SEQ ID NO: 51828 - DNA, 1269 bp, Heterodera glycines
atgaacgaaaaacgaaatcggtattttcttcctggcaatgtaaaaggatttaaagacttttttgccttaagcttaagtgaacgacaattggcaacaaatgaaatgtaaatgtgtgaaataattaaatgcgggcacggccaaaaattgttttaccctaaataattaatcgattcataaatgaaaaagggcggagggtcgaaaaaatttttttcagtagggtcatacgataggagataggttggcggtcaaattttttaatgggagcagaggggtagatgggcaaaattttcataaattttgcatgaaatttgcgatggaaaatggttttaatttgatttttaaaatttactcaaaatatttggcattctgtctttttaattaaaaaattcagtcggataccgcggatcccgcacaaaaaaatcaaatttgcggataaagcgagtgttgtaatgtacgaagctgcaccctatggcccgtgcttatgcctttagagattcatttacagtttttcgcaacaaaattggcatttttcaattcaatatactccaaggaaactttatgtgcaaatttttcttttttttatatgcttatacatatgttatggcccttataaataataattcaaaaagtgtgaatataacagtctcagaagaagagaaaccgtatcatttgttgtattaaatgacagcgcaaaaataacaaaacgatggaatgtgtcagaggaaaaatgctttcagctctttaaaatagtaattaacagcagtgagtgagtgatcggattgatcatatgaaaagctctcccattccacacgatcactttctgctgctgtgtccgttcatggcaatttttggctgtgatggctgaccagcgtttctgtggccgcttccgccactcggcgcaaatgttcgatgaccaggcgaaagcccgtgaaataatcgtccaccgaaaaattaataaaaaaatgttttttttccgaaaatttctagattttcagtgtgtttttgggtgtcccgatcacaatcaaggggtgatctgaccaagttggataaaaggcaaatgtgacgagacccgctaattgggtgcacttttgcaccctaaaagatttagaaatctttttctcaagaaaaaaacaatttaacgatttaaattatttttggcacggtgccgtgccatgtcgtacatacgtaccatgtaagggatgtcattttcggcacagaattccttcaccaacggcatcacctgacaagggggatgggctaaacattaaa

SEQ ID NO: 51829 - DNA, 2740 bp, Heterodera glycines
gacgtttaactttttttcctaacgttaaatccgcttcaaattttgcatatcgatagagaaaaaaaatctgcatttttctatactgattttatttttgtttatacgttagttcaaaacttgcaagtttagaacacccatatattttttctaactcatcaaaatgctcagaatttgcttagaaaaagcttctccttatcaggagctttcgaatgataccaagtttgtacaatttggttggtaaaaacctccaaaaataattcccaaaaatggtcattttttaattttttgcaaaaaaataaataaaaatattcatgttgcacaacggactcgaaccaacaccctttgtccctttactatcttacaaaaaccactgagccacatatgcaaatctttttggaactgggaggccaaaactgaaacggtgtgtgcacgaatgtgaattttgatgaaaaatgaattttcgactttttgttcgaattcgggtccgggttcggaattggtcgaaatggatgtcagattcgtgctcagcgtacctataaacccctagaaacatgtttttaagacttatgaaaattttgaaaaatttttcaaaaaaggtgtcatacccctgtcccttaggcagggaacagcgccgcagtgggggtgggttccacccaattcagcgcccaaatgggctatatatagtgatttaggttaggcaaagtaatatgggttgaatagtaggtcgggaatgcaaaaatggatgccggattcgtgatcagcccttggtaacatattttcacgatttttaatacaaaaatcttttcgaaaacgggggggggggttgtgaagtttctaacagcagcctccatttttgagaaaataggtgttttttcagcacccgccttttatctctgcacctgataggtcgtgccgcctcccctcttttttttcttgttttttagttatgaacacatagatatgtatttccgagcattttcgggtgttgatcgcgaaatgatacccatttcgactaaatcggaatccttaacactttcattttatataacaaaaatataatgtaggaaacttggatgtcagatccgcgatcagtgccccgaaaagcctctgatttcccgttcactcactggctgggcttctggcaccacttgctgtccattcccattcacaccattgttaagattaagctggttatgttattgttctgatggttttgttgttattttgttgattgttttccattgttaaattagataagtaagctaaatcaagatttttcattttgagcaccaaacatcgcatttgcattgccaaccgcagagttaatctgtaataaaaaatttttccattctctcacccctccccctttttgaattaaaaagcccctaagaaattgtcataatatttttcattcttttttttttaaatattcttttgatttttggcatattcatttctgctcattccatgccgatggacgacgtaacaacgcaaaaagtggtggcgaaaccgaggcgattgaaaaggtaaattatacggtgacccaatgcaacctctgccttgcaccctcccccttgcccatcccaatgtttccatttttattgtcaccatttctctttaattacccccattaacactttgccatgatgcccccccctctgctgtttagatttgccgttcctttgatgttctccgctcccgcgtccgttcgcttggccttcttcgcgcggacgacgcctttttcgtgctcaaatttgtccaatgcgttgctctgattgcgttcgccgtgttcctccagtcgcgcgactttttccttgcctccgccttttgcatgggcatcgcctggcaacagctcgggtggatgatccacgaagtgggcccatgggatggcacggcacggggcgcgggcggggggagaggagggcatcccccgggggaaggatctgatgacttaatttaccacggagacggacagtcccgagttttctatcccggctggcaccctcacgagggccatccccagggagaagttcgtggctttaccacggggacagtccctacatttgaggcccctcctccaggccccaaatatccattttaaacagttttgtttgcatttggccaactcttagcaatatttaaacccaagtgccatactaatcatagcaaaactgagggggttgggtggttttgtcctgccatttgcatttgtgacggtgtccgccggtcccttttcagtacggtcatcagcagcactttggctcctggtggtggaacgacgtttgtggctatgtgtgcggcaatttgatgcagggcttttcgctcggcggatggaaagtgagtcggaaggagaaacatttttctgacttttagatttattgcgactccgaaaatacaatttcctgaaaaaagctacaagacccaccctctccttcccaagaagaccacatgtgatccccaatcggcgtctcgcgtaatatagtattttacaacgatactatatgattaagcaaggcgcaacgaggtcaaaatgttgatggtttgtgtcacactgttctttctctgctacacgccgatggtcgtttactttttgtgggcgtaagcaaacgcaaaattcacaaatacgccaattaagcatctgcatcggatatcgctactccacccctccctctctttttctcttactcatcctatccttcctttcctcccttcactctctctctcttgccccctctctctc

SEQ ID NO: 51830 - DNA, 598 bp, Heterodera glycines
atgattggactgacaattgtgagttttttggtgttttatttaatttattgggaaatcttgccaatcatgagcatggtttttgatgaaaattctttaaagcatttttttggcattgtgcaaaggtttcttattttcaacctcgagacctttggtaatactgacccaaactctctcgggttaaattcccggttttgtgaactttctaaagctcctgaaaacaatttttcctatatatattccaatctgacggattaatgctaggagaaaatgccattttcattaaattcatttgaatttaaccataaatcttttggcattaaaaaataaatttacaaattaattttagtttaaatatttcttcattgtttcagcaggaccccgtggtgattgcaggtgtgatcatttccattggcttcagtgtggacattccggcacacatctcagcattctatgggcatattatttaaatgtttaaaatgaatagcatattaattggttgttaccaatattgttcaatggatctctcttatttaaaatgaataatatcttattattgttgttatcaattttgtccgaatctcatttttgtttaaataaa

SEQ ID NO: 51831 - DNA, 164 bp, Heterodera glycines
atgactcaaatgcttcgaaagcacgcgggaagtaaatgctgctttctctcgggtaagcatatggtctgtaaaaataatttattgcttttaaattaaaaagaaaaatttattttttaaataaaaattttttaattcaaaatttaaatgaattttcagaaatttaa

SEQ ID NO: 51832 - DNA, 1215 bp, Heterodera glycines
atgaactccttactgaactcgctttccgaggttggaaatttaaaaaataaattttttttgtaaatttttgtaaaattcaaattttcaaggttttggaagacactggtcctgcaattctgatctcagcacttaccaacatcacgtccgacttggtcggcatgtggacaggatcgcccgaaatcactttactctgcattggaaacatcgcatcggtgcgtttaaatattgaaaaattaatatgcattttatttaaaaatagcgaaaatattatatttaaatatggaatttaaaaattgaaaaaataatcggtcattcattatttttaattgtttcaaaattcctttcatattttttttattatcaatttaatttttttcacccccatttaagatttcgtttgatttcttctaccaaattaccctgttcactgccggtaattaattaattaaatttaaaaattttattgcctataattcattattaaatttaaaaagcaattaattaattaattaaaaatcctaattgtttttaagtgctgatcatttgcgcacgattggaattcaaggcagaattgaaaagcatcgagcagaaccacaacagcaattcgaccagcgcaaccggcacaatttcatcgaccgattcaaattcggatgagcacaatgacacgagttcacgcgcgaaattcacttccaattttgaacggatcgccaacgcatacatcaaatttgtttcgaacatttttgcctccattggcattgtcatcgtttcggcagtgtttttcgtcatttgctttagggtacattttaattaattttaatttggcacaattaagatttttttgaatttaggcggtgctcggattcgaaatcaatctgacaatggtcaaattgttcccgccagactcgcctctgctggaagtggacaactatcgtgaagacaaagtgaaaataccaatgatttttattttaattaatattttaattagaaatttataaaaaattaagtaattagttatttaatttctttttatttaagttgatgcccttctacacaatggcacaaatttttgtgaacaacccaggcgatttgtcaaatgcgaccagaagacacaagcttcaccagttcatcgacgaaatggagcatctgtaaaaaaattatacaataatattaaattataaattaaattcattaattgataaatttttaaataataaa

SEQ ID NO: 51833 - DNA, 387 bp, Heterodera glycines
atgtttttaacacaaaataaatattccaatgagcaaaaatcacaaaagctgaagcaatattttgaaatcaaggaactaaaaccaacaattagtgatggaataatagccgagaaattgggaatcggattttcaactataaaaaatgggttttggaacattgatttttgtgaagaagtttatgctattcgaaatgtgttcgttaatgttaaaattaatttttgttttattttgttttttttttgtgaccaaatggcaaatatttaagtggggttacaaagcctaaaattattataaatatgatttaattaatttatttatcaaatttcatgctgctcgaggtgttgatgcattaattaaatatcacagaaggtacgaaaaatggaaaaa

SEQ ID NO: 51834 - DNA, 1307 bp, Heterodera glycines
atggccatccatcccggcgacccgtccatcaagcaggacttggcctatttggaggtgcagcacacgcccatttcgccgctggacacttttctcgacgtcgttcggtgggccaatgccatctctcccatgcctttttggcacttttccgacactcttttcttacaattagcaatatgttccccgaaaatgtcgtccaagcgaccctccaaagagcacagacaaaatattttgccccgagaagaaacgcacagcaaaaaacacaccaaaagcatgaaaaaggtgattaaaggagaggaacggaacagagcaatttccattttggcattgactttatcgttttttaaagtgttcgataataatttggactccaatcggtcgataattacttaccgaaaaaagatcgagagtgtgaatggcattaatatcctcggtgagtgtcccccccccctttccgttcggcacccccccccccccctcttttggcatcatcgttttctgcaccggctttggcattgtcatttctcaattgggccaacgagcgcacatcatcatcgagtttttcatcattctcgaggcggtcatcatgcaattggtcggtgccttcatgtggtcagttagcactcaaatcacagtgaaaatgccaattcgatgcattttgcattagtcggtttctctccagccccaatcgcttttcaggctgacccctctgggcattgtgtcgctaattgcgggcaatttgctcgagttggacgacctcagtgacaccgcagcagtccttctcctttacgtagtcactgtgctgacggcatttacagcccacaccatggtcacaatgccactgctttatttcgtgttcactcgtcgcaatccgtttaaagtgggccaatgaacggcgggggggggggaggagggggtactcacgcggcatttggcttgggcactttttggacacttttacggcataaattttgtttaatttaatcaactctcatttttcaagtgaaactaaggtcgtgcattgtgctgcttttgcaactcccttacaggtcgtccacggcatgctccaagctttggtgaccgccttcggcactgcctccggcggtgccgctttgcccgtgtccatgcgctgtatggaggagcatttgggcgtggaccggcgcatcactcgctttgtgcttccgctcggctccaccataaatatggacggaaatgcgttgtacgaagcagtggccgtgattttcatagctcagctgaacaacgtgacactgacactgaccgaagtgatcacagtgaggcgagtaaagtga

SEQ ID NO: 51835 - DNA, 156 bp, Heterodera glycines
atgcacacctgtgctagcagcttttccgagcaaaagcgccacaaaaaaagtgggtttatatccaaaaacaattttgttatttttttggtttttaggtgatcaaacgataaaagaagtatcgcgaagccgacgcacggattctctgactcgtccacc

SEQ ID NO: 51836 - DNA, 104 bp, Heterodera glycines
ttcttaactttttaattttttttatttcttgcggctagtatcttctacaataatttgtcagcttggtcggatgtgcgtcaaacggaaaaaataattaaaatttt

SEQ ID NO: 51837 - DNA, 551 bp, Heterodera glycines
atgatgagcgcttcatttgctgaaattggcgaaaatgccggcaaactttggtccatcccacagagatttgagaaaaaagtgagaaaaagtaattgaattgggggtggattatcatcagaaaggcgtggggataaacaaacatcaaacggcgcgggagaggctttggccgttttgtatgcagtgactgccgacactgaggggaaaccttttggacttttggcatttcccttccgtgccattcccttccccacccgaccgacaccatttttcgatctttcatcattgggaggatggaaaaacaccatcccaaaatggcaaaataacaattaaaaatttgtaaggacgtactaatcagagttacttttgacatgatatatcaaggacattaataaaactgagcatttaaaaatttattatttcattaatatccatttttaaattattctatccctattttttcagtttttagggaatcatttggaaattaacttatttatgctaattacagaaccaattggcatttctgttcgctttttgtcttgcgcatagca

SEQ ID NO: 51838 - DNA, 820 bp, Heterodera glycines
aaacaaaaaaaatcgattttttcaagtgtccgtttggggtactcaaacaattatggggagcaaaaatccaacgcagaattaaagtacaggctatagggaagctattccggaaggattcggtctccccataaatctgggcgcatcggttcggggggactgccccgaaaacaaaaaaatcgattttttcaagtgtccgtttggggtactcaaacaattatggggagcaaaaatccaacgcagaattaaagtacaggctatagggaagctattccggaaggattcggtctccccataaatctgggcgcatcggttcggggggactgccccgaaaacaaaaaaatcgattttttcaagtgtccgtttggggtactcaaacaattatggggagcaaaaatccaacgcagaattaaagtacaggctatagtgaagctattccggaaggattcggtctccccataaatctgggcgcatcggttcagggggactgccccgaaaacccaaaaaaaaattttttggataaaaattatttaaatgaactgactagataatatttaaaataggttatttctcttcctttcagtggcggtcaaagtttggtgcgcttctgatcagtttctgcttaaaaagttaagcctaaactttttggcctgtttaaaaaggaattaaaaatttttaaaaattttattcatctccctttttgatagaaaaagcatcagagtgcctaaactaacatgtaaataaaatttggtgcgtttcagaaccctttctgaaaaaatatttaagaattaattttgcaaaaaataaataaaaacgaaagact

SEQ ID NO: 51839 - DNA, 370 bp, Heterodera glycines
taattaaatccattccttcgggggaccgtgccgggtgccgcggggtaagcagtgctggttcgtttcatcacggcaccgaaccttttggctagtcagcaatcgttgcttaacttgccagatcggacgggtgcgcatgattccactgttccaagcaccccacccaaagcaaaacgatataaccaaaatataaagaaaaattttttaaaaaattttttctccatcttcctttttgatactaaagcatcagagtgctaaaattaagttgtaaataaaatttggtgcgctttagagcactttctgaaaaaaatatttatgaaaccaaaaaatcgattttttcaagtgtccggttggggtactcaaacatttatgg

SEQ ID NO: 51840 - DNA, 147 bp, Heterodera glycines
atgctaccggaatggaaaatttcaacgcaaataattgcaacctacaacggtaatggaaacaatgccacaatctattcaagtgaatctaagtatttttttacattcaaataaataaattttaaatttctagctcggaagtaaaataaa

SEQ ID NO: 51841 - DNA, 723 bp, Heterodera glycines
caaataaatgcagcaccgccgccaaatgtcacagcactgcccgcaaatgccaagtcgtccatccggcgtccttgttcaaagcgggcaccaaaggccacttcatcaactcgccggtccagcacgcgccaggtcaacctggctgaatgccgcgtggtcgtcaaaatgccaaaactggtggctttaactttttcgaaaatcatatttttaaattataaataattattaaattgttgttctataatttggtcttttttcaagcccaaacgaaattcgtctgaggcggaggaggaggatgtggagattggcaactcggacgtactgcgaccgcgaggggaacgcagcacggaaatgccagcacattgtcaaccgaatgggtggtcaataggtgggcagatagatgattgtcaattcggggaaggggaggctggtaattaaaggtctggtgatggatgggaaattagccgcaaaatttttcgtttttccttatattttcataaattttttctctcttattcacaggtcgatcagtcggaactgacaatctcaccgctcattcactcatcgtctgttttgcgcgagtcccattccaacttcacgtccaccagaaatgcggtccgttcgggagccaaattgatctccaaatatggaggacgcgagacgactgacaaagtgggttttggggaccaaatgaaattttctaagggggcccagccatgtaaatag

SEQ ID NO: 51842 - DNA, 669 bp, Heterodera glycines
  unsure (1)..(669): unsure at all n locations
atgtgtcaattgttggtgttgctggtgctgatcctcctcgacatgttgctgctgctcctcctcctcctcgacatgttgctgctcctcctcatcaacaatggctgcgccgtcgacgacaacctccacgtccggtgatgggacccgggggaaaacctggtcctaaatcaaaaatttgactgttgacatgtcatgactcatcattaccaagggcacctttctttccccaatcaacncaaacaaagcaaaatcctctgcgtgcacgtccacagaagcgatgacgctaaattttttttgtgtattacttgttcatttatcgccaatttccccacattttgcgggccctctcgatgtcgatgacaccaccaacagctgcatgggtatacacagcttccatcagacgagcgagggtatacccaatctataaaatgcatttgcagttcttaaatccccgttctcgctaattttacgtggtcgagcagctcctcgtccttgaggaacgtctcatcgcatgattggtatccaattagataccaatacctcacagcaccgcagatgcgacgatggcgccttgtcgtacagggccaaagacgtcacttcatactcagttgtgccatcgtcgtcctccgcgatgtcggcagcattttgatccgggtgtcgatgttggcacta

SEQ ID NO: 51843 - DNA, 870 bp, Heterodera glycines
atgcagtggattaaatttaactgcacgctttgcccgatcggtctgcattgtttttatccgcgcaagtacgcaaagcctgtgctgtgtgcgcatcctagcgtcaacaacatcaccgactttttgagcaccgggcagcttgaggaagctgcaacgacagcaacaacaacaacaccattcccgacaactgcggatgtgtcggcggcggcagaatgcgcacctccgcccgcgcagctgaccgcatggatcgcggtgtgcacagcgctggtggcgcttttggtgattgcggaggtctgttaattttgggaatttatccgctaaacccctatttcaattaagcttgtgcgcgccggattcaaagtgcgcaaatttttgaaggaccgcgccttcaaaaaggggatgctgcgccgacatcgccagcgtgagtttctcgctattacatttttagcaaattgtaattaacaatttgtacaggaatgagcgccgcaaggcgcaaccgccagccggcaagcgcgccgactccgctgattttgccggctatgttagccggcgtttctctgcgcccgacgggcgtcaatttgactgtggaccgggtgggcaattttaattaaattaaaatctttatatattttaatttctcactcattaaaattacaatttaaatttaaaggcagcggggcagcgccgcgcggatggtgcaattgaggagggcgaagagcccgtgtacgatgaggtgccgcttgacagcgacatcgtggtcgagatgcgcgatggagaaaatggggaggaggaggaggaggatgacagtgatttttagtgattcggcaagcgatcactcaccatttaaccaatcgatcgatttttcactttaaa

SEQ ID NO: 51844 - DNA, 486 bp, Heterodera glycines
atgacaacagcaaaacatcaacggacaccggacgacgaggaggagaagaatttgaggcgtaaggcaaaggtggcgcttgacttagtggaagctggtctagcggcagacgcaatgatgcaggatgggacgcgttggaagaaagccaaaaccgcgatcaatgtgctggccaatttgcttttggcggaatcattaacagatgtctcgccaacttttgatcaacaacaacaacaacaacaacaacagctatcgtcaaaagaggaggagaagagggaggaatgcacaaacaacagcagtgctgcagcaacaactgaatctgctcccgatggtgatgtaatggacgatttcgtcaatagcattcaagcggcgacaagcaatatgcaatagcaaaaaaagcgcaaaactcgctctgccctatatataaaagttgatgattgctgctcaatttgtcataatttttgaaaatgttaaattctcaatcgttcagta

SEQ ID NO: 51845 - DNA, 100 bp, Heterodera glycines
gtatacatttgagacaattgggcaggacaagaaaagaatgaagttgatgcctcatgaaactcggaattggttatgttttgtcgaaaatatccttacataa

SEQ ID NO: 51846 - DNA, 1052 bp, Heterodera glycines
gaacgagctgttcacaccagtaaatgcccgcgttttgtgtggttcgagattctcgagtcctgctaaatttctaccctcgaccatctcaaatacttcgccaatatcgttcacctaatccgtacaacattagcttccttttttctgatcagccaaatcattcaattttacagtaatttaagagctaccgtagttttctatcactttttttaaacagagacaatatcccatttatcaaagtaaataaaaaaaatttgatccatttttcaaaaaaaatctttaataaaataatttgccaagaaaccaatgccaagattctgatggtaattctgattttggctcttaaatgactcattttgagagtttttggacccatatcattttggaaaatggtccatgccttaatcatggccacggaaacatggccctttttgccatgtccatgttcatggctatttctggcactcccttcagttgcccttagaatgcacaaatgccatcgacactgacgcgctgctggaccggatcaatcctgaaaaggacgtggacggactgaaccatgtgaacaccggcaaattggccaggggcgagctgggcgacggcatctcagtgccatgcactgcgttggcatgccttaagctggtgcaaaatgccacgggccaggaggactttgccaagggcaaacatgtggtggtggtgggccgctcgcgcatcgtcggcggtccaaccgcggcacttttcatgcggttagtacggcacggcacccgtgaattgataagcatgttatctgcttgcactgatcatccctctgctccgatcaaatccagagagttctgccatgatcggataaattcagtcacacttaattaccggttcccacactaattaatgtgccaattttgccccaggcatgatgccacggtgaccatttgccactcacgcaccgagcggctggcggagcattgccgcgaggcggacattctcattgttgcggtgggccagcgtgggatggtgcgcggtgattggattaagcccggcgcggtcgtcattgactg

SEQ ID NO: 51847 - DNA, 513 bp, Heterodera glycines
atggctattcactcctcgtccggacaatgtgccaaaggtgttcaaatgcttgttgaagttgtggtatggggaatttaactcgagcatggaagactttaaagcggtgatttcaatttgattttatttgatatttttacggtcttttgggttcgctggcaaaaatattttgttttggacgacattcaactcgtttttggcaaaagtgtcccatattttaggcatttgccaatgcttcatctcctgtcaatttcattgttgccgtttggatttcggcgccttttgcttttcccgcacaatttgatcagaccaacgaagtgactcgggaacaactgacgtttaaaagaattggaaaatctattcgccatttacttctgatccgttgtccaattgtgcgcgacacgaacaaatgggcgaaatgggaaaaggaagcgattgactggcaattcaatgatcaatggaacagaatcgacattcaaattaataatgagcgtaagatgggtcagtgaatgctta

SEQ ID NO: 51848 - DNA, 703 bp, Heterodera glycines
  unsure (1)..(703): unsure at all n locations
atggaaaagcttaaaaatttcactgttgtcgatttatgcaaagtattggctctaccagacaaagaattcgaagaattggcagtcacagatcacttttttccacatacatttctgattttttgtggcgtaagcaatttggaggaccggacattttttataatttgtggacccaaatcgcggaattgtacccaataatcacataaatcttcttttatttgttatttaaagcaattgcgacaataaaaaagaaaaaaaaaatttgaaaaaatttgacccaaaagggggacccaaactgtactagttccaaatattgattaaaaaaatgaaattatgagaagggctcgaaaaaatatggaaataaagtcgcaaaatatggaaataaaatatggaccaaaaatcgcgaaatatggacataaatttttccaaattgagagtttaaattctcaaaatttattcaaatttgttaaatgtaaagtaagtaatactttcaaaataatagaagaaaaatacacgataaggctaaattatttaatctntagcaaaaaacaatccgaaaattgaaattttaacttttttttttttgcttatttttgacataaaatttatcaatttttaagaaaatttaaatttattcactattgtcaagaaaattttgcgaaaaactgatttttgggaaaaataccaaaagtagacaaatacggaa

SEQ ID NO: 51849 - DNA, 415 bp, Heterodera glycines
acagtttggaattgtcagttctccgttggcgacttcgtttccttctccgatgcttttctcgtctgctgctgccactctcccggatcgcttgccgttacgcgctgaacccgtcgttcagtttgaagaaaattgacaaaggttttacgagaagaacattgacattttacaacataattctgatttctcagactcttcttttgcgttcgtcgttctttgtcgtcatgagaacacaatttatgctacgcaagtaaaactccgaaacaattttgaatattttcatttaaatgcaatcggattaagattgcaaatgtgctcgacgtgggcgaattgcgcaacaacaaagtgaagttcaaggagctgatcgtgttcgaggaaatgccccaggatttttgtgttctcattgaagtctgctatg

SEQ ID NO: 51850 - DNA, 89 bp, Heterodera glycines
ttaaataacaaataaaagaagatttatgtgattattgggtacaattccgcgatttgggtccacaaattataaaaaatgtccggtcctcc

SEQ ID NO: 51851 - DNA, 842 bp, Heterodera glycines
taattaaatccattccttcgggggaccgtgccgggtgccgcggggtaagcagtgctggttcgtttcatcacggcaccgaaccttttggctagtcagcaatcgttgcttaacttgccagatcggacgggtgcgcatgattccactgttccaagcaccccaccaaaagcaaaacgatataaccaaaatataaggaaaaattttttaaaaaattttttctccatcttcctttttgatactaaagcatcagagtgctaaaattaagttgtaaataaaattttggtgcgctttagagcactttctgaaaaaaaatatttatgaaacaaaaaaatcgatttttttcaagtgtccgtttggggtactcaaacatttatggggagcaaaatccaacgcagaattaaagtacaggctatagggcagcagagtgctaaaattaagttgtaaataaaatctgggcgcatcgctttagagcactgccctgaaaaaaatatttatgaaacaaaaaaatcgattttttcaagtgtccgtttggggtactcaaacatttatggggagcaaaaatccaacgcagaattaaagtacaggctatagggaagctattcccgaaggattcggtctccccataaatctgggcgcatcggttcggggggactgccccgaaaacaaaaaaatcgattttttcaagtgtccgtttggggtactcaaacaattatggggagcaaaaatccaacgcagaattaaagtacaggctatagggaagctattccggaaggattcggtctccccataaatctgggcgcatcggctcggggggactgccccgaaaacaaaaaaatcaaattttt

SEQ ID NO: 51852 - DNA, 787 bp, Heterodera glycines
atggacatttgggcggcgggaattacaatttttacaatggcatttttcacaacggagacaaacgcattggaagaacatcaaaaaattggtgaattgtttcgaagtgaaaaattgaattcggtggacggtggcttatcagattcactgatgcataaattaaagctgccaagagaaagtgcacagtccggctcaaaagattggtggcaacgatatttgagtactgtaacgaacattctgtcggtttggcaaaaaatgccagcgattgcctttctttcagcggtaagtccgagagtatctaaactttaacaaaaattctaacaaacaaaatgaaaaaattatcccggcaaaaaaataaaaaaccaaaattttatgaaaatttacagaatatgttaaatattgagccgaagaagcgaatgactgcccaagggatcgttgcctttttggatgggaaatgtaagccaacggattacccgaaaacccatttgaaaatggcactgtttggcgaagtatcggctgaaaaattgctcaaaatgataaattatgaaaatgagagatttatcaaaagggaatgggccactgctgagaaaagtgtacgccgctttttgaaagaattggagaaccgaaccgaattttgtgaccaataaatttgcaaattgtcctttgctcgtttttctttcagcagctttttgaagtgaatgcataaaaattcgtcttaatttgcaaaataattaccaaaatttccccaattgtgtctatcggcaccattggacccttccatggaaataaa

SEQ ID NO: 51853 - DNA, 1371 bp, Heterodera glycines
atgaatgctgcttcttctcttctgctaattgtgttccttttttatttccaatttgattgtgcccttttgtctttcgaatgccgcggtgttccgactgatcaaatggaaccatttcaatacccttcgacccaatggaggaggccaactgagagtactgcgcaaatcaaaatcttttttaaaaaattggcacacaatgtaattacttaaaaaattaatgatctttggtacttccgttatgcccccccccccccgacaaagtaaagcacttttctagggtattttaggcactgatcaagaacctggcgtcaaaactgcaaaaatctatgatttattatgatttagtcgagtgtgcggtgttttggccaaattaggagggtgcggcagaacagaaaagtgcttgatttttcatgataaaaatttaataattgaatttcgaagagttcgaatcgattttgaaaaaaattatgaccgaaatacaaacacaaagcaaataatttttaaaaattacaattagtttttttacagattttcatgggtttttccaccgatgcaaatcattatctgccaaaaaacaaatgcattgccatcaaaatttatgaagaagagtttaaaaaagaatatttgaatagcgtgaaaattttgaaaaagttagcagaaaatgattcgcagaatgaacactttgtccaattgatagactagtgattttataaataattctgattattatttaattcattttaattaaaattattgagaatttaagtggtaacattgatgaaacaaatctgatcattgatgataattcaaatttgaccgtttttgagcatggcgaaagggatttagatgaagaacttcaacgtggaaatttttcgtcaagagaacttaacagcatggttaagagtattataaattcattggttgcttttcacaagggtaatttaattaattcattaaacttgtttattaattaattatccacattttagttgggattcatttggatatcaagccaatgaatttaattgttttcgaaagaaacgatttttttggaaaagtaaaggaattaaaacttatcgattttgacggtaatttttatgatttgtattaatatttatttaaaaaaataataataaatcttcaatttttaatcgcaatattaaataattatactttttttaatttaattttttgtttatttacgccatttcattgtttgttttttgaagggtcagttttatattctgacgaacagagaaagatgattaaaattaatgaagattcaataggttgcactaaaacttatgctgcaccggagctgcttcaagtcaggattaaataattaattcaaattgagaaattgcattaattaaa

SEQ ID NO: 51854 - DNA, 122 bp, Heterodera glycines
atgggtgggtatatatatttttttttaatttcaggtttagggatgtattttcgtttttattgctcttttaagtttcagaaaatcgtgagaatagtctgcgatgtgataaattgataaaaata

SEQ ID NO: 51855 - DNA, 1599 bp, Heterodera glycines
atgcgcgccattctcttcctggccatggtttgcttggtgatggctgttattcttgagacaggtggccaaaattaattaaaaaattaaaaatattttattattttagccaactcaaaggcagtgaaaaataagaaaggtataaataaattgataataaatattaattggaatatgcttttaaaggagcagttgcaacgccagcaaaaggaaaagcggcgccgaaaggagcagcgaaaggaggtaaagcagaaaagagagagggactaattaatacaaattaattgattaatcaattaattaattaaggaattaaaaaagacgcaaaatcaaagggaaaaggaaaaaaggacgccaaaggcaaaaagggtaaggattttaatataaagcgaaatttaaaaagttaatttttgaattttagacaaaaaaactaagccagccaaagggaaaggagtgcctaaaaatggtaaataatattattataattaaaattgaataaatttagacaaaaatccccagcggcaaaagccaatgacaaaaagagcccaagtaaataattaattatatttaatattgtgccaaattgccaatttgaagtcaacccaatggcagcagtgaaagccgtgccaaaggcggcggagaatgctcagaagggaccgtcgagtgcggaagtggtggcggaggaaaacaacttggacactgaggcggtcgacgacttgggggcggaagagtcggactttgaccaattggcagaggacgaactgctcgaggacgacgccatggacggcgaggcggacgaatgggaaggcatgggggaggagacggagatggacagccaaatggcactctgatggccaactaattggacaaatggcaaacggaacaaaacgggacaaatgacacaaaacaatttttcataaaatttatagagaagataaaattctattaaatcattcatttctgtgcttcaaacttcgagaaatcattttaaatttttataaaaaataactcaccattaaattatcagacaaaaattattcacactgaactaattggaaaatatgcactgttaataggaccgtatttcaaaattattaatctaaattgagaggaaagttagttcctaaaaaatctgttttaatttgctttatttaaggaaaattttaacaaagaaaatttaagaatgtatctttttgataccatggtttagatcattttactaaaaactccgctaaacacacttaaattacctatttattagcaaatgtgaacaatgggaatcattgcaatggcaaagttcggcatttatttaatcatgttaatgtaaatgataaaagtattgggttaactcttaacattcacatttattcaaaaaacattaatccaatttcattaatattcattctcaattattttccattcgttcttttcgcggaatgattcatttcgatggaaaagcaaattttactttacagactgatgaattaatggaaagaaaacatattcatttattcgtttgcactgtccatttagcatttattactttattttggtttagttttggtggataggactaatttttaaaattatttttttagaata

SEQ ID NO: 51856 - DNA, 2271 bp, Heterodera glycines
atgaagcgcatttcgagactgatatgtcgcgttggatcagtgcacgcgttggggcacagaacaaacgcggcacgactcattcgcactcaaatttcagatcaccggaaaatgcgagaatgggtgggaattaaaaattttaaactattttgaaagcatttttcagctttctgatttgttatcccggcgctttggacccaagtgcaaattcggcatttggtatgagaccggaagtgcaattccaagtgccaaatcacccgaaagtgagcaattaaggattctcattaaattaaaaagacgcttaaaataacatgtccatggtgggccaaaaattaatcataaaaaaatttctcttaactccaaagtaaaaattgcttataaatttagagcaaattgggggcccaatgcttggcgcatcagaaaaagtgcaacaattcagacccagggaataattgcgatcgtagaaaagtttggcatggcatcagtttgaaaacgtcgaatgggagaattatgcttgaaatgtcaatcgcggcgaaaacgtaaaaaaatattgaaaaataaaaaacaattttaaattatatatatatttaagctacaatcttggcagctacaacaaagcagagatttttagcattcaattgggaaatccgaataatttaatgactaccgcaatacacccaaagggtaaaagtggcccaatttcatttattatgaattcttatttaatataaaaaaataaaacaaatttttcatttttgataattatttaaaattaaataaattaatcaatattttaaataaaaataaaagagtaaaaatgccaaatttaagtgggccaaatagtttttgcggtcgatgactctgtccgtgatgcttattttgctcgaaaaatcaaaaaggacgtcatgctgatcaattatgctggcctttggatgctcggcctggactttttgccgatgaacaaccgcgacactttgcaaatgcacgtctaccgcgactgcggctgcgaaatgcacgcatgggtggggaaaaaaggaatttaaaataggaaattgatattgtttaaagattgaaatcgctaatttgttataaaataaataattaactaaccttatttattaattatgccaattaacaaatttttgaaaacccgacagttttaattgcccaagaaagccgtttcgaatattaattttcaattttgtctaacggctggagctatcataaacatttttgataaaaaatgtgttaattttcatttaaaattatttttatttattcgttacgcctttcaaagtttgcccatccgtccgatgattcgccgctcaaacgcagtaggcaccccgacgtcagcgcggattgtcccgcaaaaattgtcgattcgttagccgaacattttgcattggaaaagccattgcaaatggacagatccatccgacttcgacaacgactgaacaaaaacccgaaaaagatgctgttttggtttggcaatcagcacaaaaagcatttactcgaaatgaccgtggaggagccgccgaacggattaatcgatatcaaatcaatgcaggcaaagacacgctaattaataattaattaatactaatgggggtggaaaaggacaaaatggcacagacactcacgaagaagggctgttggagtgccattgcaaaaacagtgccaataaaaaccttttaaattgttgccagaatttttgacatttaaaatatgaagccgaaaattatgcaaaattttaaacattcccaaaataattttctccattcgtataaattacggaagagattatttgccaataaaatttctaaattgctcttttaagctgtttaaatttcactttttaaatgaatttaatgcgaaattaaggacaataagaccaatgaagaatttgtggacaatgagatgagaaagttggccagagaaagaaaattcaaagcgatggatgacgaggatgaagaagaaaaaggaggaggagaagaaggagaagaaggaagcgggaagggaggaaaaggcaccaacaaagataaatacatcgaagtgcaattggtggcacgcaaatatttttacgaagtgaaagtgggcgaccgcaaagtgttcaattacttcccgaagagcgacgaatggtggaaaacgtggcaaatggaggacataacgcaagtggaggcaagtggccaagcggaagggcaaatttaggagggcaatgggcaatttgtgggggacaaatgcttttaaattcggcaggactttttttaaatgcca

SEQ ID NO: 51857 - DNA, 346 bp, Heterodera glycines
atggcttttgaagtgttccctttgctcagtgttggcgattccattctgatcgagggaaaactgaaagacaacgcaaccattttcaaaatcaatttgttccacgatgtgaacgagaaaaacccatacggtaagaccatactgtaaattacggcaaatatttatccaataattaaaattgggcaatgaaaaattcttcgttgttttttgcttttctttcccattttgcaataggtcatttgttaattaatatccgcttctcttcttctcagccagtgatttggttctgcaaattttgttcaacttcaccggggatggcacaattcaattgagctcattgattcaccag

SEQ ID NO: 51858 - DNA, 1071 bp, Heterodera glycines
  unsure (1)..(1071): unsure at all n locations
atgcattttcctaaacacttcattttcttggcaattctttttcttctgttgggaactgctcgaagtaaatttattgaaacactaacgcaaattaagttaatattttttaacaggtgctttggtggagaatgactgccccatttgcgataatgaaatgaaaaaagaaaatcaaagaattgtttcattgtcatgtgaagtaattttttattctactagagcatatcttgtaagtgagccgcttgggatacaaaaacccaagaaattatatcaagtcaaaatttataaaaaatattaacctgataggctcgcaaagtttaggccatgtttgaattggcatacccattttaatttaatatgcaaatatttcagcatgaatttcatcgtaactgcatgaaaaaatggtaatataatttgtttaataatagggctcaattgctacactaaccagtgtgcaacagcaacctcagaatgcttcatggtggactcaccaacaccaaactaatatgcaatccgggcaatggccgaatccatggaataatgtaaatcaacagccgtggagggcatattaccaacagcaaatgccaaacccaccatcgggggcacaaacacacccacaaaatgtgcaacatgattcacgaacaaatccagagcatgttcggatgccatggaccaatttgcagcaacaaccagcgcatgcacaacactggaatgccaatgagcatcaacaagcgccaaatgcaccatggtggtcacattatacatggcaacatgcaggccatccacagatgccatgggcatatgcaccacagcaaagcacacatacaccttggtggacaaaccctgcgcatatgtggtggcaacaagatgccaatgcaagccaagtcaatgcccacaatattcatgtggatggtaacgcaactgttgttcaagaaggaaatgatctgatcataaatgggcaacggcaccgaaatgcagccgcgaggggtgtcagtataagcactggcggacgtgttaatcatgacggtgttcaaancagggagacatcttttcagtctaaattctgggcagaat

SEQ ID NO: 51859 - DNA, 659 bp, Heterodera glycines
atggtccacaaacccttttctctttgcctttcagtctttttcatttcggcgttcttttttgtgtattcagctgatgaatcgattaaaccaccgacaagaagtcagagacaaaacaaataaaattagggattaaactcattaattacctattgtaattaattaataatctatacctaactctttaagatgttctaatcacagcggaagaagagaaacaaagagatgttgaaggtttcttggcaatcaaagccatccatgccgttctcgacgatgacaattcgggctcaattgatcggtttgaatctgccgatgtatgtgctagtgaaatgacacgaacgcaccaataatttaaatgtatgaataagcctccctttagttcttgaaagaagatctcaaatttggcggttcggacaaaataaggcgagaaaatgcatttcacagtaacgacgaggcgataactgtggacgatttgtgggagaattggttccaatccgaggaacgcggatggaccaacaaacaagtggtcgaatggttgaccaaccaagtcaaactgccgcaatatgccaacggttttttgagtgctgaagtgactggcctggaccttccgaagtaatcactggaattctttactttaatttcatttaatttaatttaataaa

SEQ ID NO: 51860 - DNA, 293 bp, Heterodera glycines
atggggaaaaattgcgggaacgacgagaaatcgaagggggagcaattcaacggaagaatgatggtccacccgagaacgaatcaaggtaaaatggcatggtggcaatcaatttctgacgaagcaatgctaagggaccatttggaacacataattggccaactcgtcaatgtatcaaagcctctttcaccggttcgctttgtgtccgaaaaggcgacgacttcgtccgccgaagcggacgtatccaatggcactcactcggaagaacagcccgaatgttctgtcgcacgacttaa

SEQ ID NO: 51861 - DNA, 237 bp, Heterodera glycines
atgcatggattattcattctcggccgccttgtccccgtgctggtactgcttgcactgcttggtgggctcttgcacaccggtgcgcaggagtccatttccacgcgctcaacacgtgcggagggcacactgatgtgcggaaagttgccggcctcaaaggtgtacgtgcggctgttcaagaccaactccgatggtcagcaagcagcagaatgggcatttttaattgcaattaaaatttaa

SEQ ID NO: 51862 - DNA, 601 bp, Heterodera glycines
gaatttggttacatttagggcccgacccggacgacactttggacgaaaagtttgtggacgctgccggtgcatttaagtgagtaattaatgcgccgctatttggaataccgtagtatttgtctcaaactacaaaattcccccacccatacgggagccatactgtaggaccaatagttacagtacccctatgggtgaaaaaaaatgcatttttttgcagactcaatgggtacacacgggaactcactgacattgatccggtgctgtacgtgtggacagactgtaacgacgggcatacggtagggtgcggaaagtacaaaagaaaactgtcgttcttaaaaagccgtatttttcggtaattaatttccccggattgtaccgtatacagattagtgatttgctacagcattctaccgtaatctttctttaattttagccatgccatcggaaaatcaaatttttgatcccaaaaacaaaggtattgttttaggaaattttaattgattattctgatcactatgtaatcagatcattggtgaagacccgaaagccaatgattggcttgacatcggagtggtcaatctccagtcagggagtgaagtaa

SEQ ID NO: 51863 - DNA, 244 bp, Heterodera glycines
atgggtaggtgatttttgttgaatttttcatttatcgcccgctttgatggctttttataatggctcagcaccacatttgtggccagttttgagaaaaaaaaagtttatttatgacatgcttacattttatccctttcttacagtcatttgtgacaaaatgatttgcattttgcccgtcctgctgttcttctgccaggcgttggacggccaacaaacgcgcaaaattcatgcattggatgggaag

SEQ ID NO: 51864 - DNA, 2364 bp, Heterodera glycines
  unsure (1)..(2364): unsure at all n locations
atggacaatttttcgaattggatcatttcaaatgctacaaaattctactgtttttccattattttgtccgttccttcgatccttttgtacattggcgaaatgtttgcaattgtgaaaaacaaagaaactcgcgcaaattccttttaccgtttgttctgtgtgcgtggcatttccgtaagtgcccatatctactaattagcatttttaaatcgtttaaataaatcaacaggacattctaatgatggccgcctcctgctacggtaatcgactaccgtctctgctcggcccctcacttttgcccatttaccgcgcgttgcccaattgggcgttggcactgttctatttcttgaccaccttcacctaccaagtgacgaacatcgctacccttttcatgcttttaaatcgcttcacggcaattgcttttccgctgagtcataaaaaggcaatttttaatgagccaaaactaattaaaaattcaaaagtctataactccattttgaaatattaaaaataaccagggttgccagattaaaattttcaaaagcctcatttggcaggcaaaaaagcctcatttttacaaaaatttttcaaattgttcatttgttaaccgatttgtccacaaaaatggctaaattgcgatttgagccgatttaagaagatgaatcataaaatttaacagattctgacgattttccccaaaagcctcaaaaatcctcaaaagttctcaaaaaggcacaaaaatcctaattgacctatcaaaaaaccacaaactgaggataaaacctcagtctgggagccctgaaaataaccgatcatttttcagttttggaataaattgttttggcttctgataatggtcatgttggccattccgtctttgacttgttatccaattatgcaaatgcatgcaactttgtcggagaatgctaacggcacttttctaattatggaaccggtaattaataaatagggcgcggttttttagtggcgaaaaagtccaaatatggacttaaatagggaaaaaaattttgaatacatttttccaaaataaatattcaagaatcaaaatttgtcaaaaaagaaaataaattacaaaaattttggtcaagaaaaaaacatatttagtggaaaattttttgaacaagtcgcctgtaatcgcgtcaaaaaaatgtatatttttcagtgcatttttgttagaaaatttgtgaattttatgtgaaaaaatttaaaaatcgcgaaataagggcgaaaataggggcgaaacgcccaaatagggataaaaacttattttaggggcgaacactcaaaataggtattttagtggcaaagctccaaaataggaatttctagggtcggatatgggcgttaaaacgaagaatttccgaacaaaaaatgtgttttcgtgcatttctcgtcgagttaaagccgcagaaaaaataagtaaaaacctaagaatcctcgccctatttatcagtacccccggttttctgttatacccgttttggaccctttttcgttttttggctgaaggaaaagcttaaattttattttttgtaggctcacagcattttttcctataaaaaccaaacgccttcgcacgcagcgcaattccaacgatacacaccgctgaagaagatttcaacgctctacaaaatcagcacttcagttggtgattatgtgaaaantatattgggggtgttgtataagttctgtcacccttcttatgctatgctaatcggaattttttgcaccgttaaccgcaagtgacagccgatcaatttctgtcctataggaaagagcagaaatttttgcttcggttaaaagccatttttcgttcttccccattcaaattgattttttaaaattatcccaatggagcaccctaaatcccaaatccgatcacttttattgtacgggtcaaaactttgctttgatcagttggaaatttattaaaagcagtttttgtggccaaatcatgtccggagaatccaaatctggcctcagatttgatctctgaattttctctggcattgtactgctccatgtcgttgacaagaagttgaagcagtacagggtcatagaacagcaactgactaaatctgaggcgatattcggattctccgggtttggtttgcccatgaaaacatcaatttcattttattaggtcctttcagaacaatgttgtacaaagtgggtgctgaatcttggcacttttgagcacccattttcagacaggacaatttaaaaaaataacccgtcggttttacacttcgttcatcattttatcattcatattttattctcatctccccctcccaataagccaaataggaaggggaaattcgatgaaatggaatgaataaa

SEQ ID NO: 51865 - DNA, 483 bp, Heterodera glycines
atgtttggcctcaaattcaaattaggatgtgcttatttcacttatctcaatcggtattacgttatgtgcaggtaaaatgtctgtttttactcctattattttacttcagagacatggtcttatccgtgaatatgaagctaatgaagaacttagaacttaaattaaattattcaacagacggagtaattaattgaaaattattctttaaatatttaattgatgggcaacttgtgcagcagggatgttgcaaaagggaaaataaaatacaagacacgagatacgagaaaaaattctattttgttaagagattttgtccataaaatgattgcttttctggttttggattaaattttaaaaattttagggttttgggtcaggttgtttcggaaatcttgtaaaaatttattaaaagatttggcataaaattggattttttggctatatttaaaaaatgaaaatattttattgtttttatttttgtta

SEQ ID NO: 51866 - DNA, 924 bp, Heterodera glycines
atgccgacggacaaacaaattgacgacgggacggcacttaagacaatgcacgaacaaattgtttggaagttgctgaacaacaaagcattcagggacaagctgaaaagtgcgtatggcacaaagagtaccctggaaaatccaaaaagtcggagtttgggattaggatccaaataaatggagcgcgagatccgagattaagaatggaacggggtacgggactcaaaaatggctcagcccctggctaaactcctgttatcggtttgtgcccgccaaagaactgccgtgaacccggcccaggacaggaattaaaaaattattttcactaaaacagaaatacatattttaacggatttaaagcgaaggaaatcaactatttattttatcgttttatttattattagcacaaaatttcgatctgatctcattaaccagccttttttaatttcttaatgatttaaattttaattaaaaaaaatttcatcgaattcataagattaaaacgaatgtattaccaaaaacacataaataatataatgaaattgctaaagtttgtgctcatgtaactttagcatttttcctaaaatttaagaaattgaaataaacaaaaaacgaatgtccgatttaattggcgatggcactgaaattggcaataatttgttaagtgaaagtcacaaaaggaaatttgagccgaaagggaaggaaataattaaaatgggaaaccaaaaagaaacgcaaaaaggtaataattgaattaattaaattatttaaaaaatttatttatttttcatttgttagcagcaaaaggaaacggacagaaacagaacgaaacaccaaaaagtgacgaacaaagtaaaaaaaaaagctaaacgattattgaattattaatagggctgccaaaaatatgtacaaaaagcggtcacataa

SEQ ID NO: 51867 - DNA, 495 bp, Heterodera glycines
atggcacaaaaactaaaaatggcaaaataccgtatgcaacatacagtaagtaacccaatgtttgataacaacaattaaattataaattcatattattaattttaagtcttgttaaattactatttaataattagggctgccaattttatgtaaatacatattttttcctgaattctacatggtctaaattcggaaaaacattttgtattccgaagtttttatacatttacatatttagggattttcaatattttacatcttttggactttttatacatttttgaggattttttatgaaaattttatgaaatgcgccaaaaaacctaaatttcgctattttttatatatttacatttttttgtacatatttgggaatttttaagaatatatagaaatttctcgtgaaatagctaacatttttttttgaaaatatatccctaaaataacggatttttcaaaaaaaaagaaatatccaataattttaaaaataataaa

SEQ ID NO: 51868 - DNA, 868 bp, Heterodera glycines
  unsure (1)..(868): unsure at all n locations
atgaaaattaatgacggtaagcagataactaaatattcaaattaaaattatactttttttatcggacgtgaaaaatgaaatttttntgggaacgttttatataactttttcacattnacaatagccttnttcaaaaaaatttttcctttgaattttcatataaaaattttnntaagagtttttattatttttttttaaattcgtcggctaaattatgtccggcgaaatttcggcgacgaaatcacatgtaaaaattcaaattgaatgatcactctttatttttttgacagttcaatccagaaaacgcggtccgcaagtgtctcactaagattttaaatattgttccttcgaaattccatcacttttaaattatagatgtggcaaaagcaaaccgaaccctgaacaaccatacaaatgccttagttgtggaaaatgccttttcctgacaaaaaatgtttccgaattgaaacaacaaaaaatgtcaaaaattcgagcggaatttgaaccgatgatcaaagaaaatgaattaaaaatgaaaaattcggaaataatcagtgatataaagggtaaaagcaaattattgtcataaaaaggagagaaaaaagggaaaacgaagtgcaagaaaaaaaatcatggttttactttatttttattttttatttttgggttttcgataaaaaatttatgcataaacattcaaagtaattgcacaaatgttggacaacaaaatttcaaggattttctgaaactataaaaaatcaagacacttttaaagatttcttattttactaccaaaatttggttaaccgaataattataatgaaaaaaattacaaatttcctatcatcactcgggaggggtaaataaa

SEQ ID NO: 51869 - DNA, 858 bp, Heterodera glycines
atggctcattgtcatgactatgagtcaaaacttggacaagcgaaagttcgctggggtatttagtttagtaaaaagtgccaaatgggaggggaagggggcaatatgcaaatggattccgtgagaagggcgattgtatatttaaaaggtgtaaaatgagaaagtgacgacgccttatactttgaaaggtcaaaattgcttttcgtgattatttgtgctttttctcacaaattcctttaatttcatttttacagtttcttccaaatttcctgttgtaaatattttttaaattaacaaatatttttagtagagaccgagatttccaaaagtgccggaccggaccggtctgatattttcagaaacaaccggtttccaggcccggcctctcaaaaaccggtcaaaccggattttcaaattgccgggcccggaaccggtttccggtttggtaaaatttaaattctcacatgtatttcaaccccaaaatcaacaaaaatcgtgccaagtgttaatttcgactctttttaacttcaggcgtcaaaatgcctcttcaattataaattttaaagattttcaaaaaaaaatttgaattttttaaagaattaaattttttgaaaattttttgcgataattcatcacaaattgaaaaatcgttaaaaaattttcttatatctttggaaatttttttatgattttttaaaatttctgtttgaaattaaaaaaaaaatttcgaggtaaatgacagaggagataaatgaagtggtgcctatcagatagcaacaccgggagtttaatttggatgcctcaagaaaaagttatggtgcactaaagtttcaaaaaaattttatggttgtgtgaaataaa

SEQ ID NO: 51870 - DNA, 850 bp, Heterodera glycines
atgccgtgccagtgtaactcatcgaaattgcgtgctgttcacgtccgagtatggcaacaccggatgtacgaaagtggacctctgcaattcattacgcatgacgctgttttgatcacttggcattgccgggcgtgcaatggccgtttctttcagacgtttgagttctccacgtccggcaaatcagatcggtgagttttgatttatttttagaaaaaataaacaagccaaatatttttttagttggggccgttatcgcctttaccaatcaaaggaaagacgcttcgacatcaacgtgacttaccaggacatacgccaggtgtacgatcagatgccgggcgcgggaatgtaccacgtcatatacagaaactgcaaacattgggcggacaaatttgttccccttagtgagttcattcaaatataattaaattattaattaatataaataaatcatttgtgaattaattcagttaggtccaaatctcggatcgatgatgttacttgtgcgtgtgacaactggcacttcagagcaactaagattgaaggtaagcattaatttacaaataaggaaaattgggtttttttaaaaagttaaaattttatgcaaaatttgcagtgtacatgaatggcgaagagtgggttatattggtgcgatttatttgcgaaaattgccgacggtttccgaacatgatgttcagcgtactttttggagaatttggaaaagtcatgaggtaggtgttttccgaatttaggtaccaaaccccctccttacccctccttgttgtcatggcaactcgtacaagactcgtacccagggcaactcgtacaaaaaaaaaattctaagaattttcaa

SEQ ID NO: 51871 - DNA, 860 bp, Heterodera glycines
atggctcattgtcatgactatgagtcaaaacttggacaagcgaaagttcgctggggtatttagtttagtaaaaagtgccaaatgggaggggaagggggcaatatgcaaatggattccgtgagaagggcgattgtatatttaaaaggtgtaaaatgagaaagtgacgacgccttatactttgaaaggtcaaaattgcttttcgtgattatttgtgctttttctcccaaattcctttaatttcatttttacagtttcttccaaatttcctgttgtaaatattttttaaattaacaaatatttttagtagagaccgagatttccaaaagtgccggaccggaccggtctgatattttcagaaacaaccggtttccaggcccggcctctcaaaaaccggtcaaaccggattttcaaattgccgggcccggaaccggtttccggtttggtaaaaatttaaattctcacatgtatttcaacgccaaaatcaacaaaaatcgcgccaagtgttaatttcgactctttttaacttcaggcgtcaaaatgcctcttcaattataaattttaaagattttcaaaaaaaaaatttgaattttttaaagaattaaattttttgaaaattttttgcgataattcatcacaaattgaaaaatcgttaaaaaattttcttatatctttggaaatttttttatgattttttaaaatttctgtttgaaattaaaaaaaaaatttcgaggtaaatgacagaggagataaatgaagtggtgcctatcagatagcaacaccgggagtttaatttggatgcctcaagaaaaagttatggtgcactaaagtttcaaaaaaattttatggttgtgtgaaataaa

SEQ ID NO: 51872 - DNA, 234 bp, Heterodera glycines
atggccaaaccgactgtgaatattccgtcgaatgctgggcccatcacttttgtgcctccgattcgctactacaataacagaccacttcaattatcgattgatttccaccccacacctgttggcttcttttggggcgagagagtgcactctctaacctctacagcgacgagagagtcaccgtctaacttctctcgccagcagggcccgtgcctatgggctgcttggtcccggtga

SEQ ID NO: 51873 - DNA, 1456 bp, Heterodera glycines
atgagcgaacgatttttagcagacaccaaaatgtataagcaaatggtgagcgagaagaaggtgagtagcagaaaataataaatgaacgaataactcaattttcattaagttttggaccgaaaattcaaatttgcatttatttttgtacatatgaacagtttatatattcaatttttctccgtagaataatatatgaaaataaaaacaaaattatctgaactttttaaaaaacccgcaaataaaatattccccgccatgaaaaacttatgcttaaatattatgcttttgttttagaatgttccgcttctgtgggagaatggacccgaggacgtcactctgctgagtgttctcgcaatttgtaccgaagaaatattcgcacaaattcggcgaattgaaaaaatgcaaaatttctccgcaaaaaataaggcgacagaaaaattttctgaagaatttcttttagaatttacgctgtgtttgaacagaaatttaaaaaaagtaaaaaagaacaattttttggggaaattacatttaaagaaaattagcaaaataattaacgaccaatcggaagatgaagaaaaacataaaaaaatgttctccaaaaacggtttttgttgtaattaatttttaaaaatattacaaataattctttagaaaaattactgaaaaattttttaaacggcgaagaaattgcaaaaattaggaaaatgttagcaccggtaatttattattttaaaaaatagaaaaaagtatttcaatttaagatcgaatatttaacagcaaatgaacaattgtctgcttcttctgattcatccgatggagaagaaatttttacagatgcaaaagaaaatttcaaaaagaaaaatgaaaaagagacaaaaattattaataaaattgaagaaaaaacggaaaaaaattcagaaaatttaaatgaaaaggaaaaagaaagttcaaatttaaatgaagaaaattccaaaaaagaaaagaaaaaggaaaaggaaaaagcgaaatggaagaaaaaagaagaggaaaaaggcaaaaagaaaggaaaaatattatcaaaaagtgaaaaattcaaaaactcaaaagcatcagaagaaacagagacaaaagaaaaaggaaattcggaagaattaaaaatgaaaaatgaaaaagaaataaaaaatggcaaaaataatcgaaaatgggaaagaaataacgaaagaacggtggaaaaacattcagcagaacaaaaatgggaaatgacagcagagacaagtggtaaatggaattggatttaaaatataaaaaattaaaacatgaatatttattattagggatgccacctttaataatttttataaaagtttttttggttgcaaaaacccaaaaaggctaaattttcgttctatttaaattttaaaactttaaaaatttccaaggatttaaaaaataagcaaaccttaacagatataataaa

SEQ ID NO: 51874 - DNA, 339 bp, Heterodera glycines
atggcaatgattagcaatgcacaccatgaaacactggggtttttatgtcggtttaatgaattaaattaaaattaaattataaacgattattttttgttttttagtttctttccaacgatacaatgatttgtacgcgcaattgtacgaatctttttttgaagcgaacacaaaagttggtagatggagagctcgaattgttttggacacatttttatacggagaatgggccgaagattttttggggaatgaatctcagaaaatatcgacgggggcaagttcgttttaattgaataattgtcattaatgacatcggcatttttacccgttcatgcaaataaa

SEQ ID NO: 51875 - DNA, 836 bp, Heterodera glycines
atttattcgtaaaattcaacaaaaaatgcttgcttgaatttttcttatggttttgctgtttttacgctctttctgatcacggatcactctgtccgatgaccgaagctgttacaacctccctatggtcaaaatggcttggcttttgtggcaaaatcaatacaaaaaattacagataaacccgttgcattgcatggcctgtcaatgtactgtagccaatggataccgttcgccacataacaagtgaaccacgcgaattgttagtcaaaaagtgggtataaatttggtatcattggatagagcagcgtcgagcttttttcactttctattaatttccatcctttacatttttttattcttttgcttattttctctaaagaaaaactattatacattttcttagtctaaaaaatgctttttaaaattatttatttatattaaaatttattaaaattaatttatttttgtgtggatttgaacccgagctccaaaaatgcgaatttaaccaactgagccaccaatttttagtgaaaacacagtcaaaatttcgatttttgaggccataactttatattttcctatataccactattactaaaaaaatcacaatagaagtcgaacatgctctctatccaatgataccaaatttatacccactttattgctaacagttcgcgaggtgcccttgtaagcatattttcagttcgcccacactagattattttcttttgaacccctgacgagaattcgggcaaaaagtcgaaagttcaaaggatgcgcgattacatgccgaggggaatccatttacaccgtatttgtcacagttccatgcgttttaa

SEQ ID NO: 51876 - DNA, 593 bp, Heterodera glycines
atgctcattttcaaggacgtccttgcatacaaggacattttttattttcaagaaagagggcccaatttcagggacgtccttgccattcaaggacggatggcaaccctgtctaagccgctatcaattcagtaaagtgatcaaacagatttaaaaaaaaactcattaattatgaacaaaaagaagtgttaacaggaatttttaatcatttttaatagcctattatttgagcatttagtggtgaaatatttacaaattagtccaaaaatggccgtcggggaaatttgatagattttaacctggtcagtaacatattgtgcatcaaaaataaggaaaatttaaaagacttaaagcctcatttagaaaatttagccttattgacatacaaaaaccacaaaatgaggctaaagcctcagatcttggagccctggatataacagattataatagtcaggatgagaaggatgatttagagattgatcgaacatatttggtcaatcgtaaaggcactgatgtgataactagagaccgcatttgaagaaattccaaaatattgaacaaaactaaaaaaaatttgtggaagaacttctgaggaa

SEQ ID NO: 51877 - DNA, 2268 bp, Heterodera glycines
ctgatagtgccattttcgctgccaattcgatgcgtcgtcgtccgctcatttcgcccactgctgtgctcattttcggctcccttttctctttgttgacttttgtcggtcttttgggtaaattaaaaaatccaaaaattggagagaaaacaaacacttcgttaggttggccttatttcaggcaatcttctcgtaattgtcgcaatcattggagacaaacggatgcgcaaaagtgtgatgagtgagtgcccacgacttttgctggtcggaattccattggctttcccctcgtgatccgatcagtgcttttccccattcactgatcacttctttttgggcctttacccctccccccccccctccgtctccctctttttgcattttccattcagaccttttgttgttgaatttggccattgccgatgcgctcaatcttctcgtatgttgtttactgatcagtttttctttttacgcctttcctttcttcaggcaacaaccgtcgaatgggtccctacccttcggcacaatggccccgtttgggttttgcctgcgggtatgccatccctttcgttttgcttctctccccacagttccatcccttcgaaagttttgtgccccatcattcgttatttggaatgcgtgttccttttcacttccatcctcacccaacttgtcgtttgcgtggaacggtcggtgatttgagctcggaacattcgccttttgatcagtttttctcctttttctctctctctgtctctcattctctccctttctctctccttttctctctctctctccctttcatctgtctctcattctctccctttctctctctctctgtctctccttctctccctctttctccttctctctctctctctctctccctttctcaatctttctgtctctcattctctcctcctttctctcaccctctccctccctctctctcattctctctctcctttctctcaccctctccctccctctctctcattctctctctctctgtcccgtcttccgttcattccgatcactttcacttcctccccccttagatttattgccattgccgttccactccatgcgcgccgtctctgttctcggaagaacattctgctcacaatttgtgccgtttggtgcgttgtcgctttggccgccttgccatatgcgacgcataacaaaaaggcggaaaactgtaagaagacgcacgcgttttgagaaggaatccgacgattgaattgttttccgtctttcagcttttgcgtgcacaaatttcaacaggaaaagctacttttggcacttttataaatttgcctaggtccgtccccccccccccttcgtcgcctatcctttacaaaattcatttttaagttcgtcgttctcttccttttgcccggcattattttcctcttcctttacacaaaaatttgccgaattctctgggcaaaaaatgacaaattatacgaaaatggaaaaggtaaaaatggagaaaagatattaattgggcacaaaaagtgatctgtaaaatgactgaccgaagtgattttccccaattcttccggtcacaaatatttctaaaggttgcgcatcaatcccgagtatttccttttattagcttgccaaaattggcccaaaacgatggcccaacttccgttgttcaacgatttctcgaagggtaatagccgtgccaattcctgcgttggctttgcgcccgtttcgggcgcacacgaagaagcactgaagacgaggcgaacggtggtgaaaatgctggtaaataatgaggagaaagaacgccgaatacacaaataagacgaacgttaattaattagtgacaaagggccaattaatggcgctgacagttaattaattagtgccaatgaatggcgccgatgccgtgcatccgtcccccccccccttcaggtcgcttgtgtgtccgtctacttcatctgctactcgccaattcaggcttttcttatgcaggtccaattcttaatacatcaccccaattagttagctaattactcgttaattatgcccctctctctctacccctgcaggggtctcttcaacttgtccatccatcccccctacgaattcgtccttctgatgaatgccttggccattctttgctccgcttgtaaccctttgctgtacactctcttctccagtcgtttccgcgcgcgaattggccatttgttgtgcctttgctgcgacattttctatcgccgcaacaataagtgaaacgccaagaaaaatagacaatccaat

SEQ ID NO: 51878 - DNA, 789 bp, Heterodera glycines
atggaggagctacagcggcgcggagtgcgcccccggcggctggtcgccacagggctgcgcgtctacacgctggagctgggcggccgaaatcagcgcagcgtggtcgccaaggactcgctgaactttttcggctgtgccctctccaagctgccggccatgttcgggctggacggcgtgccggaaaagccgttcttcccctacaactacatccgggccgaaaacatggatgtggtgcatgtgggactgccgccggctgtcgactatgacccggaccggatgcgcccggcggagcgcgacgcgttccagcgctggcatgcggaggagcaacagcgtcgacccaaccgactgttcgtgctgcgccgggagctgctccgctactgtgccaacgacgtgcgcattctgcggcgcgcctgtctgcgcttccgccacgtggtcggtgagctgtcgggaggcgtggagccgttcctggccgcctccaccatcgccgggctcgcgttggtcatctaccgacaacggcatctgccccgtgatctgatggtgcacacgccggagggcggcttcctgcgcgggcgacgcgcttccgccgcctcgcgccacttcttcgcgctgctggagcgactgcgcccgcaatggcgtggtcgactgcgcactgcgcgctggtccatcggcgaagcgtgcgtggaggacgacggctaccggctggacgcgttgctctaccgcccggtgccgctgcgaccgctcgtcatcgagttcaacgggtgcttctttcacggtaaggaaggagagtag

SEQ ID NO: 51879 - DNA, 925 bp, Heterodera glycines
atgggcagtgacggcgaagaggaggaggaggtagaaatggaagagcgaggagatcagcaaggacagacggatgaagcggaaaaacggatgagaaacggccggacgatgacggcgtacaatgccaacgaagacaacgccatgaacaacaacatcattagtccatgtagcagcagcagtactatcacaattgaggggcggacgacgagcgacgacggagtgcggcggcacggcatcgccggcggcgcggtgaacagcagcgaacagagttacgaggcaccgaagctggtcagtgaattataagctatgacatataaaaccaatctcattcaaccggtgtttaattgaccaattaacactgtgtgtcttatggagtgtgaaggttgaaggaactattagcgcttcattactaaaaatggttatggaatgtgctgttgtaccccttccccccaatttcactactaccttaccagtccccccccccccctctctgatttgtttttaatttaaaatttattaatttttctaaacaattttaagtaaaaaatttttgaaatttttcagagattttttcgaaattttatgaagaattactcttagaaaatatatgggttttttctgaaatttctaaacttgaataaggggaatttgactgaacgcatgcattcaaattttccaaaaaattctttgttgcactcaaaataaaaacctcccctttcgttgtcagaccagcgtcgaatttgaacacttccaattgccctcctcggccagcaccgccgagtccgaactgtgctccgatgacgaggcactgctgcagcgtgacccggtggagttggacgccatgaagcgcgagctgttcgacgctttggtggacaaaaaggcgcgccaacagcagcggaagcgggtcaggttctcctgcattcgacag

SEQ ID NO: 51880 - DNA, 390 bp, Heterodera glycines
atggcgacattgtttcacctcctcatccctgctttcgcccaggtttgggtgctgtcctcggagctcacccgttacctgttcatcgatttggcctttgcccgcccgttcttcttcacgtacgccaagtcgtgtctgctgtccctgctgctgttgcgctactcgtgcaattgctgcacggaggaggcggacgcatcgaaaaaagacggcacggaggacacagcgggcggagacggaggaggaggagggcaccacaatgatgccaacgatgacgaagacgacggcatggcaagcggcagcagcagaaacggtgtcagcaacaggaagagcaagaagaaaaggtcgagcagcagcagtggtggaggcaccgcaaagacgacaaagtcgggaacg

SEQ ID NO: 51881 - DNA, 381 bp, Heterodera glycines
atggttaattcatttaaataaccgcgggatatttcaaaaaaatggccaatggattaaaattgtagggaaaacaaaaattgttgcgcatcatgggaaagcttccgaaaatggtcaagttcaaacaccacaaatttggtgtgcttttatgaaatttcttggcgggcaccacgcaattctctccatttaaatgtcccagtgaaaaaaacttacgacattgacgagaacgagcagcccaatgccgagcagtcgttgcgaattggggacaatcatccgatggaatgaaaatggcgccgcccgaatttgtcagttgtttttagttgttgccactcttctgtccacagcacacgacgtatgtacacaaacacacttttaaatgcaaaa

SEQ ID NO: 51882 - DNA, 210 bp, Heterodera glycines
atggcccgcaactcggtgtccctgttcgacaccaccatcatttgtgcctacaacgcgtcgttcgcattcccggtcaaagcagctgagcagcgcgaacattggcgaccgggtggaccagcggacggtggcacagtgcagcagcgtcatcggagaggaggaggagacggcgacgatgactacggacggggacatttgatgagcgatgactga

SEQ ID NO: 51883 - DNA, 393 bp, Heterodera glycines
gagaatattttggggatttatggacattttatttaggaacggggacgaaaaataaatttttgggtgtgagtgggattgattttttggccattcaattgcataaaagcaaaaataagatgggggaaattaatttgcataagagggattcgaacctgtgggggcaaaaacaaacgccaaacgcacaacctccgcaccaccgaacaacacaaaacggtacaaatgtttattcgatttattgggatagaaaaaagtttggcacgtcatatctcggcactcgtactcatttcgcagaaaataaaaccacttttcttaagaacccatgggtgctctatgcacccaccaaatttcattccgaaactccacggacacctcaagaccttcctttgttagcac

SEQ ID NO: 51884 - DNA, 1437 bp, Heterodera glycines
atggacgaagagagggaaagagagacaaacggaaacggagagacggtaggacgaaagacagtcggagcaaagaaccaaaagcaaagaatgatcagtgatcattgagcacataacagagggacgaagccttggtcagtagcgagacgagcgaaacattccgacgtcagcaaatccaacctaaagaaagcgtcgcggagggagaaacgctgcagcagaagcagagaatggcacaaagcggcggagagtgccaacggaaggaatgcgtggagggacggcaccgttgggaggaggaaaagcagcggatggaagaaaaagtgacggaccaaaaggggagggggagggaatgtttacaaaatattcgtttagcttcttctcagggacaaagggatgacccaaatggaggaaaaaaggcacgaaatgagtgccgacttggaacaagcaaatgcgcaattggacacactgcggacagagcatgccatccttgtgcagttggcagaaacacggctttgtgaaatcaaagccatccaaatggctcttaatggagcgcaggcaatgctaaacaaaaggcattttaaaacattagttaaatgacggcatttaggccgaacgggacaaattggagcaggcattggcatacattgaacgtcgttgccacgtcatggagcagatcggactcgaccagggcattgtgctgggtcgactcgacgagttccgaccagccccgggggacgtgttcacgttcagaggctcaaaaggcacacaaacaatgctaacagcgaaggcgttggggtacagtgagaaggaattggacgaattgcaagtccaaattcgagtgagtaaaagggcaaaaggacaattaaaaaagcaaagcaaaatgaaaatcgaattaatcgccgtaaaagtcaatgcaaatggcatttgcggaggacaaaacgacaatgagcgaccgattgaaagacatcgaacaaatgctgaccatgaaaacggagttggtcaccacactgactgtccaattggaaaatgctgccaaaaacatacggtcggaggacgaacggcaccagcgagaaagagacgcattcactgaacgcgttgcagagatgggaaggacgacagaacgcgtgccgatcctcgagaatgagttggagagggcgaggggtgagaagagtctgtgcgagttgagaatgaagcgagtggaggcggagacggacgaacgcatggaaaaggtcgtcggggggggggggggcaaaacttggccattgaaaatgattttgaacaaattttggttgaatcaatgcgcaacagcaaacaaaacgaggaatattgggcaaaaaagtgtggggaattgaaacaaaaaagtgccaatttggcagcacaacttaaacatgaaaaaaaagcggcgaacgacaagcgcatgggctggcagttcagtcgaataaa

SEQ ID NO: 51885 - DNA, 1020 bp, Heterodera glycines
atgaatttatatttttacattttttcctactacttggcggttttgagtagggtaggtcgggtccaagacctggacacggacaactgagtacaactgagtaccaaggtcccggttttgaccgggaccggcaaattcccggttttttccaggttttcccagccaaaaattcccgggttttcaacccaaaaagtcccggttgtgcccaaaattcccggtcccgacctaccctagttttgagtaacgccttcttattaccgcatgctagaattactgtagataaattcattccaaaatattattattattttattttttgctaaaatgtccttcactgaagaaaaatctaatttatcaggcgataacaacgcccaaaaaatcaccagcagaagcggaaggaaaaaatgaccgtaatccggcttattggaaagggtaccgtaagcattttgacaaaatgttgaaacagatgtggaaaagcgcaaaagccaaagcaatgagcgaacgcaaacagttttttaaaaatcaacaaagaagaagcattgagcaaaaggaccgtaatcagacagagcaaagtgaaatggccaaaaaatgtgccgaactcaacgacaaatttggcattatttacaaagcaccaattatttgcttttgatgggagggagtgacaaatttgcgaatcgaccaatttaagacacaaaaattttttcttgatcaatccaaccggtttattgtaatactggcgatggttgccaccttttttggaaaaaaatattttttccttttaaacatcatgtaaacatttttcaaaagactttctgggtcgctgatcacgaatctggcgtccatttcgaccaattccgaaccccggacaagattttagattttcgagttccgattttttggtcgaaaatgtttaaaaatttttttattaagcattggtgacttttagtttgtttccttttcatggtctttgaaaggaaaaattttttttttccaaaaaagggggcaaccatcgccagaattaca

SEQ ID NO: 51886 - DNA, 161 bp, Heterodera glycines
aatttttgagaaaaaaaccgggttaggtgcattgtgtcagtttatcctgacaaggacagggtctccaagatggagcaggacggggcaaacaggactaaagtccttgcttaacaagactattggtggtcccgggaccaacaaaccctaggaaagaaaatcaa

SEQ ID NO: 51887 - DNA, 2718 bp, Heterodera glycines
atggacaaaaactatttcccgctgcacaatctgatttcgaaacttggcaccccaacgctattagacgagaaaaaatggttgaacaaagccggacaggtcagtctcggacaaaacattggcgcccagaaaaaagcaagtgtaacaccaagcagctcacaatcagcagaagcactttcaaacaaaaaggtactggagatcagaaaaatctttgtgtatttataataatagagtagagcgttgtcggttcctttaccgatcggtaattaccactaattaccgttttttattggtaccggcactgatttttcagaatcaaaattactggtaccagttttttgtagtaccggcggtactggtactaacctacaaaaataaaaatggataacccgagctgaaattattcatgaaaatttgggaaaagaagttttcataaatatggaacttttggccaatttttaaacaattctttttttcattttgctattaattagagagcggaccggaccggcccggtactggtttttaccgggcccggcaaaccggtccggcgatttttggaaaaatccggttttccggtttgaccggttttccggtttgaccggttttccggtttgaccggttattgagaggcccggcccggaaaccggtcgttttgaaaatgccaaaccggtccggaaaccggcatttctgaccggtttttaccggtttatgatatagccaaaaattcttcatttttgtacatttccctttgaaaatatccctttgacatgtttttaatttttttttgaattttcggttgaatttttaatttaaataatcttattttgcaaattggcctatttaaaaaacgtacaagaaagactcatacagaaattctgtattttagacaaaaaattgaggggggggggggcatcaacttgcgaagctgacctttttttttgctttttgaccccaatttacaattttttcgggaaattcaattgaaaatgtgtcccaagaatccacacaattcttgcaaaaatttaatctaaaaatcaaaaagcatttatttttttgcaaaatctgttatgaaattcacttaaacaaatatttttcgcggtggtgcctatcgtgtatgcactcactttatttatcgcctccctcatttaccccgaatttttttttaatttccaaacagaaatttcaaaaaaaaacaaaaaattttccataagaatatcttaagaaaaaatgtttacgtgatttttcaattttatgatgaattacttactgttttttttagaaaatcgcaaaaattttagaaaatttaatttttttgaaaatttttgaaatttaaaattgaagaggtcatttttgacgcctgaagtgaaatagagctgaaattttacacttgacacgatttttgtcgattttggggttgaaatacatgtgaaaatttaaatttttaccaaaccggttccgaaaatccggtttcaccagtttttgagaggccggcccgaaaccgattgcttctgaaaatatcaacccagtccgggcatttctgagaatttcggtctctactattaattttgataaaaatttttagaattgtgaagacaaaattgttttttttttgatgaaaatttcaatttctttcttcgacctccttcaagagctttctcacccaaatttcccaaaaacttcgtaaaaattgaagaatttttaaaatcctttaaatgtttgttttgacaaatgaaaaaaatactcaaaatcgcttttttgactttaacgcgattttattatttatttttcatttacatttcaccccacgaaatgtgctactctcgtcatttctttttttacgaaaaaaggctaactaaatagtttctaaaatactaaaaattccaatatagttgtcaaatattagaataatactgctcaataaatgcaaaaatctcctaaagataccacctcattctttatccatttcgctagcataactgcaaatcaaaatcctttcaaatcagcacgaccggatcccaacgatcttttttttgagacccaaaaatggcaaaacaattaggattttggcgaaaatggctataaatttctgtttttctccccgaactaaatttttaaaataacaccaggggttcgatcgatttttttcaaaattatgacatcgctggtcaacaataaaaaatttttaggaattaaaaatattaacatttgcatgcattagtttcgcattttggttagaaacagtggcctaggacttaaggtataatgtaaaaaaatttgacggattcatttttttttctaagaattcaaattgcttaatttttgtttagaaaaaaatgagcaaacccgtagtgtacccatggcaaaatgccaatttgttgtccaaaatacaaatactcatcacaaaagaataatcaaaaatttaagtcggttgattttcattcacaaattgtttttttccagccgaagtcaaagtcacaagcaaaaggagtaaccaaaaaagactttaatgaattattaaaacaaatgtgggaaagtgcagaaaaagaagcgatggaaaagcaaaaactttttaatgtagaaaattctaatttggcttcatcaaacaaattgaaggatattttagagcgtgaaaagctgaaaataaaacgtgccgaactcgacgacaaatttggcatcttttacatagatgagaaatcgcctttagctaaggtgatttag

SEQ ID NO: 51888 - DNA, 922 bp, Heterodera glycines
atgaccctaccagagcgtgccagagatgagtacaacgcgtacattgcgctggcaaatggagccaccgaagagcagaaaagaagagggacgcatctcgcggcatttataaatttgttttatttttttatgcaatgcgtaatggatgatgaggatcttaaaggttttggtttctcaacttcagagaaattcataaagaaaataattcgcaaatttatgttcaaaaaagttaagtaaataagaaaatttaatggaaaaaattagttaaatggttaattagtgctaaatgctattaattctagcgtgttgccaaatagagtcatttttttcatttacccgtaatattggtttgttttttgagaattttgaagaataagaccattaaaaacccataaaagtgtctttttggataagaaaatctttaaaaaaaagagaccagctggcactaaattattttatttttaaaataaaatagacaaaatttcaaaaaaaaattgttaataatcgaaacactaaataaatatttaatatttttgtaattattaagcaatttattaccagatttgtccaaaatggccaaaaacattatgccaacttatcaaaaataaatttaaattaaaaaaatctgagaattttccccaaaaacatcaaaaatcttcaaaatttctcaaaaagccacaaaaagcctcaaagcctcattttgaaaatttagcctcattaacctatcaaaaaaccacaaaatgaggctaaagcctcagatctggctaccctggattattgacttgcccttattttaaagtttggattccaaggacgtccttggaaatgagcatttggaaaagtttttaaaagaaattcaaagaaattttggaaatctttgtttttcatcaatattttgattaaattatggcattatgtcaataaa

SEQ ID NO: 51889 - DNA, 1140 bp, Heterodera glycines
taattaaatccattccttcgggggaccgtgccgggtgccgcggggtaagcagtgctggttcgtttcatcacggcaccgaaccttttggctagtcagcaatcgttgcttaacttgccagatcggacgggtgcgcatgattccactgttccaagcaccccaccaaaagcaaaacgatataaccaaaatataaggaaaaattttttaaaaaattttttctccatcttcctttttgatactaaagcatcagagtgctaaaattaagttgtaaataaaatttggtgcgctttactgagcacatcgctcgggggaactatttagaaaacaaaaaaatcgattttttcaagtgtccgtttggggtactcaaacatttatggggagcaaaaatccaacgcagaattaaagtacaggctatagggaagctattcccgaaggattcggtctccccataaatctgggcgcatcggttcggggggactgccccgaaaacaaaaaaatcgattttttcaagtgtccgtttggggtactcaaacaattatggggagcaaaaatccaacgcagaattaaagtacaggctatagggaagctattcccgaaggattcggtctccccataaatctgggcgcatcggttcggggggactgccccgaaaacaaaaataaatcgattttttcaagtgtccgtttggggtactcaaacaattatggggagcaaaaatccaacgcagaattaaagtacaggctatagtgaagctattccggaaggattcggtctccccataaatctgggcgcatcggttcagggggactgccccgaaaacccaaaaaaaattttttggataaaaattatttaaatgaactgactagataatatttaaaataggttatttctcttcctttcagtatccctgcaaagtttggtgcgcttctgatcagtttctgaaaaaaaagttaagcctaaactttttggcctgtttaaaaaggaattaaaaatttttaaaaattttattcatctccctttttgatagaaaaagcatcagagtgcctaaactaacatgtaaataaaatttggtgcgtttcagaaccctttctgaaaaaatatttaagaattaattttgcaaaaaataaataaaaacgaaagact

SEQ ID NO: 51890 - DNA, 633 bp, Heterodera glycines
atggggacgggtattgctggggttcgggttggagttgtattgtattgtccacttattcaatatatgagggacttggatgttctgtcacatgactttagtgcacaaaatgggtgtttttctagaattaaacaattattttattcgaaaattaaaaatatttctaaaatattaatttttataattaaaattgaaagagagtgaaagcgttaatgtcacctctcgaggtataagcatttataactgaattcttttcatttttgcattttattttcctttttaagctttttcgtagggacaacggcatttgcccttttcatcagtgctgggacgtttctaaattccgccacatatggacgtttcctaaatccgttaccattaagaagacaaataaatatggactaattccaattttggcacgaaaatttgacatgaattcttcaaaaactaaataacaaaattacaacgtgaaacacaaaattcatcatttttcacgtatattcaagaataattttgtctgttgcctttatcaaagaattttgctttataaaaagcttctattgttgtcatctccctcatcaatgggctaattaatgcctttccatgccaaattgaaacagatattttaaaaataaa

SEQ ID NO: 51891 - DNA, 456 bp, Heterodera glycines
atggtcaaattttccaattttctcccggcggcgcctatcggcaccgacgggcccacgaaacttatttttcataaaaatgactcaaacgcaaaaatttatcatttataatgaaaatcttttagcaaattgtactcaaattttcaaaaattgcacagcctaattaaaaaggtcactatgcttaataatttttttttatcacagctaattgacgaagatttgatcatattgctgaatgatctgaaggcaactcctgatcaagctaaaaaattagatgatcagtctagaacttctgctgttgatcaacacaaaaagaaaatgctcgaggcatattttggctttatttatttgatattttcttttttgaaccagtatttttacagacattgtaataatcccatctctgaacatacgtgcagctctcagaaaactgagttggatgtcgaaaatctattttga

SEQ ID NO: 51892 - DNA, 553 bp, Heterodera glycines
atgccatccctggaaaagataccgtcaatgaacaatgggcttcgtcaagcgacaattcattctccataccgcttgatgccatcagactcagaggaatatttaatcgttcaagaggaagagggagaggagcaaaaagggaaagagacagtgagagaaaagggagtggatgagagagcggaggcagaaaagagactggcagggaagcagacagttcgtcatcagacggaacaatcttcaaaatcgacgatgcaaagcagtacagagacgggactgatccttatgccggaagcgaaactcgggtcacttccatcagcagacgcaatgacaacgaaaagcgaggtggtagtggaggaaacaacagaggtagaggtacatgaagagggcgagagagtggaggaggaagagaaacagaggactgagagagaagcacccgatgagagagaggaagagaggccaaagagtgccgcttcacggacgggcacaccgaccatttgggatcagtacaaaatactgggtgatcaattcgcaaaatacggatcacttgaaatagaaa

SEQ ID NO: 51893 - DNA, 731 bp, Heterodera glycines
atggagcagtacagagagaccgataaagaacagcaaaaaaagggagaattaggaaaaaagcaagagaggcacggaatgaagtggggagaattcgaagaggaagaacgagaggaacggaaggaaaaagagggggaaaaaaaggaaaaagagggggaggaggaggaaaaggaggagcagcggggagaggaaaaggacgcaggcaggtccatcccagcggacactttacgcgagggtgccttgagcatcggctttgtgatgccatctcaagtcggtgcccagaggaaagtgctgacccgtgccgctgatcagtctcatgccgccccgccttttccgcaaattaaacgtcgcgcttttggaagtaaaacaaaatcttaacaaaagataaattgaaaaagaacattttagatgaaagattattcgagaaaaaaccagcagaacctaaacaaacatttgtaaagaagccgatcagagggactgattttgtggtggtcaaagggcgagcggaagaagggaaggaagtgagggagagcacgagatcaatgatgggacagaggaagagagacgcatttgtgaggggacagcagagagatgcacagatggaagagactgaacggatgagaggagagtcccaggaagagagggcactgaagagagagtcccaggaagaggggctaaggaagagagagtccgaggaagagagggcacggaaaagagagtcacacgaagagggg

SEQ ID NO: 51894 - DNA, 457 bp, Heterodera glycines
attggactgctgacaatgaccgccttttgctacccaaatgagatggtgcactccgtccgcgttggcattgcccactcgcagagtgcatggcacaacttcaagcagggtgaggggaagggagcaacgaaagcaaatggggacgcacatttatggaacaggcgttattcgtctcccctccggaaatttaaacaatccataattttaataaaatggagaaattgtttttattcttctaaaaaactaaaggatacaaattatgattttccattattaaaagttataattttacagtccaattttatttagcgcctgaaccgaagagcagttgactgatgaacaaaattcatttgtgcatcgtttttggccattgtcaaggggtgacgaacacacacattttaatgttgtaggatttaaattttaaattctgtttttcggtctgataaataatttcaattaa

SEQ ID NO: 51895 - DNA, 919 bp, Heterodera glycines
gtactgatcagtgatcaaccgatgaacaccaaaaagccgagcgcaatcaaccgggaggcgttgaacgaatcggtaagattttgctaacattgaacacttattaaggctttggaaaattttcaggtttcggcatccccaggacacggcagcaagtcaaaagatttccgcaactgcaacgacatcaaattggccacccgaaaaacaaatgaatgggggaaagcccagctgaagggttgcaccaaagaactgtgcattcgttgtgtgctcgacgcggacatgtactaccgaaccatgcacatttatgacggacatttggccaaaagccgagacgcctgcgaacagatggccaaggagaaggcccagttggcggaagaggtggcacggcacagacgagacagaacggagttgaccacaaaataccaacagttggaagcgctgctgcaccatgaggagcagggacaacagcggcaaatggacgacattctgaaagaaagaaatataaaaatgggagagttgcaggcgaaggtggacgaactcaccggcatcatcgggcagagagatgccaaaatagcggaaatgaccaaccaattcgcaatgacaatgtcaattaagatggagaaagccgaacagaagcctgaagtgccgaaaaaggttcatctgttggcactattgcagtttatacgaccaaaaaaggatttgacaactctaatgcaccataactttttctagaagcatccaaattaaacattcttggtatcattcgatagcctcaagagttctctattagcctgcaaacttccaaagaacttcgttgtgtttcaaaaaatgtgatcataatgttcgaaaattcaacttttcgttgttttctggccataacctttttgaaacaaaatgaaatcctttgtaattttgcaagcta

SEQ ID NO: 51896 - DNA, 270 bp, Heterodera glycines
caagcaatcagcggtgcagccgatcaagcaagtgaattgttttcgcagacacccggctatcccgaacattgtcgacacccaccacattcttgtgtcgcgttctccgcatggctttacagaagggtcttcggtgtctgcgggttcatttgccgcctttttttcactcatgatcaaccgttgctttcgaatggacgacgtggccttttcgggacaaatcggactcgaaagacaagtgcagtatgtccagcaaaattgtggagaaagttgtag

SEQ ID NO: 51897 - DNA, 418 bp, Heterodera glycines
atgacaaatagtaagaaattggttcaaagtaataagaataagcatattaaatttaaaaaattcttatgattaattaaaaaaaagaataaataaatcaacaaaattacctgcgttaatgggtcaaattggccagcagcgaatgaaagttctccgggggccaagttcacaactgttgacattttgacacaaatggcgacaggatatccttaaaaaaggagggttttttgagtgtagaaaactaacagatgtttttataaaattaaattggtttttcaaatatttttatagaaaatataataatttttcaggttttaaaactaatttcacatgttttccttattttctgtcatcaaaagtaccaagtccgcgcaaaatgaatcctctcgtttgcacagccgactttgcagttgctaaataa

SEQ ID NO: 51898 - DNA, 75 bp, Heterodera glycines
accagggatgtgccgagccagacaaaatccgattccgattaaatcgccgattccgattatggccaaaaatccgat

SEQ ID NO: 51899 - DNA, 978 bp, Heterodera glycines
atgctccgagtcggtgttggaacggttgaactcattgctggaaccaaaatgtgccattatgttgaccatttcgggagcgcatcaaagcgtcgacatttggcaccatgccacattggttgtggtggtggtgaaacagtgacagcggccaacgagtttccaaatgccaaccggtaatcgtaatgaaatctttcgccatgagcacggagaggacttgaggacttcagagggattggaaaaatcctttaaagtgatcgattgttgtttttttcacttgaaaatttccgttatgaatttttttctttgaaaaacatttataaatgaacatatatacttgtgccttttttaaattagatgagaaatggaagcagcagcataacatatattgaatcaataccgtattaaatttgataaaacaatgacaaaaaaacaaaacaaataattgtggaattaagagaaaataaaaagaatttatagtgataaactttagattttaaaacctaaaaaataaaaaaaacatattttgacgcgttttgctcaaaatttattaaccaaaatacaataaaaaattaaaaatacaccgttaagggcccaaagtttatagaaaaataccctaagcttatcaaaaataaacaccctaagaaatgaaaagttttctcaaaaataaatctccaaaattgtttatttattttcttgactttgaggctttttagtgcctgtttttggtgttttttatgacctaaaacctaaaagttttggctgtcttcccccccccccccgttcaaaaaaattgcaaaatttttttttcttaaattaaagtcattttaagggttttcacggtcggagaatccgattcttacatctgtttcgacccaattcgaatcttgaacccaaattcgaacaaaaagtcgaaacttcaaatttttttctagtttcgcacttttggttcaaaaccgacgtaaatacatataaagaaacaaa

SEQ ID NO: 51900 - DNA, 1534 bp, Heterodera glycines
atgccatcgaatgttccgctgagaatcgtcgtgctgcgcttggcccggcactcttcaaaattcgtttccctcatcctattggttgcatttgtgaaagaaatcggtagaaattcaactattatttatcgacattaccctctttttgcagttccttctggcatttttacaaacgatgaatttgtctgcgtttatcaattcaatttctacctaattcatggtgtgccggggctttacccgttgaaatttccaattcaaaatcgaatttctttttggaacattgccaaagccaacagagggactcttgcgatggaaattgagaaattttctgaatttgcgcgagaagtgggacgaatgcaattcagcgatgccgtgggcataaatggctttcagtgggaaatatttgcaggaataaacacaaagaaaaaaagcacggagaaatgcctgggctttggccttttgttcactactgtttcggaaaaaagtgaaaacaatgttaatgtgtgtttaatatttaaattagagtgcgccgggaccgggacctggacacggacaactgagtaccaaggtcccggttttgaccgggaccgggactagtcccggttttttcccggttttcccagccaaaaattcccgggttttcaacccaaaaaggtcccggtcccggttaagcccaaaattcccggtcccggcgcactctaatttaaatggattaattaaggtgtaaaatggagttgcaaatgttcggcgacctttcaaattgtttcactaaaaagcggtacggaaaatcccgttggaaaaatttgtgatggaaattgacaaattttcagaatttgcgcaagaaatcattggtagtgaacggagcagtgaaactgtttttgtaaagggattccgttgaaaatatctgtacaaacagacactgatgaacgcaatgaaaagagtttggcctttgccctcgagtgttcccctcaaaatgaatttcatttttgtcgaatgcattcttttcatttttcgtttaattataatttttttttaattttgacagtgaaaatttatttatagagtttaatattataatattaaagcaataataagaattttaatgaatatttaactttaaattttctttaaaaatcagtaaaacagtgagataattaactttaaattttcatttccttatgctatagtaacaagtgactcaaaatgtacggtaatgttggtgccctgtcagttcccatcactttttttatcgcttttgctattggcggcattttgccattctgaggaccgtacctttggtggtgaagagcctgaggaaaatcaaaacaattttaaatgcgttttccgtataaaatttgtgtaaaatttccgccggtgtgtcacaatgtttgttgataaatcctcctttgaaatgagaggaaagagaattttaaacagctaagcgcagcacggcgatttccagaggaacaatcgatgccattttgacggcatttttcgtcggcccaatggagtgccaaaaaacagaaacaaatagcaa

SEQ ID NO: 51901 - DNA, 808 bp, Heterodera glycines
atgggagataaggttgatgcaaatgggactgtgaagagaaccgcgtggcataacaacaaagaccttgtattaccaaccattttggacccgcggttcaaattgtcaaactatttggatccagatcaaacaatttgttcactgaatttgaacaagaaatgaatttggataattttttgttggcctcgccaattccaagtcccgccgttttgaacgcccgacaaaaatcagaggcgaactaaataaaccagaaattaaataacaaactattttttatacaggttgaagtcaatgaatatctccgagccaaaaaaataaatatcaatgaagatccaatttcttattggtctggcgcaaacgaattgaaatggcctcttttgactaagctatcaaaaaaatatttctcagccccagctacatcaactgaaagcgaacggcttttctccaccgctgggttgattgtgacagatctgagaaaacgtttattgcctgagaatgtggacaaacttttatttttgcatcacaatcttaaaatttatgattttgattatgaataaaatttttgggaaaaaattattttaaaaaaatcggaatcgtaatcggaatcgcaattaatcggattttgggccataatcgtaatcggttttaaaaccgtatcggatttttggccataatcggaatcggcgatttaatcggaatcggattttgtctggctcggcacatccctggtacaaacagacactgatgaacgtaatgaaaagagtttggcctttgcccttgagtgttcccctcaaaaaggtgcaaaaataaa

SEQ ID NO: 51902 - DNA, 845 bp, Heterodera glycines
atgggagtaaaaggaaaaaacggaattcaaagggattggcacataatcataactggacacacatattcacatgataaaaaaggagggggacggggaaaagctgaacgttcgacgataagggaaattcatcgttgcagggcgaaaggcgatgtgaaagcgaaaaacggctggaggggcagaaatccgagggttacattgggagtgataataggaacattaggctggggaatggttgtggtaaagaaaaccaaagataacccctcgcagtaatgacgtcatcatctttgcaatatatagttgacaattatcctttttatggcaattggtcgcatggccgagtggtagtgtgttgggttggtggcagaccaaaaattcgagtccgcctgcctgcggcagaattattcttaataaaaaaacaaaaaattaataaaagtaaaataatttaaaataataaaaaaaaaaaattagcctcagttggcctggcgctcagatggccctgacaggcacccaacagctggcgctcagatggcctgcaccagggatgtgccgaatcggaatcgtaatcgtaatcggaatcgcaattaatcggattttgggccataattggaatcggataatcgtaatcggattttgccttgaaatccgattattacacccctaagaattaattgcaattttcctatcaggtgcgttggtcatccaccttccaaatgcttgatcgttttttgcaaaacaaaacagttgttgggcttctgtgtgcagaggacatttcgtttccgaatttctcagcggatgattggcgtataatttcagcattgaaacaagtagtaccgaatgcatgttaa

SEQ ID NO: 51903 - DNA, 903 bp, Heterodera glycines
atgctaattgcatttgtgagaaatgagcagaaaatgcaaatcagtgaatattcaatggaaaaatatgagatacactttggcattttgtattatatgagaaagaattggaaatgttcaaaaatttcggaggaatttgaagaatacgaatggacagaatgccaaaaatatcgcaaatattttgacattttatacgaatatttgtgcagagaatacgttggaattcccacagtaaagccaaagtttgtatttgaagaccgaattgaaattgaagggccaataatttatgcggtgaattgtttggccagaatttcgcgattttattttaattcggatgagttttataaattaaacagattattcaaatgggtttataattttgaaccaaaattgttaaatgaggagagattgaattttggaataaaattggaaaatgaaccaaaattgccaattaatgaaatgattttgcaattggcaattgacacagcgaatgaatggcaaacaaatgaaagtttagaaggaataattcgacaaaattttgacaataaattggaggaaatgtacaaaaaagcggaagaaagggcaaaagaatacggtccttggggtgccaatgaaataaatgatgataagcatatgataattgcgtattcgaaattcgatgatcaaaggacatgggtaagacttaacgttcaatgataatttaataaattcaaaatttagactgatgatgctttcttttcggaatttgtcaaaggattaacgacaaattcaaagaaattttttaaaatggcaaaagaatattcgaattatttacgtctaaagaaagagaaaggaaattatattttaactgatgaaagaccaatgattctttgggttaaaggaattgagaacagaaaaagtatttga

SEQ ID NO: 51904 - DNA, 6453 bp, Heterodera glycines
tttacattggcttcacattgttgccaattatttttgatcatataaacgtaaccaagataatattcatattgttgcatcaaatgctccgctttaactttttcaaaaatgtcgtttcctttgattaatttaataaatttcgcaaaatctatcgcagcatatcctttcacgaattcaaaaaataatgcgtcatcaatctaaataagcataaattaatataaaatgcatttaaaattaaaaatttttttctcagatttcacccaaatcgatgaatcatcgaattccgcagcattaattattgtatttaaatcataatattcttcttcttttccattttcgtccacttttttaaacatttcttctaatttattttcaaaattttgttttattattccttcggcactttcatttatttgccatccattcgctgtgtcaattgccaattgcaaaatcatttcattaattggcaatttactttttaatttaaattcataattcaatctgttctcattcaacaattttggttgaaaaagccgatcaatcgaattgaacaatttgtttaatttatattcattaaactcactctcttccgaattaaaataaaattgcgaaattttggccagacaattcaccgcataaattattggtccttcaatttcaattctttggattcattttccaatttcaaaattcataatttaatctcttttcattcaacaattttggtggtttaaaacgatgagaaaaatttgtttaatttatatttgtaataattactcgaaaatgaattaaaataaaagtacgaaatattgatcagacaattcaccacataaattattggcccattaatttcaattttgtttttaaatacaaattttggcttcactgttggaattccgacgtactctctgaacaaatattcgtacaaaatgtccaaatatttgcgatatttttggcattctgtccgttcatattcttcaaattcattcgcaattttctcacattgccaattcattctcataaaatgcataatgccaagatgaacttcgtatttctgcttcgaatattcactaatttgaatttcttgctgacctttcgcaaaatcaattagcattttgtcatcagcctaattaaaatagattttaataaataaaattttaaaaagtcaaaattcaccgatggattttcatttgaaattgaaaatgaaaaatggaggaaaataattataaagaatatagcagaaactgggttgaacattctcttatttttcataaatattaaaaaatttatgagagaataataatatatccgacaatttttgctgttttattgtcgctaataatatagttcgcattaaaatatatgatttgtctagtatcaaatatttggatattaaaaatgaaaatttatatgcattttgtagtttgtatcaaatatttgtttaaaataaaaaatttattatacatattcaaaatatacaattaaaaaaaataattatttttaatattttatacaaactacaaagtgccaataaaatataatatttgatacaaataattagtggcaataaaatataataaattttcatttttaatatcacaaatattttaatacaacttcacaagtgccatgttgtataataaagtgaatttgttttaaagaaaaattgaaataatttaattttaagtaatttaattgcatcgttttttaattacaatttgaaataaccgtttgcaccgaacacttcgccataggaaaacttgttctaactactttataaattagtgaaaaaatttaaatttaaaacaagaccagtagtaacccccccgtgaccttcgccgcttgacgctaattagatgtgacagctggcggggaggggtgtcaattagtcactaattgactgaccggggtactaattggtcagcggtcaagagggcactaattggtcagccgtagggtgtggggtagcaattaattaattaattggggggacccaaacctattgaacggtttcaaattgtcttgtacttttttttgacataaaatttgattgatttaaaaagtgacagccgagggggaggggtgaaattttttgattgatttaaaaagtgacagccgatgggggaggggtgaaattttttgattgatttaaaaagtgacagatgaggggaaattggaatttgattggtcagcgaagtgacagatgagggatgaaattcaaatttctgatgggcggggggacgggaattttgattggtcaacgaagtgacagtttttgatattattaaattattcaaatgaagtgaaataatttgttttgcactcggtctttatcaaacttgttatgaatgtgcaaatttgcaatttgttgacgatttcgcgcaatgtttcgaccgaaattaaattgtttgtcacttataaaataggtcaatttgtgaatatttaaggtttccaaaatggaattcattgtaattgctacatttgttccatacttttcttccaaaaattttccaacactttcccttgtttacccaaaatggcaccacgtgatgactccagtaacaataccaatggtcagccagtcattcaatttgatcaacaaattcgccaggaccctggactaaatgccgtttttgactttgttcgggaacagggcgcgcgggtaatttgtcacaacaaattaattttttcatttttttgattttgtttagcatggctttttcaacacgcccgccgaaatcgtcaatgttcttcagcaaatggcacagcatcgactgaatgagcgcagagcggggaataattgagagaatgaagttgagagaaaatgaagagcgaaagttgagaacaaattgatgaaacaatacaaagatgatggaaattctgaattattttttttttcttacatgacttaatttgttagcaatgctaaaacaataaataaaaatggaaaataaattgacaaattggtttaatgttagttgactccggtcccctcctcttccccctttgtatttttctctggttgtctcccttgttgacgcactatttcactgcccccaaagtgtataaatagcgcgagttttcgtctgccaccctcacttttcaaatcattcgaaaaaatttcaacaaaaaatggcgctcaatatgcaggacaaaaagggtctcctccaccaaattcttggcgaagcagacatcacggtgactacgagcggcatcacgatcagcggtccccatctctcctccccccgttttattccctttgatgaggccggccgctgccgctcatgtcgtggcaccgaggtggaactggacacaatggtcaccaaggagggcatcaccatttggtgtacacgtatcgaccgggtgcaatttgtccctttcgacatcatttacgacttgcccggtcactgcttcttccgggtgaagaacaaggcccgcgtgttcaacattccctacggggacctgcctgccatcacattcccaaaccatcaagaacaacagcagcagctgcaacagcaacaacaacagaacgatttgcgccaaaaagctaacacggcgatggatttggtggagagtggactgctagctgattcgttgcgtgaagaaggcgtgcagagggctgagctaaagcggaaggcgaaagtcgcgctcgatctgattgatgccggtttgaccggcgatgcactgcatgaggagggacaacgttggaagaaggccaaaactgcactcagcgttctcggaaacatgttgttggccgattcgttgccggaaaagaagactgcggagctcccgcttccgccagccgaaaaaattgaatcactgccacttccaccactcgaaaaaatgaaaacacccccacttccacctgccgacaaaatgccttcgccgctcccaccatcatcaaaagtggaaagtgatgagcaacaattctacgacagcatttctgcggctaccactatgatggacagcgcctcaatgcagcagcaggcgccgctgaagagaaaacagctgactccaaaaggcaaaagcaacaatggtatgaagaaggcagctgagccgcagcatcatcacaatgtgggggacatggacaagactcttgacgaattctttgagagcgttagcgcagcgacgaccaatttgtctatataaattgttgtttcatgcaattgtattgaattttaattaatttattaacacgaaatgcttaattctttctccaataaagatatttgctttaaattaccatttggactaattatttccggtccctcctcctccggtaaaacccaattcctattgaaatttgttgccgaatgcgatgaactaattacaccaaaacccgtctccaccctttactgttttggtgaaatgaatcccgctgtacccattctccaaaagtcgggggttgatgtttattcgggtgttcctccggaagagctgatcaaacgcatgccaaagccccttttgctgatcctcgacgacttgatgctgtccattgatgagcactatttgtccgacttgttcaccaaaaagtcccaccaccaccaatttgctgtcgtgttcgttacgcagaatttgtttgagcgaaagatcaaagtggcccgtctgtccgcccagtacctggtactgatgcgggcacccaactcgctgttgtccatccgtaacattggcgtacagcttttcccgcgtcaactcgacttctttcttgacgcctatcgtaaagcgaccgctcgcccatacggctatttactaattgacatgcacgcctcatctgaccccgtgctgcgcctacgcacaaatatatttaaggacgagcaagaggaggatcaaggcttagttgtgtttgtaccaaagaatggagtccaatagtcaggaggaacaagttaaaattagtcaactcatccacgacaattccaaatggctttgtgcgctggccagaacgaggtccgcgaaaaagtgttgcaagctgatacggaaagcgaacgctgatcaactgctagcgctggtggaaatttgtttgaacattgtcgcatctcgatttcgcttgaacaaacgtcagaagaacaggctgatgccctacgcagattttgttcgctgcctgagcagagtgagaagtgaacgaggcgcgagacgtatgattgttcagaaaggagcaggggttggcggactgttcgctgcactcctaacacccgtgttaattgaagttgccaaatcatttgtgagcaaaaatgtataaataccgtaaaaaaattgttgttatttcattcatttgtttcataaaatggcaaataaatttgtgcttgtaccacaagaaatttaccggggtctcacctctgcggcggacacgggtgacatcaatttggatgctgtacgacacgatttgacgcgtgccagggctgaacgaacaaacccttcagctaaaaatgtcagctacaatcaacagcttaggcgctacttgcaaatgagacgggaagtcgcggacaaaccagcacgggttgagctagtcaagggattgagtgttctgatgaggcgaggcggtgcggatgatgaagcagaagttgtagatacaccaccccgccctcctcgtcctcctcctccaccaccgcctcctggtcagcatcctcctcgtcgtccaccaagccctccaggcccaggtccgtccccgccggggagtcctccgccgcgtccacagcgtcctccgagaccacctagagctgctgcgccgccctctcggagagatgggcgtgtggaggaatggcgaaaaaagagaaacgacatacaacaacggcagccggttgtgcgggaccttcttgctgaagcagctgctgctccgctacccgaaagtgacgaagaggatgactacatgttggagagcggattcgctctgccagcaccatcacaatattatggcgatttgcccgttctgcctgacaacgcggacgcaattgaggagatggacactgcacagcacaggattgcaaccagaagaaagttaaagaaagcagatgacgatgatggcgatgacgattttcatcgcaaaaaataccgggtctattatcctcctcccccttctcgcccacccccgtctcgtccacagccaaaaattgaaacacctcgacctccaccgcgtcctagcctcaagaaagaaccacaaccactgctcgatcctcggccatccacatcacaacaagttgatcgcaaacctaaaagggagccaaagttcgatctggatccgcgaccatccacatcacggcaagccgggtacaacccccctgcggaaccaaaacatgagcagaaaccgtcaaaaaagccacctcctcgcgccacaccctatcatattccgaaaagagagccaaaaattgaagaaacactgccgcggcagcaaccttctcctgctgccccacaagtgccgcctgttccgccacctaggagagggaccaaacgtcgccacccccc

SEQ ID NO: 51905 - DNA, 964 bp, Heterodera glycines
atggtcaaaaccgggactttggtactcagttgtacgttttttcagtaccagatcccggtcccgtacaactctaatttttgacaaaaaattattcataattttgctcaatgcaattaatttttaataaatgttctctttaaggccttcaaatttttaaaaaaatcatttgtttctgaaaaatcatggctaggagaacttaaaaaccctggtgttttcgaacatttttggccatatcatttttaaaactaaagaaattttttaaattttccagaccagtataaaacacttaaggctaacgaaagaaattaagaattaagacttggttacatttgcgcaaagttataagcaaaatttttaattttgctgggttttgagtaacttcataacatctcaagactatcatcataaacaaaaattttttaaatcggttgctaggctttttcataacaaaaaaaaaaacccaaaaaaagaaggccaggccaaggccgcagcataacaaatacagaaaattcctaaatcgttggctaggcctgcactatgctttaggaatcgctgaaagtaaaattttttttagttgggccaccatgactttgtcccgacaaaaacacgcatttttgagggcacaaatttgtcgccgtgccacggcattttacgcctaaaattgacgtttatggaccgcggtacaatgcattttccatgcctttgggggggggtgggggtgtccacattttgtgccaattcaattcgtttcgcccgggagggcgccgatgtgttcgttaaacacattttctgctgttgttggtgcgccgtgccaacaaaattttttttccccaaaaatatattacatttttaggcgtctgttttggaaagaaaagaaaataatggcctaaaaatttttggaaatcgaattttcaattttttattaatttttttttttcaaaaaatcgaattagatgcattaaaa

SEQ ID NO: 51906 - DNA, 1708 bp, Heterodera glycines
atgctaattgattttgtgaaaggtcagcaagaaattcaaattagtgaatattcgaagcagaaatacgaagctcatcttggcattgtgtattttatgaaaaagaattggcaatgttcaaaaatttcggagaaatttgaagaatatgaacggacagaatgccaaaaatatcgcaaatatttggacattttgtacgaatatttgttcagagagtacgtcggaattccaactgtgaagccaaaatttatatttaaagataaagaggaacaatttgaaattaatgggccaataatttatgtggtgaattgtttggtcaaaatttcgcgattttattttaattcaaaatggaataaaatttataaatataaattaaacaaattattcaaatcggtttataattttgaaccaaaattgttaaatgagaacagattgaattatggaataaaattggaaaatgtacaaaaattgccaattaatgaaatgattttggaattggcaattgacacagcgaatgaatggcaaacaaatgaaagtttaaacggaataattcgacaaaaattcgaagaaaatttgcaggaaatgttccaaaaagcggaagaaaatgcaaaaaaagactattcaaggagagtcaatattataaatgatgacaaacataaaataattatcttttcaaaattcgatgatcaatggacatgggtgagacttaacatttaatgaaaattaaataaattcaaaatttagacaaaagatgctttataattaattttatatcaatttatgcttatttagattaatgacgcattgttttctgagttcgtgaaaggacaagcggcgacaaattttaagcaattttctaagaaattcatcgaaaaatattcgaaaaaatgtttagaaaactatgaggcccatctttgtgttgtttattttatcagagagaattggcaacaatgtgaagccaattgtaaagataatgcaaagtgtcaaatgtaccgtaaccattttaacattttgtacgaatatttgttccgactttatgccgaaggtatatgctattatataatagtttaaaaatatttaaaacattaaattaattaagctaaaaacccgagtgagtcgaaacaattagcaccggtaattaggccaatattttttggtccaaatggcatagctctaagcttaattgaggttgttagcagttttaatcatgtttcgaaatattcttgcaacgaaatgtttgggcagatttccaaactgtatccaatgaaattggtaaatgaggtggaattcaattatgatgagaataataaagatgctttaaatgaatcgacggatttaaatgaatcgacggtcactgatgaaataattagaaaggaatttgagcaaaaaatgaaaaaaatatatgaaggataaaagtaaaagagctcgaaaaaccctttgtttattggataagatggaaaaaaattatgtcgaaaattaaaatttagatgaagaatttgatggaaaatttaaatttgtcgcatttaaaatttcaccattaaaaaccaattagctttactacaaatttataaaaaaaatacttttctttacgacattgatatatataattagaaacaaaccccaaagttttctttaaatttttaaaaataagccaaaattcaaaaatagaaaagaattattaattaattaattaatgtaagtcctcccattttta

SEQ ID NO: 51907 - DNA, 1531 bp, Heterodera glycines
atgccgttaattaatcttggctttcccattatttgtgctcatttttgccaaattttgtcaaatcctgacgataacagagcaaatgaagatggacgccttttatcattcaaccaaatcggcgaatttattgaggctattaaagagccaaattttaaacaaattatcacttttggacgcccaacagtgccaatcaatgaagtcactgaagaaagcgaagaagcggattggacagacaaattgggtatgatcaatttaaagtgccgatttatccgaactaaaaatttcatgatgtgttgtcctctgttttcggctcggccctttaattttcgtcccaggcatttggccatatcaagaagccaataaaatggcttttttgtcatcatttttacccccattatcctcaaagcataattagattatttcctgtcccctgaattcgtgtccagacatttgcgcctcggacatttgcgcatatgtcaaaaaatcgtgttcaaacttagatttttcaatcatagaggtctttaaactgcattaatttaagaaaacttgttcttttggtttattaggaacagtaatgacgtgttgtttgaaaaatttgttattttttcataaatttgctgacgatcaaattatcgaatacactcactttcaactgcttatttaaaactgtttagtccatctaggattgaaaaaatgtaagtttaaaccgattttggacataggcgcaaatgtctgatgcgcaaatgtccggggcgcaaatgtccggggcgcaaatgtggggtaaccccttagttggatcataaatccaagccataattaggtaactttacttatccatatttggccatttctacctctctgtcccttgccacacagcatttgcattaatggctaaattatgcttaacaaccattacataaaattggttaaaatattttatcctttgtttttaggcaataaaatgattcaggccggtgaacaatatggaacaactaatctgatccgggagatcaattcgcggattaacacagctgaaccaatcatttttgaatatatacgaaacgaaaacagtgtcacatgcgcggatcagcctgacaattgccaagagatggtcaaagtggcaaaagcacagctgagtgtccgactgttgatctccatggccaaacaaattgtccaagaaaaaattttgcaccaaatttacaacaatccgttacaaaaagcccgactttgcaaatggtggtaccggttcaggtagggcgttttaaaggcatttgaaaacagaattaattatcgattaaagtgtccaatgtttcaaaatcataaataattaaaattaaatctaacattgttggtatcatccaatagccctaactgtcctctattagcctagaaaattctgagaaatttcgttaaggggtcagaaaactttaaaaaactggttttcgaaacattttgcgctataactttttttaaattttaaagaaatttataagaattttctaggctaatagaggacatttggagctattga

SEQ ID NO: 51908 - DNA, 311 bp, Heterodera glycines
atgccatccgcttccgctgggacggttagcgtcagcaatggcaccaaggccaatggaaaccaaccgaacaaacacatgcaaatgttggctatggccggcccggctccgttcagcgactcgccggaggcgattgccattcgcgacgcggtcgactacacgcaaaagatcacgctggaaatggcatacaacaacacgggtgagcactcggcactgtccgcaatgactcaaataggaggagcctggggttattgatttggaagcggaacctgggctttaaatcatttaaatttacaaaattgaattaaaaacca

SEQ ID NO: 51909 - DNA, 417 bp, Heterodera glycines
atgctgaaggaatggacggaccgatcggacgaatttattcgaaacttcaccagcacgttcaacagcgacggaccggtcattgccaatttgttaaataaaatagtaaatgttttttcaattttcagattggccgttttctgagcagtcgcagtccgacgccggcattggaggagcaggaagaagcggcggcatcggacgacgacgaagacgaagaacacaacgaagcttaattgattcaccaacaaaaaaggtgcttaattgatcatatcaactaaccaaagaggatgagaaatgaatgatattatattatgttatcatattgtccttttgtgattttcttacaatgattgtgccttggcttgatattatgaaagagtaaagttatgataaatttttgaaggattttccgaattgtga

SEQ ID NO: 51910 - DNA, 851 bp, Heterodera glycines
  unsure (1)..(851): unsure at all n locations
atgaccgaaaaaaggttaccancggatgcaattaatggatacgaatgtctttgtgtactagactcatagtatanaagcattgcattatgcaattttaaacactctctctcatttctcggatgcctttattcactctcgaagcgcgccgtttgttttttctactcttgcaaattacctaaatatattatttcctgttttgaggtcgcacaccaagattntaaaaaacaacaaaaagcgccaaattcattcactcatattctcaagcttatccattacatttgaaaatgtgttcgatcagaccgaggtggaggatttgtgtactgaacaccaattgcaaacaattccgttcggtgagtgcggaaattttaaaattaatgggtttggtcaagcttgggttctctgatcatgaatttaatgccttgacttcattaaacagtacattggcccgaattcatcgtttccggcctgaccacaacaatgttcgtcggttcgttccctttgtgcttgacaatacggtgggcggtgccacgcgtcagcagcggggccttcgcgagaggggcgtcgtgtgggaattgtcagccgatggacggggtcggcataaatttaaaaaataaaatttaattttgatacaattttcaacagatgtttacgccttcccgggcccacttcagcgaaccgttgaggccattccgttgctcaaatatatgccatttatgccaaagcagaaaaaggcaaatgccaatttaagaaacggatttggagagaacaaattctgattgtgagcagagtatattatattattattgtattgatcatcagagaatatgtgtattaaaaaattgcataataaa

SEQ ID NO: 51911 - DNA, 1249 bp, Heterodera glycines
atgcccctatccgtcccaaggaatccctattttgaacattttggccctaagtaagggcgtgcctatttcggcaccttttggaatttcgcccttatttcggcattttttaaaaatttattactaaaaaggcaataaaaaagcacccataagggcctgcctgttgacctcttgaatttttcaaaattttgttaaaagtaacaaaaattttctgatttttaaaaataacgtaaaaatgaaaaaattaaccgaaaagtcgaattttcggaaagaaaactttttttctttttattcaggaaaaagatgagatttaattcttttgtaattaaaaatcgtgatttagggttcgggaaaagggatttaaatttcgggaaccgggattttcaattcgtgaacgtgctttgtaattggggatttagagttcaggaactgggattttgaattcgggaaacagaatccttagaaatgccgctattaacccaataataactttattgattcattaattgaggtatcgaatgacattatcaaagccccctttggtgtctttgccttacatgtccgacaaattgctcccatttgtgcccaagtcggcaatatattcgcaactttttgtttcaaatcaaacacaaaatgagtggcacgaggacacattccgtctaaaactgaatctagaaggctgtaagcatctgtggaaaacaaagcaaccgcaaatgatgtttaaaattgagaaggtaaaaaaaatatggcataccatttttttgaaaaaccttttttggcgttacttgcaaaatttgtatcttcggaattttattaaagggatacaatttttggtgctaaaattgacaaaacagtaagttttaggttctaaaaatacctaaaaaggtgctaaaatttgagacacataattatataatttaaaattcttgtcaaaaaaattaaataaattttgaagatgaatttttgagaaaatttttcatttcttcggagtaattttttcttttgaccatttattatataccccaaacccgaactttagcaaagtctaaaattcaaatttctcgttttcatttcataaatttacggcttattttaaataatttttcatatttttaagttaattttttaaggtgttgttagcggaatgtcccttctgtctacagtatacggatgacgaagataaattaccacatcgattaaaagcgtgcaacgtaaaaatttttcataatgaacactgaactttttcaaatta

SEQ ID NO: 51912 - DNA, 822 bp, Heterodera glycines
atggattatccaccaacggattgtccatttatggtttatccactaacggatttgtccatcactgacggattgttcactcatggtttatccactaacggattgtccactgatggtttgtccactgacagattgtcttgaagccccaaaaaacctcgagaacgttcttagcagttttataccatcgcgctcctcacaaaccagtttttttttatttaagtattaaaacaacggataacaagatatgtccagtgtgtcgtgaagacattctgtttctggaatccggtaaaaaagaccaaccagcgcagaccaacaccataaaaaaagtggtatatcggaagatgaaaaaggaaacggttcacgaatttgtcatcagacagccggtcctccaaaatggcgaaggcggtatccgttttacgtacgaattagagctggatgaaaatggcaaaattagtgaaaagaatgtcaatgaccagtcattgaaagtggttgacgaaagagcggtaattatgtttatataatttttaatttaattttaatcattagtaaaatggcattgagtttaaaaaaatttatggactgattcatgatttattgcatttagtgaccatactattaaaaaaaattctaaattaatattttgatagagaacacttagagctatttaatgatatttggttgaatttgagccaatttatgaatttatatgtcttacaatttttgttttcgaaccccttggcggatttaagatatgcccatagtggcggaatctaagaaacaacctaacaccatacatttgtatcagggatgggcctaaattgaaaa

SEQ ID NO: 51913 - DNA, 734 bp, Heterodera glycines
atgtcatttcggtcagcagcggcattagggcttaacttggtaagccaaacaaacaaaaatttttttttgaatttctccgcctgattttcgccaaatttcagcgtaaagcatccaaatttgtgttgttcggcgcattggccaccggtggcagtgtgttgctgtactcgttggagaatagcggtgcgcgtgcctacgactttgttgtgcacccgagccatttgccatggtcccacggcggactgatggacgcaattgacatgcgatcgtccgttttttttcttgttccacatttaacatctttattttaatgtgccaagttttcaaccgtaatgtctccaattgcctaaacaaaatttggatttggcccgatttaaaaaaaaaaaatttttttttttttaatcaacgcctgaaattaaaaaaaactcgtcgtccaagaaaccgttgaaatcaatcctttctatttacctcgcaataaaaagggcacttttctatttagtttggtggatatatgcaagcaaaaccattatggatgagttttttggtccctcaaataatacccaaaattggaacccctccatgttttttatgaattattttattttttcagggttcgtcgcggttaccaagtgtacaagcaagtgtgtgccgcatgccattccttgaaattcatccgttacaaccattttgtcgacaatttcatgacacgggatgaggcgaagacggaggctgccgag

SEQ ID NO: 51914 - DNA, 1011 bp, Heterodera glycines
  unsure (1)..(1011): unsure at all n locations
atgaagcacacaacccgcatgctgttagtgccggaggaactgtaccgctccttgttggccaggagctcggctcctgttgccgacgcatcctctgcgaggggcggcttaccgcagcatatgacgccaattgagcacacggcaaagcgcatggcgcgcgctgcacacagcggcggcgtcacccagagcacggatggcgtatctccggcatcgaaacaacaccttctgaacgatgacgaacggttgatccactaccaacaggagttcaagaggttcaaaaaattgctggaggatgagcaggagcgtccagcgcctgttcgtctcacccaactgcccaccgacgaagcctcgaaggggctgctgcgcgatgcactttccgaggcggcgcgaacaattcaacaacaacaacctcaaccaagacagccggcgccgcaccaacaacaacagcagtcgtcgcagtctgattcgtcaccaatgaggcagcctccacgtcgcagacaacgaccagccaaaaggacacaccgtacgacatcagcctctacggatggcgccgaagctagccgcttcccgtcatcgtcatctgccgtctcattgttgacacgcactgataatggaggaaaaggaggagctgagacgactgagcgcgaagacagctccaacgacgaccgaccccaaaatgtggcggcagttgaccccgcaaggaaaggacagcggaaagaagcggacgtgcaactgcatccatcaacatcgacagcaactgcagtaccagcagcagtcttacgtgacacagagcagcggaaacgacaagccattgactatgcgttacgcaacgcgggcacgctgggcatcggagatggacagcaggtgtaccggctgatgcaaggcgcgtaccgtccgatncagaacagcgatttggatgcgttactcacttttcattttgctgagccccaaccggagaaggcaccgcctgggtacaaaacatttattggcaatgctncgcaagatccgcgcatg

SEQ ID NO: 51915 - DNA, 2110 bp, Heterodera glycines
atgtttcttctgttggtcggttgtggcaccattctttggttcttttttggacttttcaaaaaacgacgactccctcacaaaaaaatgtaagaaattcaataaaaaaatttgagaatttcataaattcttcaatttttcagttttatctgcagcgattgttggcttttggtgttcgattttcttgcgccttctcagctcggcctcgaaattgcacttatcagccatcgctttgacttttacgtcgacgaacacttcaagacatgcaaatggaaattgaacaaacaatttcttattcaatgggacattgaagaaaatgggaccaagcaaatgcaaattgtcaattccgatggaaatccattgccaatcccgcaaaatccgttgcccaacaaagtcatcggattccgtgacattcagatcatgtaaaaaaaactgatttttttttctctaaattttctgaatttttcagctacatcgatcaaaatgtcgtcgcatttctccgccattttcaccgtcgcattttcgctgtttgtacaatggatttgtacattatcactgaaaatgttcgcattttggactttgttttgctcaacatttggccaatgctccgcgacgccattcgtgttatgtatttgaacaccatcgcttttcgccgtttgcgccaattggccccgtcactgctcagcgattgtccatcacttcgctttgtctcattcaaagatgccattctgcccgcttttccgcccgatgacagtgccaatgcgtcggatggccaaacggtggcaaaatggtcgtttacgccctgcccggatggtcggtccaagtggctcaaatgctttgtgaatgcaccggtggatcagtggtcgtcaatgattgaacagttcaaagcggtgattatcactatttaattggttttttctatgattttttgtccccatttttaggcattttccaatgcttcttcttcggctacttttttcatttcttttcattttccgccgtcttctccgcttgacttcattgtgccatttgatttgatcaacgaagtgactggggagcaattgacacttggacaatcgtcagcaaatgcttgttggctcacccgttgtccaattgcatgggatgagcgaaattgggaaaatatgaggaacgaaatgtatgttcgactgaacccaattgagattcggatcagagacggtggatacggtgatgggtgagcaattttttgaaaagtttcattttgtttatgagtccattcaactattgaacaatgtttttttcagtcttctcctcgacgccgcttctcccgggccgagtgatcattgatcagcagctgcagaaattaattaattggccgattgcaatccgtgattgaaatgatattggggcattatattgtattgtgtataatttgtttgtaggtatttgacctttgcttgctcgcaaatgcatccatttccattgtacatacctatgtatatatatttatgtgaaattcagtgtgggtaatcgttgataaaaatgacatgaacaaaagcgagttgaagcattctttcctttagtgatctcaagcattgtgcaaaaaactgcatagtcctggtcaaaattttaggacccagaagtcctgaaaaaagtgatttgttaatcctgaaaaccggaccgggtcaaaattcttttattctttccggaattttttcaaaggtccgaatttgatacatatctcaatttatgaaccaaaacaaaaattgatcagttctcaaataataattcattccgctggccactgctggtattacataaaatggcattcgcgttaaacgcctcattccttttatacccgacaaatgccgactccgacttttttcccacccccgatggctctgggcgctatgctaatatttgctgtcagggctcccactcgtccttgaatggcaaggacgtccttgaaatcgggtcctctttcttgaaaataaaaaatgtccttggatgccaaggacgtccttggaaatgaacatttggaaaagttttaaaaaattcaaaaaacattgaaatatattaaaatttttcagataatttctttcaacattttttacaatttagggtttttaattaa

SEQ ID NO: 51916 - DNA, 613 bp, Heterodera glycines
atgatgatcattaatttcggtcctcataaattttctattttaatcatcggtgtcattactgtccaagtttgccttttctcgtccatttcatcaaattcaattcgttcaaaacgccaatatgttcagcaacaacaacagcaacaacacaatgaagaatattttgtccaacaactaattggtggccaatttcaacaaaattcttatgttgtgccaaatcaacaacagcaacttaatccaaatttggcattacagcaacaacaaattgtgccaattaatggacaaccggtaaatgcttaaacttttaaattatttgcccaaattttagcccattttaattaacttaataaaaaaaattgttttttttttccatttaattataaattttaatttgaaattattattatattttttcttccaactaaatcataaattaaaaataaatttcaattaaagcatttaaactcacagccattgccacagcaacaagaaagtgcacaacaacaaatttcacctattaatggacgacaatctgtatgctaaatgttatatgtaaaaaaataatgaaataattttcagtaagcaataaccaattaaattttatttaattatttta

SEQ ID NO: 51917 - DNA, 503 bp, Heterodera glycines
atgtcaaaccaaaacagaatgccaatgccaaacactaacaaaaataatgctaaacggcttacacgttacaatgaacagtatgccaaaattatgttggcattgtccgccggtgcctatttccgctcagcgcattcagccgaagaatgtgtggcgaagtgagcgggatttgtttttcatattttataatagaatttcaaattaatttttaaattaataaaaaactcttaatttataaatcttcaccagaaaaaaagtgaaatttattacaaaaatttattttattataaataaaaaactttataaaattaaattaataaatatgttaaatattataaaattgtcaagaaaattgaagcctggaataaatatttataaaaatagagaataaattacaatcaaattccacttttaacagttggttgccagaaccgaatcaatggcatatttatgcatccataaaccaaacatgtgacattcttgacaacccatgctcatcgtataca

SEQ ID NO: 51918 - DNA, 294 bp, Heterodera glycines
atgtctttctccctaaggcttcgctactcgcgaaacgtcgaagaggaggagcggcgagtgcgcgaagggcaagagaggcgaaagcgcgaggaagaagaacgccgaaagcgcgtggatgagcagcgccggcgatgggagcagcaggaggtggagcagttggagcggatacggcgtgagagagaacgaatggaacaggcattggaggcgcaagcgttggaccgcgagagggtggagagggaccgcatcggccgcgaccgggcggagcgtgaggcggccgaaaaacgacgccgcgag

SEQ ID NO: 51919 - DNA, 66 bp, Heterodera glycines
aaagtcatttagtggactaattacctaattaattgcctttataaattttaaattaaagaacaaatt

SEQ ID NO: 51920 - DNA, 1128 bp, Heterodera glycines
atgtttttgagtggaaaggatgatgagtcctcgatttcggctattgataggaaactttggcaaggaaagaccacgataaaaatctctgatttagaaaaagctcaaaatgatatggggaaattagaagatggagtgaacagagcttttcgctgcctgaatcgttccttgaaccaaaaagtcaattgggtgaaagatgtcgtggccaatacaaatgccaactttgagactctgaaagtccaattcgagaccttaaccgaaagagttgatatgttggaccaagacagtgatgggacgaattcaggtgggactgttagtattactaatttgaatagagcgtcgcgtgcgctgtttgtgacgccaatgggcaatgcacagcccaaccaagttgtaccgaaccaagtgccaattcatcaattatcaagcgaagacgaagatgacgggccgactctttttggcctgaacatgctctcgagcggacccacagtggggtcaggtttggaaatgttttgtgaggagtctgtttttgcatttgacgattgggctgaacgtttcaaggattacctgtccgtgtcaggcaaggcttacactgaacaagaaaaagtcacaagactcaaattggctctgagggacactcctcgggcactgtttaaggaattattgccagcacaaacggacactcttgactcagcattgagcgaacttcgacagaaattggactcccctcagcgtcgggaaattgcgaaacgaactttatcgctgtgcaaacaaagggaggatgagacagtggcgcaatttctgagacgcctaactcctttggtggatgcgacaaattcgtcattaaccggtgacattcgtaaagagaaaatttgcgaggaatttttggatagattgaagcctaacattagttttctgatccgtctggtgggtttgtcacgagcaaaagacttggacctggtaagagcacaggcagaggagctggaagctttactgttgatgaacaaaggtgatgaagcatcacgcctctctcaggcagtccatgcgctgagcaatcagtcaccacagtcgaattggtctacagaagcgaacccgaacaatgaccgtgctggacaatggtcgtcaggcaacaat

SEQ ID NO: 51921 - DNA, 383 bp, Heterodera glycines
atggaaaatggttgcggattgaaactgaggaatggaattgaaattaaatgtgaaatggaattgaaattgaatatgaaaatcggtgaaagtgattgtgatccgaattccaagatatttcagtgaaaaacggccaaaaagggaaaatcctgagggaaggtccgggaagggcgcggggaggaaaaccagaaaatgaattttgtccgggaatcgaagaaaggaaaaacggaaaaagggacggagaagattttgcttctccggagttgctcggtgtggaaagtccgggatgagccaactgatcttgcgtttcccacggggaaaaggatcagcgaaaaatgctgatcctttatcccgccctttttattactgtctgtgtgggaaataaa

SEQ ID NO: 51922 - DNA, 401 bp, Heterodera glycines
atgaatgaagaacaaatttctgctgatgatgctattgtttctgccacaagtgatgacaaattagagtccttttcgaaggaaatggctggtttaataatttctccgcatgatggagtaaaaagtgagaaaaaaacaccatcggaaaaaattgccactttttctgatggattctccaaaaaatttttttgaatttcttaaattatggtaacctaaatttgaacaaaaagccgaaacccataaaagaatccaaaacttattcctttttgctttcagtacaaccaaaacataaatatgcgattgtttgcggaaagacgcttattaccattatgggcaacagaatgttgatgacattggttggggttgtgcatatcggtcttttcaaactggttgttcatggctaa

SEQ ID NO: 51923 - DNA, 174 bp, Heterodera glycines
atgcaaattcgtggaaaagatttttgctttcaaaaatgtactggtgaggccgaatggtaattgtggcgaacgaatcgatgtgttttgtgatttgtatttggctataaattatttcagcagaaagcgattttttttcattttattacaatgtgtaattttttctatttgaataaa

SEQ ID NO: 51924 - DNA, 90 bp, Heterodera glycines
atgaatttggttgaggaaaatctggaatcaacttccaacgccaattcgttaattgaaccaattattgcatcaccaaatgcacaagggacg

SEQ ID NO: 51925 - DNA, 641 bp, Heterodera glycines
atgcgccgggagacagaagaaatcactcgcgaacgagcagttcatcgtcagcagtctcttcggcgtcctccgttggctcggacaatgaacggatcaatcggcggcacaaaaatttacactccgtttgttagggtatttttattcatttaaaaagggattgtgcgttttagagttcgtatgtcaaccaattgtatatgaacgcagcttttggctcgggcgatgagtcatcttcgaccgaaacgaatgctgtggacgaaaagcggaaggtaacggagaatgatgggggagtaaagccaaaacgcgaattgtcaaggctcgcgtccgaggacttctcgagcaaatccccgtggacatttacacggagggagcgaaagggccggcggagtgtgcgatttgcatgggcgactttgaggtgtcactttggtcttcgtttatgatttatggaaagagcatttgctcctcaggagggcgactccattcgctttttgccctgtgtccattcttatcacctccaatgcatcgacggtccgttccaactgtcccacagatgtcacttttcgttttcagattggctcctccgctccttcacttgtccgtcctgcatggaaccggtggactccgcgctgctttccgtcttcacg

SEQ ID NO: 51926 - DNA, 291 bp, Heterodera glycines
taatattacaggatttattcaaaatgataagtgctcgaagatggattcatgttgctcatacaaaaattttaggaacatcagtcaaaaagtcgaaattaaagtatttggaagacttctacatgggaatgggtgaaaaatgcatacaaagggatttggggataatttcggtgtttggagacagctgccgccatttcgctcccttattccatttaaaacgcggaaaaaacaccgatcacagtttgttgatgttttgggttgtcacttctccgccttctttcgctgtgttctgtt

SEQ ID NO: 51927 - DNA, 61 bp, Heterodera glycines
agactcaactgtcgaggagaaaacaaaagaaagtgatttatcatcagttcagcaacctaat

SEQ ID NO: 51928 - DNA, 194 bp, Heterodera glycines
atgcgccaaattattaatttttatttatttgttctgttcttcgcacctaattttgctgaaaaacttcggtatgtacagattatttggcgccacggggacagagcgccgctggaaaagccttaccccggcgatttgaatggtcaacgaaaaataaattttaaaaataaataattaattaattaattttcagatga

SEQ ID NO: 51929 - DNA, 1208 bp, Heterodera glycines
gatggaatgcgacaaatggaggagcttggccaattcctccgggagcgttatgccgctgcaaatttttgccccaacattttgacagaaaagaggtaagaaagcattgattgattattgattgattggggatagcaatttgtaaatatttatctccgaaatcaaaaagtgcggtcaatttttaactggaatttaatcagaccgctatattagaaattgaattaaattgtaaggccaaattgggaggtgactgatcagttcgtcactgcttgttacgtcactgagaaatattttaaaaacattggtttaatatataaaaaaaaattgtttctgttttttaattgttttagttttcacgcaatttccagataagtcctcgattaatttttttttaaaaatgggctaattagctttgagacagagaaaaagaaacttccgcgagaggaagtaatggaccaattaaggagacaattgaacgccaaattgggaaggttgacaatagaagttgtttgaataaaatgtgctaattaccgaaaaatcaatttggggaaggacgaaccattatgagaataggtaattattttattcgtttctaagataatcattcgttccaccgacgtcgaccgggcgctggaaagtgcgcaatcgctgctaagcggaatgttcccgccacagtccgacggggaccgattcgacccggcgctgaactgggcgccaattgcgatacacgccactcgggaagcgaaccacgactcggtgagacagacagagttcgaaaatgagacggacatcaataaattaaaattcatttaaatattgtttaatcaaaaaaaaatgaaattttggcgatcaatttttgggaaaattttcaattcttcggggagtattttcttcctatgggtgtatttccccgattttattgcattgtaatggaatttttcggaaaaacgccaaaaaaggcaaaaaaaaggcttatcttttaaaagcttttgttttatatttttcagttgttaaatccgtccggttttccgtgcgcccgttataagcatcttcgccaaattgttgccgatgagattagtgcacatttgttggacaaatatcgcccgttggtggactttgttcgtccccacctgaacatctcgaaggaaaaaccaatcaaaatggtccaattaatggcactccgtcacataaagcccgaagtaaaagcgtag

SEQ ID NO: 51930 - DNA, 1009 bp, Heterodera glycines
atggaaatacgacaaaaaagttggcttccctatttcaatggaaacgaagaaattacgcgtttaaatggcggtaaaataatacaaaaagcaaaaaaaaatgttaaataattattaattgaaaaataaaattaattaaaaagctaaaatatatttttattttattatttaaactttcaggagttttgttgaacgatttattgcgtcggtttaacattgtttcacagggaaacgcgaagaagcttgacgcgagcaaaatggtgctttattcttcggtaaatttttaaaatacaatttttcccatttttaataataattaaaataatattttactgttctttcccactttttaaataattaaaataatattttgctattttccccattttttaataataattaaaataatattttgctatttttttcaatttaagcacgactcgactctgctcggccttttgtccgtccttaacgtaaaagtgccgagcaatgcactcgatttgcctccgtattccgcttgtgccatgatcgaattgtacgagaaacgcaaaacccagaggcaacaaaaacttttttgtcaaagtaaaacgggaagaaaaataattttaattaatttatttttaatttagttattttatcgacgaaatcaaattttggagccaatggcaatcgccggatgtgaagcgaaatgcgatttgatcaattttcttcaaattcttgagcctcggtcaatccgagggggcgaagaggaattgaaaattgtaattaaattagcaccttaattaagttaattataatgtgtaaaattacagttatgcgatgaaaaagtgccgaattcggccgcccggcgcatgggaaacattcccggttttgcaaaaagtttaattattgccatatttataagcattgcagccataaatcacggaacacaaagcacagtaataaatgtacggtaaaaaagttttaaaaattctgcattttctatttgttaaaaaacttcaattgaaaaata

SEQ ID NO: 51931 - DNA, 1150 bp, Heterodera glycines
atgttccaacttctccgtattcagcggatccaattgattgtgcaaaaacaggcaaatggaaagttcgttgtttcgtctttttgtcctccgtttcttcgtcttgtcttcatatttgctttcgcttccgttaattaaggctgtttctcgtcctccgccgccgtcgtcgggcaaaaaaacggatgcaaaaaccaaagcgagtttcactgatgtttttgttgtttttcgaatccacaacttttctttaaggctgtctctcgtcctccgccaccaccggccaagaaaacacataaaggcaaagtgagtttacctaattgcctatttatttgttttgttgcctgggatttctttttcccattcaaaattcgtttttaaaaggtcgttattccgccgcgtcgtcctccgccttcggataagaaaccattcatcaaagccaaagtgagttcgttcaggaagacaccaaactcttagttttcgacaaaaaaatcgtcataatcattttttcttattttatgaattcgtttgttaagaccataaagtcgaccaaattaaacattcttggtatcattagctaaattgatcaaattttttgaagcttggcatatagatagagcagtttaaggactattgaatgataccaactatgttaaattgggtcgacttaacaaaaagttatgacgactttttggtcgaaagacagtacgagttgggtttttaccgttcgttcatcatcattttttcttgttttatgaattcatttcttaagactctttcgcctcgttttccgtcaccgttcacgaaaaaggagccactcaaagtgagacacttcccccttttgctgtctctttctttttctcttccgtttaggctgtccctcctctttctcgcttcccctccatggaaaagaaaaacactgtgaccaaagtgagttttcggcttttgcattttttcctttcttttctcaattttcccttaattgtttaagattgtgcctccttcaatgctttcgaaaccgcagaaaattgaaccattcaaagtgaaccaatcattttttgcccattcttccccaatttgcctgtcatttcctctgtttaagccacagccatcgccgatgggccttccgcatccgaaaaagggcgtccgcactggaatt

SEQ ID NO: 51932 - DNA, 2669 bp, Heterodera glycines
atgaatgccgaagacacaataacaacaacaataacattcactttgcctaggtcggcttttttgttcggcgcgctcggagcagcagaagttggagcagtacgaggaacaagcgaaggcggaacagccgaagaagggcccgagggagcgattggagtgggagaaacgacgacacccgcggcagagggatggacgggcttaagcgaaaaaagggaatgaaaaagcgcaaaaagaaatcggcggcgtggacaaaacccacttttttgtcgtaagcaggcgaatttggccgctttttcttctcctttcgaccgaaacacatttatcagtacaggcaaagaaaatattataaattataatgctttgagcaaaaaattataaatttagaaattattttagcaaaaaagaggaaaaattagcaaaaaacgaaattacggaaaaggattatcagagaggaaaatgacgcaaatgaaatgatgaaatggagagcaaaataattcatttatatacattcagggatgggccgaattgaaaaataaaaagcgaaatgcgaaaaagcaaaactgaaaaatgcgaaatgaaaaaaaaagttttgaaatgcgaaacggcaaaatgtgcgatataaatttgactatttttttcttcaaaaccacttttttgcggtgcaagaaaccggaaatttttcaaaaaatatacaatataataaaaaataaatattttaataggctaaatttttaattcttaaccaagtaaaaggtatttcacaaatgtttttagtatattcgcttgaaaaaattattcaattattttatcaaaatcttttttttctgatttttcattattttagaaaatttttgggaaaaggagtgactatttacacgttttttacagcgcgattatttcagaaactttttaggaacttagaggagggtacagcggtgccgataggcgccgccgggaaatttttaaaaatttcagttcaatttattaacagaaattgtgcaaaacttactagttttttgaaaaaaaaaattaaaaaaatttccgacttttcatcaaaaatttcggaagtcggaattccgaccccaaaaatgtcggaaatcggaagtctttccgtgccatacctggtgcctatcgacatctgcgagaaattttatgaaatttaatgcgatttgttaacagattttgtctaaaattgaccaaatgacgcagtttttgactcaatttctacaggattattaagtaaaagcctatccggcggtgccgataggcgccgccgggaaaatttcacaaattttgaatgaaatttgcgatgaaaaatgcgttaactttaattaaattcagggctgccaagtgtcctttttttaaagattgtcctttattttaggcttccccaaactttttaaattttttgtgcttaatgatttatttcgctgatattttatttatttattttcgttttaatactattttctcttcctctctttccctctcaccataactttttgttttttttgtgcacacaacctattgtcagacgcataactatttcccatttttagcttttttacatttcccaaatgccccaccaaaaatgcaaaaattttattgtgaaaattatgcaaaagaattccggcacataaagaaaagtcgaagaatttgccctttgtatcgtctgcaacgatgatattaatctcctttccattggaaaagctgccatttctcagcatcaaaatactggaaaacaccagaaagcggcaaaagcagcaaaccgatcaattccattgcaagaatttttgccaaatacttcggccccatcgactgaagatcggaaaattcttgctgcggagggtaagacattcaaaatcaacaaaaaaattcctctctcacaaggagcctgggcttatcacaccgcgcagcactcccattctttcaattccgttgattgtgtgtcttcttctggactgttccgaacaatttttccggattcggcaattgcaaaaaaattcagttgtgctcgtataaaaacagcaaaaattttgacaggtagaagaattaataggacggtaaattgactttttacaggggttctggcaccatattctgtgaaaagtttgctcgcccgactgggaagtcaaccgttttctttgtccatcgacgcttcgaattttggacatgaaaaactctttccattggtccttcgtttttttacaaaacccaacggaattgaaataagattgcttgaccttgaagcattgcccggcgagtcatcaatcgagtaataattcaaacataaacttcttaaaatgatttaaatcagggttcatcaatggattaccaaaatcgtcgaaaagcacaatttggacttctccaatttaacggctttctccgccgacaacacaaaaagcaattttggtggggaagagagaagaggagaaaacaatgtcttttttcgacttcgtcaacaacaagaacgattgatcggtgtagggtgtgtctgccatgtattgcacaatgcagcaaaaagagccactgacaatttgagaatagctggcaatgctctggacattgaagcagtggtttttaaattggctggccatttcaaaaactcaactttgcgaactgaggaattaaaagggttttgtgacgaattggaggtgcaatcccgaaattga

SEQ ID NO: 51933 - DNA, 357 bp, Heterodera glycines
atggttaaattttggttgacattatttttcgtttttaccggcaacaatttgtattcaatttttgcgcacaaaccaaacttttctcagtgtggcatttccgactttgagcccgacttggacaatgtgccaaatgtgaaaatcggcacaaaccatgtgagagaaagaaacgaatttttaattttaataaaatttaattttcaaaaaatttattgtttaagaaagtaataaaaatggaggaatttgtactagtgtaatataagcaaatttagatatataaaggacaaccagtggaaaatgccaattcaatgccatggatggtcactttgctttcattacaaggttttgttaagaaataaa

SEQ ID NO: 51934 - DNA, 1056 bp, Heterodera glycines
aagccaattgcattcacagcaaatgctcgtcccatttgtttaattgaatatggttgctaattaattttaaatatttttaaattcaaaaacattttgcttatattttcaggctcgaataatcattccacttttattgttgctggttggggtattacttctccgtactgtttgaaagacagtaagccaggtccaagcaaccaattgatgtacggtaaaatgaaaatcagtccaccagagaattgtcaaagtgcatcaatcaaaaaatgtaattttaaattgtaataatgaaaaaatgaaaataaaacattgatttagtcaaaagagttgcaattgaagatgatgaaaattcttctcatcataataagcattaccagatcatttgtgttgtgcctggaccgagcgtaatcgaaagtgtaaaatttgaaaaataaaaacaatttttttttaatttaaattatttttatggtgacagcggtggtccattagtgcgtaaaattggccaaaataattgggtccaagtgggcgtctgcgccgtctgcacttcaacatcagtaatattatttgtataacaatgtttgcaaaaacaaggcttttcctattttttataaatttaaaataaaccaaatttaccatttacattcttctggagcaaaaaaactcttttcaaataaacataataattagggatgatatttttatgttttagcctatttttttcctgaactcccaatgtcctaaaacacacgaaaaacaagttgttttttttggtggttcttaagctacttttcgagttattagcaattatttttagttttattttttatttttagagcctataaattgaatagattttgacattttacacctaaatttaagacttttagagcctattttccgggattttttaaagcctgatgcctaccacctattttggttatcatccctaacgatatattctatatttttataatttttcttttaattcaggtcaatatgctcaaattgattgcaattggattgaagaagcgacaaatggagaagtgaagtgcatagaaa

SEQ ID NO: 51935 - DNA, 476 bp, Heterodera glycines
atggacgtttcttcccgcgcatgtccaacacaaaaggtgcagagaacagcgccgcaaggatcagcggaacccaatggtttgaaccatggaatgggaagggtttttgaatgatcttaatttttgaaaattcaaaaaattccaggcaccccggaactttagcagccaccaaattcacagcaatgcgcaccagtgaataaaaggaagaggacagcaccttcgaaactgcaacaacaattactaactaatggtttttgatctgaggggagcacaggaacgaaattttaattttagaaaatttgacacttgaagcggcagcggtggatgatcaaactcagcaaaccgtccaaactgagccggaaatggtgagtggtttagagcttgcacaattcatcaaatttgtccctgttttttttcagaacctacaggcggcaccggaggatctgcaaaacgttgtggaccaaaatgagtcggaagtg

SEQ ID NO: 51936 - DNA, 517 bp, Heterodera glycines
atgttctcaaatgccgacagtttggtgcagcgaatgcgccatttaatgaccactggggaaggcgcggatgtgcactttttggttgggaaaggagacgaaaaggaggcgagtttttggcagagatgctgagcattaaaaaatataatacaaaatttgcaaatgatttaaaattatttttcagcttataccggcacataaacttcttctgaagactgcctcaagcattttcgacaaaatgttttcaaccaacactttcaatgtgaagagcgaagatggtatggaaattaatatgtaaaattgaatgaattaatgctaaatattttcgcatcaattagccacttgggaagtgatcagctcagtggaagtgatcgatgttgacgttggaacattcaaaacaatgttgcgcttcatttacacgaacgaatgttgcgggttgaatgaacacaacgcaatggaagtgctttacgctggtcaaatttattctttatttatttccaagtttataattttaatttaa

SEQ ID NO: 51937 - DNA, 853 bp, Heterodera glycines
atgggtcatcataattcagcgacgttcctttttggcttacttttaggtaagaaatttaaaattatttataaaattataaatcaaatattatttttcttttaaaggttattttttgcccgaattggcggcacagcttagcaaagatgagcaggattattgcgtcaaattcagcaacaatcttcgcagcaatgtggccactgggaatcagcagaacaaaggcggcggcaaattgccatcggccacgaatatgttggagttggcatataacgagacaattggccaaactgcgcaagtgagcgacaattttttattgaggccttgtggagatattcgtgctttgtcgtttcttaaattcagccaagggccacgaatgattaaaaaaatgcaacacataaatcacaagtttaagcaaaattttttaaaaaattttgaaaatcaataatctgctagtgaattcctagagctatatatatgtataatgatactataaaatattaattaggtagttgaatttgaatcaaaatgaattgaatgtgttacattttttagtttttatcccttggctgatgggtcgagagtctcgacttaagacgacctttcgatttttttttgtctcagtcctggaattctatgtatacattcctgaaatttgttagtattgactctcatccctgtataatgaaacatttcccacgtaggcatgggccgacaaatgccaattttcgcattccaacacggcagggctgggcgagaacatttactggtccacgaaggaagggttcagcaacagtaaactggggaagttgttcaaaacacaaattatgtaattaaatatttttagccgaagcgttaa

SEQ ID NO: 51938 - DNA, 773 bp, Heterodera glycines
atgaaatgctctacagatctaaagacatttgacgccaaggagcttgtcgccaattttctcattggcgacgagaaggcgggtgccaacccgccacggcgtgcgcgagtgctcgcgttcaacaagggcacggacgggcagcgaatcgggaaagaatttgacacggacgaagaggaccgccatggggactcagttttctcggtaccgaatacgaacccgtgggccggaccctcaaagacgaagaaataccgaaagaagggcaggaaggcaacgagacgatcgggcggactaccgattcatcaatctctcaatcgctgatttcgatcattttcctttcgttattcgtaccctccaacaccattttcctattcttcttgtcccatttttacttcacttttcaaattcatttctcatcggctggctaatctccggcccaaactttgtgcaaaacaattttgcacaaagttctttcttttcaaattccttaacttttcacatctgccaatttacattttaattttatgcgccatttctttgttcacacttttcacatcacaatttctgcccatttttttgtcccatttttcttatcgcattatcgggccgtctgtcactccgcccattttttcgaatgtctatttaagcggccctgcccaaggggtcgctctcttcgcttcctcaccccccaaccattcgcgtttattcgtttgctggacttttcgatcaatttttcaccatttacgcatttttaattcgtcgatcgcttcgttaataaa

SEQ ID NO: 51939 - DNA, 946 bp, Heterodera glycines
atgactttttcatttttcatttattccatttattatattgtgtatattaatcttaataagattttttcttgttttttattaatgcttaactttttattgcttttattggcaataaatgcgactaactttgatgagattgcaatggaagaatccattggagttgatcaaaccgacaaacagcagcagaacaaatccgatgaacacaacaccgcttcttctgcttctgctgatccgtcaccaccaaacatcgaatttgctgaacaaaaagcgcaaaaacaaaaaaacatcagtaaataaaaaataaatatttttaataataattggttgacaaaaaaaacataattttgttaaaagctgctaagatggcatttaaaaccaaaatcaacgattgcttgtcaccgaaaaattgatgcaaaaatttgcaaaaaattgggcatttgtcggggaacaattggacgctggaagaaggaatttgggaaatcaattaagcatttatttttttttattaattaattaattagtgttttaaaataatttcgattttttcagttaaaaagggtcgcactgatgctgaaaaatatgaaattgttaagcaataccataaaattaaagagcaaaagccgaaactgcgaaacattgacatagcggaacaattgaacatctcagagacaagccttcgcaactggagaagagaattaaaaagaagattttagaatttcacactaaactttttccgaattccgatccgatttcgtttttttaaatttatggtaaagattttgctcactgccaaatgcttggagtccaatctcaaaatttggccacgccataaaactgctgaatgacctaatctttttggatcagaaaattgagtgcatcttttagaaagatttcttttaggaaagtcattcaccgtgtggctttgttggtgttgttgttgcgaaaa

SEQ ID NO: 51940 - DNA, 947 bp, Heterodera glycines
agggaattgaacgtgttcattttggactttatgcccaaggcgtgtgccggccaaaaagtaagcgacgatttgtcacggaagcaatggcaaattaaaatttaaatcagcagaatcgcctaccaacgcttttccatggctttgtctcccgcttcagatcaatttgctgtcgcttggctctgccgatgtcactgatcaaattgggcacggcttttcaaaaatcagtggcaaatggtccgttgaacaggtcgaagtcgaggggggcgccacgcggcggcggttggtgttcctggacagtgccaatctgatccaatccgaggtggaggtggtgcgaagtgagtgccgtagcaaaaaggggggatttgctgagaaaaattacttatattgtgactgacattttgcattatttttaagagtcaaaaaatggcaaccgttggcacattgtgtggtccgatttgtcatgccaacaccacaaaatgatgctctctgcgtttacacttttgccgtcgttgtcctctgccggtttggcggatgcgttggaggcgccgcttcgcattgcactgctcggccttggcggtattggaaaaataggcttttgcaaaaataacttaaaaatgccattatcaggtggaattttggccaagtttatgcacgacaagttcaagcaggtgtgtgttttagtttgtctttttgtttcgctgtgttattttctgtatattaattgggcattattttcattaaactttttttgaccaaattataaaacgttaaatctccccccccccccctaaaaatagtctttccctttcagtccgaaattgttgcggttgaaattgaccccgaggtgttggcaattgcacgaaaacttttcgactttccgacagaatccgaccgattggaagtggtcatttgcgatgcgatggattttttgtgcgaaaattctgcgcaag

SEQ ID NO: 51941 - DNA, 1703 bp, Heterodera glycines
atgattttgcatggaaaaccgacggggcactcgggacttgttatcaataatccattggcaacaattacttatcttattttagataaaaagcaatcttcaccagttcggcaaattgatccgaatggcgaaatatcggctgtaaagaatgccgcttctgctgaccaaattcccgacaaatctgctgaccaaattcccgacaaatctgctgatcaaatacccgacaaatctgctgataaaatacccgacaaatctgctgatcaaattcccgacaaagcctccgctgccagaaatgccgcttctgctgatcaaattcccgacaaagcctccgctgccagaaatgccgcttctgctgatcaaattcccgacaaagcctccgctgccagaaatgcctcttctgctgaccaaatacccgacaaatctgctgaccaaattcccgacaaatctgctgatcaaatacccgacaaatctgctgatcaaatacccgacaaatctgctgatcaaattcccgacaaagcctccgctgccagaaatgccgcttctgctgatcaaattcccgacaaagcctccgctgccagaaatgccgcttctgctgatcaaattcccgacaaagcctccgctgccagaaatgccgcttctgctgatcaaattcccgacaaagcctccgctgccagaaatgccgcttctgctgatcaaattcatgacaaagcatccgctgccaagaatgccgcttctgctgatcaaattcccaacaaagcctccgctgccagaaatgccgcttctgctgatcaaaccgacaaagcctccgctgccagaaatgccgcttctgctgatcaaattcctgacaaagcctccgctgccagaaatgccgcttctgctgataaaattcccgacaaagcctccgctgccagaaatgccgcttctgctgatcaaattcctgacaaagcctccgctgccagaaatgccgcttctgctgatcaaattcctgacaaagcctccgctgccagaaatgccgcttctgttgatcaaattcccgacaatgacaaagcaccaggtgtcaagaatgtcatgtccaattccgtgttcgctgatgagcccaacaaaactttgtctgtccaagccgctacagatgaaaaaaatgctgccggaggaaacaaatcgaaatcggctgaaaacaatgcattgtcatctgctgccaatgatgaatcattagcttcagatgaagcggataatgccgtgccgaattcttctgatgaaaagtctgtgccaaaagctggcgacaacaccaaaaaatcagcttcaccaaacggtaattcttctgtgccaactttagttcaaaattgggcggtaaatctaatgggcgggttttcgatcaatgatgccaaaaattcgttattttaaatgcgaaaaaacttttaggcaaatccgccccagttgttcgaaacaattctggcaataatttggcttctccgccaaacggaacggcaacagcctctaagaatttgttggcataaacacagatgcattttgatgaaatgatttgataataatgattttattccattaaaaagaaattgcagataaaaagcaaaattatgtaaaacttaacttttaattttggttataaattttctaatttattttaattaattgtttcttagcttaaaatataatagctacacaaactgttgaattttttgaaatta

SEQ ID NO: 51942 - DNA, 611 bp, Heterodera glycines
atgcgttttacttcaatcccgttgattttttgccttattgcactggtttgcgtcattgcatcagttcctgaactcccgcaaaaattcctcaaatcctggtcggttgatcattccgaaaatttcgacgaatacctggaggtgcattttttgatccacttttttttgaattccaacttcaaatttgttttattttaggccaaagggtacggctggttcatgcgccaagtggtcaagcttggtaattttaatttttctatcattttcaattttttaatttaattatttattttgtttttcaacttttagccggcatcaccaaaacattttcgaagaatgagaacggcacatatgcatgcaaaattgaaaccaccaaaaagaatgtggagtggcccagcttcaaattgggcgaggagttccaagccgagtatttggacgactcagtgcctaaggtgggggcaaacaatttcattttattttaaataataataattattattattatttatatttataagcaaattggcttcactttattcacgaaaagatttaaaatgaagcttctaaaaagcacagagttctcaatatttttgccaaaaagaactccattttga

SEQ ID NO: 51943 - DNA, 1498 bp, Heterodera glycines
atggtaaaaaaaatatgaagaatattctatcccattgggaacttgaacccaagcgagaaataataaaatcagaaggtttagccacttgaccacttatccatatgaacaaatgctttaaatgaaaataaataatttaattttttttctcaaaaaatttctccttcttcatcattccctactcttttctcacccagacccccattcttaccagtgcaaatttttaccggcggtaccggtactagacaaaccggtaccgatactttgatttttgaaaaaaccggtaccggtaccggtaccaaaaaaaccggtaattaccggtcggtaccgctcaaccctactaaaattgaccaaatgtcgcactttttgactcaatttctcgttgcatatatttgtcagggacatgaaaatttttaattttttctaagatttgttaactaacggcgcgggattttgcgggatcccactccgaatcaccaattctttgtaatatgtgtaatctgcgagattgcggaattctgacggagattattgatatttttgaaaaattttgtggactgaatgccaaatatttttgaattaattaaataataaatttaattaaaattaactcattttcatcgcaaatttcattcaaaatttgtgaaattttcccggcggcgcctttcggcaccgccggatcggcttttacttaataatcctgtagaaattgagtcaaaaagtgcgacatttggtcaattttagacaaaatctatccgcaaatttgaaatttccggtctctagtaataattaaataattaaaatgacccactgccaattattttttttaattatccaactttcattttttgaaattctcagatcaccttcgactacaacccaacaaccgacgagctgatcgaaacgcacaaaaaggtggactcggaggagaagccggacatctacaaatacaacatcgactcggacggctttctggtgatggtgaggaaagagaagaagcaattttaataattaattattgtaattaaaattaatttggattttaaatcatattttatttattattttagcaaatggaatataacggagtgaaaacgaagcgcttctataagaagaatgaatgagcggagggtgaatgctttgtgggggtcaagaacgatgtgcagatggagaagaagcgacggatgattttgatttttgcctgattaattgccgatgttcattaattaattaaatccaataacacaaatttttgcccacattcataaaagcaatcagttaacacggataaagtgtttaaatgatagcaacttttaaattgcaagcaaataatgaaaagccaaaatgaaaaatggtcagtttttttaaattagttaatctgcgaaaaaataatttattttaccccattaaattatttattccaaaaattaaaattagaatattaattagaaaatgttaaaagatgaaaaatttggtatttctgctaagctccatcgactaa

SEQ ID NO: 51944 - DNA, 1596 bp, Heterodera glycines
atggttccgcctccaattccgcctccaccaccaccgccactgcttgcgcagcctttgccgttcccaaattgtccaccgccgtgcatgcaacaggtgtgaaaaaaatagtgtaaattcataaaaacatttagcatttttttttcaaatattagtttgtgatgagtttgccaatgccaccaccaccaaatccgataatgttttcagctccagcagtaattttattttttcaaaatgtttcaaattttttaaaaatttatatattttttaattttaaacaaacattaagccacaatttttgcctcttccggatgccccaatgccattctgccctccgatgtgccagccggtcaattggcgttaatttaacgcataaagtggaaaaatcttatttccagctggtgatgccgccggtgccatttccgcctccccctccgcccccgccattggcgccagccgttgcgctgtcgccgcccctccccgtgccgctgaacaccttctgcatgacggcctgcgcgcccgacctgccaccagccattctgcaaccattgccggtccctggcgcggcacctcaaatggtcaaaaataaaaataaaaattgttattcactaatttaaagtatttttgcagtaacctatagaaggtgtccgaaaattaaatttcaggaattttaaaatattttttttaaaaggctaaaaaagttggcaaaccctttttcgaatggcacccgtttttagagcccggattcgctatttcggtttataccattttcgctaacttattttacattcttttttaaatagatcgttccaattccacctgcagtgcctccgccaataccgccttcgcctccaattgttttggcacagcccctccccatggtaccgccaccgttgcccgctgtaaataataattattaaaaatatataatttaaatttaaatttaggttccgccggctgtcacattttgttttagccttcccgtcgcgggcggtatttttatgaatttaaatgatcaaaacacaaacaaataaatatattatggttaaaaaagaaaacaaattctaagtgatataaagaaaaaatttaattaatttttttcgaaaaaaaattatgcataattcttggcattttttttggcatctttattcataattgctctaagtgcgggataaagcaattatttatttctggtttaatggaaaaaaaaaattcataggcattcctcctccaccactgctgccgccacctccaccgccgccatttccagttcaatttcagccaccaccatttccacctccgccaattggtagaaaattttataattaattctctaattaagtaactaattacccatctcattaagatttaattatagcatttaaatatttaattaaatttattgtttttgattttcagctcctggtggttgcatttgtccgcccggctatatgccatgctccgctcatatgtgctgcttaagaagaaggaacagaacgccaaagtctggcaaaagtgccgacaacagaactgaaaatggccaacaaacgtgagccaaaaaaaatttttatttaaatattttttaattaccctaataaa

SEQ ID NO: 51945 - DNA, 1587 bp, Heterodera glycines
atgattaagttgttgccaccacctcctccgccaccaccaatgccactgccaccgcctccggtgcctgttccgggcccggttatgccacttggaccaccaccatgtctgccggtaattaattagcgtgaaaataatcgcggcttaattaatcgtcaatgtataatgtttttttcaggtgtgtcagccggcctgtacaattcattgcattttcccgcctgctgctgcaatgtctccaccaattatgcagatgccaccttttgcttcacctgtgccgttcccgccccctcctccgccaccaccaccaccgccaccgcctgtgccaatggtcgcacttttcgtaaacaatgtttttattattttttagttttggcattttatttaattatttattgtcgctcctctccccgaaaaatttgtctgcataccgaagacacgaccttgaaaatcattaaaaaagcacaatgccaattgagaataataaaaaattcgatttgttttaattttgcataagtctttaatttttccaagaaatcctttggcagtttgacatctcttctaacaaaaatttaattaatttcgaaatattcggcatttttcaggcacctcaaatgccgtgtgcacctccttgcatgccgacatgtgctccagcttgtgttcaggtaaaaaaaaattcaacctaattaattactaaatttatatatacactcttttttcctgtactttttagcattttatttttggataaatccaattaattatcattaattgatttaaaaacaaattaaggaattcccaccaattgtctttccaccaccacctcccccatcaccacctccgatctacttacaaccaccagcaattccaccaccgccaccacttcccttgccaccaccgcctccagcgatcatgccatgtccggcaatgtgtcagccgatggtacaataataaacatttctctaattaattaattaaatttttgttctttttaattaatgaaattattcaaaattcaatgattcggattatttattattttgtaaaggaatatttgaaaaataatctctgactgttggttttgatacaataagatgatgtatgtcttaaaagtatatattggggtgtaattgttgattgatcatttcaaaataaatgccacacacaaaaattacaatataaattaacaaattttatttaaattttgaaaaaattttccacacggacgcttcatgacttcggcatatatctttgatacccaaattttttggaaatttcaaaatgcctatttatcctaaaaatttatggaaatatttaatttgaaaattttattttagtgcatgcctcaatgtatgatgccaatgcctccacctctaccgccaccaccgccgccacctatggcaatggcaccgccaatgtttgttgtgccacccgcgcaatttgcaccaccaccaccgccgccattgccaagacttcctccaatggtgggacaattaattattacgagacaaattattgctaattaaatattaaatgaaggcattaatggcaccgccgcctctccctccaatggaatgtgttgcacaatgccag

SEQ ID NO: 51946 - DNA, 651 bp, Heterodera glycines
atgtgtcttcacgctaaggtcggccacaaattttcgtgcaagtgcaatggtcacggattggccctgcgcagtggcataaccgacgcaaaatgtgacgatggcaaatgggaaaaggtactgcttgaacttgacggcgtggtgcaacagcatttttgagatggaaatgtgctaaaaagtgaaatatgtgcagacaatataaatgtgtctgaaagtgccaaaaatactaaaaattcttatggagtggcaaaatattgttagaagttttccacactagctttttattttttgattgaatttaagcaaaattttattgttaaactaaatgatttaaattttaagctaaatgatttaaatttcaaaaatgcccattcatgcataaatttaccaaattgtaataatttgtgcaccaaaatatttgttactgtgcaagaaaatgctaaaaaacatttctaaatttaaaacgaagttttcccgattattttttcttgtttgggtgattaagtgagattttataaaatggttaaatatgcttgttttaaatttcaacttccacattgattttttttatttttagatgaattgaagcaaatttgcaaaatttctacttggtttaaatttcaacttttcgcaaaattttattgacaattaaaa

SEQ ID NO: 51947 - DNA, 526 bp, Heterodera glycines
atggctgatttaaagaaaatgaaaagagatacagaggcagagaaaacgtgagtaaatagagcaaagttaggactataaaaaattataagaaaaaaattttattacttcaaaaatgaattattggagggccgagtctaaaaatggtctccaaaaacggcatttttcaagaccatcaaataacaaaatgttttaaaagtggttttggaaattccgaatttaattaaactaagtaaattgaccacgctgagtccgaatatggctttagatttggtctctgggttctcaacaaacctgtacagctccaacttcatgcatggagttggagcagtacaagctcagggttaaaagataggtcagatttaaggccatattcggattctactggtctaatttgtacagaaaaccttcttttttgttatatcaggttacttttttgaccataaaaaaatcgagaaaaattagtgggccaattttcaatttttgcatggtcgggaaaaaatactaaaaaattgaataagcaaataaa

SEQ ID NO: 51948 - DNA, 789 bp, Heterodera glycines
atggccatcgaattgaacaacaacaacgcatgtgcatcaaccgaagaggacacaagcagttcaccgaacgcggccaatttgaccggcacgcccagcggagaggcaatgagcggcgaggaaagcgcacgactcaaacgaaggttatttttgcggatgaaacagttcaatcctaaagaaactcattgagttggccgatgcgtcaataagtaaaacttaaaagaagcttttaaatgtttctgtggtttctgggtggcaatggacccgtaatcagagatgggggggaagcattcctatgaaaaagtgaaaggaaaaaactaatttcctttgattttttcggttgtcataaaaataatacttttgagtcttttatgactttttaatcaaattttcatctctctggacctattacattacaccagagtatggaaaacaattgtgctttttcgcatttaatttctatgcattttcccttttcttaattttttacctgaccatagttttttctgcaaaaaaaaattgaaattttttgttcagttatgttctgcaagaattggtggagtccgagcgcacttacgtccaggacctggcctctatctcaggttctaatcccttcgaatgccggacgaattcggaaatcgcaaaatgcgctcctttcagacggttacatcgcctccctgcgggaaatggaactgagcgacgaggacagagagaaagtgaagatcattttcgccaacatcgagcagattctcgactttcacaaaacattctttttgaaagaaattgaaaaga

SEQ ID NO: 51949 - DNA, 657 bp, Heterodera glycines
atgcgcacccgtccgatctggcaagttaagcaacgattgctgactagccaaaaggttcggtgccgtgatgaaacgaaccagcactgcttaccccgcggcacccggcacggtcccccgaaggaatggatttaattaaattctctccttcggggatttttttccattaggtcgtccgttagcgttcgattgctctagtcaatttttcaaaatttttgttgaaatatttgtcgtgctctgaagggcgtgggaggggggggggggcgaaggcccaccacgaggccgcgaagaggccgagtgagtaccttcggtgcaggaaaattattaaattttaaaattttttaattgctttttaaatatgccaaaaaatgtaggcttaacttttttagtgaaaattcgatcactcatattttttgctaattgagcagaagcgtaccaaactttgcagggatactccccggtaaaggactaacttacactgaaatgagcgccgagctagctggctcaaaaaaatttttcgaaaatctgagtctttcgtttttatttatttgcaaaattaattcataaatattttttcagaaagggttctgaaacgcaccaaattttatttacatgttagtttaggcactctgatgctttttctatcaaaaagggagatga

SEQ ID NO: 51950 - DNA, 816 bp, Heterodera glycines
acaaaaaaatcgattttttcaagtgtccgtttggggtactcaaacaattatggggagcaaaaatccaacgcagaattaaagtacaggctatagggaagctattccggaaggattcggtctccccataaatctgggcgcatcggctcggggggactgccccgaaaacaaaaaaatcgattttttcaagtgtccgtttggggtactcaaacaattatggggagcaaaaatccaacgcagaattaaagtacaggctatagggaagctattcccgaaggattcggtctccccataaatctgggcgcatcggttcggggggactgccccgaaaacaaaaaaaatcgattttttcaagtgtccgtttggggtactcaaacaattatggggagcaaaaatccaacgcagaattaaagtacaggctatagggaagctattcccgaaggattcggtctccccataaatctgggcgcatcggttcggggggactgccccgaaaacaaaaaaaaaaattttttggataaaaattatttaaatgaactgactagataatatttaaaataggttatttctcttcctttcagtatccctgcaaagtttggtgcgcttctgatcagtttctgaaaaaaaagttaagcctaaactttttggcctgtttaaaaaggaattaaaaatttttaaaaattttattcatctccctttttgatagaaaaagcatcagagtgcctaaactaacatgtaaataaaatttggtgcgtttcagaaccctttctgaaaaaatatttatgaattaattttgcaaataaataaaaacgaaagact

SEQ ID NO: 51951 - DNA, 910 bp, Heterodera glycines
gaagttttgcaaatcggcgcgaaattggccacggattgttggcggagaaggcattgcgccaagtgatgcccgagcaattcccgtacaccgtccgactggcgtgtcaggtcattttgagaccggacagcgggggtcggagaggtcccgatcaatccctagaatttaaaataggctcgggacggatctcgagtcggccagccctgggagtgtcagggatggatttatagcaaaaaagcaatattttagggtaaattaaaaaataatttaaccgattttgtataaaaatgggcccttttggttgtgttctctctctctctcccactttaattggctttttcaggtcctcgagtccaatgggtccacctcaatggcctccgtttgtgccggttctttggcactttttgacgccggcgttcccctcctggccaatcacgtggtgggaaaggaaatggcaaccaaaaaagtttttttcatttttaggccggcctggcacttggacttttcaccgacggagagggaaagcggtgattaattaatatcatttaaaactccaattataacttttttttaaatcgaatcgttttttttcgtttagcaccgagtacactctgatgaccgatttgatgggctacgaggattatgccggcgacatggatctcaaaattgcgggcactcaaacgcgcttcaccgccatgcaaatggacctcaaaatttgcggacttcctttgaggtgacaaataattaacactaaaaatcggaaatccgccttaaaaacccatcggaattgttgccaaattttccatgtatttttagtgttcttcgcgacgctcttctccagggcaaaaagggcattgtccatctgctgggactgatgcgcgacacaatcgcggaaccacggtttgtgcaataa

SEQ ID NO: 51952 - DNA, 995 bp, Heterodera glycines
atggtgggtaaactaagggaattggccgatccttaactaacttgtaaggaaactgataagtcatagacatcaatttccagttggaagtatatgagggaaattcagtaaataattttcattttgttatccctaactataaattactcttttttagtcaagcggccgcgctcgcagagaaaatggctcattttacattattgtcgaggagcgaaatcacgctaaccttatggaaaagcttgaagactacgctaagatagaaaaggtgttttaattctgtcttcattaattttctctgtccctttagtttattatggaccattacaattcgggcaatgaaattctgaatgaggctgagataccccaaaatgtcgacgatttggttccaccgtatgtcgttgatttgccttcaggaaaggctcaagtgacacttagcggcgcaattccacttataaatcggttgcattttcacttctttttgcattcctttttctccttccttctcagatattgttccaaattgccttctgatattttcacgcgattagttccccattatgtcgttaattccttacaaaatgccgatggaaagtgttcttattttgcacaacttcttcttccgatcaattcgccgttaaaacaaagtatttgttcggatgcaaattgccaaattggtgaaacaagcgctgtttttgcttcgaagtcattggcactaatgtccgttgcattggaggtgaatgagtcatccaaaagcttaatattgtaagcaaaatattaataaaaagttttaggcgtgtagaaaattgcatcggcaaaaagaactgagtgatcagttgacaccaacgggaaaagaaataattaccaaccttttcggggaattggaagacgaagaggaatacttgccatatttgatcaacaaatgcggaccttcaaagcgacgacgcctttacgaccgaaaggtttggacagacggtggggaaacgttagaaaatgtttaa

SEQ ID NO: 51953 - DNA, 783 bp, Heterodera glycines
atgggcacgatcgtcaagcgcagccttcgcgcaaaagccatcattgggctgctgcagcgagaggtaagcaattggacttgaatttagctttgatctgactttaatttctcattgtcttccaacaggtggtgttgagcaggagtgcactcgaccgcaccaaagccaagtttcgaaagcgtaagaacggattgaaaagtgatctccgtgcaacgctcaaaaaccttggcgcggccgaagacgaccttgctgcggccgaagacgacctggctgctctgagagctcgggccgctgctctacacaatgtaattttttttccttattaatatacaaaatgtgcatttacaagggtagtacccatgtaaatatacagttagtacagggcttcttttgcaccatgtaattatctataaataaatatgtactaaatatacatttacaagggtaccaatgtaaatgtacgttttgtacatccttttatttgtatttttaattaatggttttcagcaagtgcaacagctcaaacagatcgctcctaaggctaagctgaagaagctcggtctcgcagacattggcccggacctcagcagcgaaagcgaagaggacgaggaggaagagaatgcggccgacaacaccgagcagcagcagcaggacgatgccaacgacaatgtcccagacgacctgacaatcaacgaaagggccgatgcagctcttcggacgctgatgcctcttacgacaagcagggaaagtcgtgccgaaaatgccactacccaatcgacgttctga

SEQ ID NO: 51954 - DNA, 678 bp, Heterodera glycines
  unsure (1)..(678): unsure at all n locations
atggcttttgctcagtttttgnttaatgcaagcttaagtctattgaaagcaccgaaagccacgattaccattgcgtggaaaagccaaagcattaccgatgttgaaatcgagtgctatgaagtgcagtacaagaatgtcaatgaagtttggaagacgataaagtgtccgcaagttagtaaacaaaacagggagtgcaagcaaaaaggaaggcattgcatagcaaaaaaaaactgggctaagcatcaccacacaaaaaatgactgaaaaattcggtatgaagaaaggaggggggggggggttggggtggtcgagcccgaagccgccctccccatttcggcgcggaaggccaaaaaataaaaacaattgcaaaaatatcctcggtttaaatggatcaacccatttggcacatccacggacaaactttttaaatcgcgaaatgccgcgtttttcagcacgcgtttctcccgaaaaaatcttacaccgcagtcgtaaagaatctgaagccggcgaccctttacgcgttgacagttgtggcgctaaataagcatggaaatactgttgatgttttaacaatgagccccgtcgcaactaagcctcggtttacgtgatttgcttgttttctaaatcctaatttatatctttgaattggtttgttgtcttttgactctcatcaataaa

SEQ ID NO: 51955 - DNA, 150 bp, Heterodera glycines
atggaagaaagaataatcgagaaatttgaccaatttaaagaagagatggagcagaaaataacaacgaaatttgaccaaatatcaacgaaattggacgaaatgaaagacgagttacgccttgaatttaaccaaaaattcgacgctttggag

SEQ ID NO: 51956 - DNA, 925 bp, Heterodera glycines
atgagcctgttgtggcttggtaaggagaacattccgccttcgtttgagaagcatgaaatattggtgagttgtgagttagtccaattaaaaagaaaataacaattttttttttggtttataattcttacgaaaagtttgaatttttttttaattttgggaaacatagaaaatcatgacaatagggacgaaatttattgtgttatccatggtccactatactaaaaattaaaaaagcttaatccatgcatgtagcgagaaaaaaaaccattttggaggaagaattcagaagttttttgttgcttcaagaaatttaattttggacaatttttcacaaatttttggaaaaaaaatttgaaaaaattttttattattcttttttcctaataattctaaaaatttctaacaataagtttgtaatatttaaaaaacaaaattttttttttgggtgggggagaaatttaatacatccaccaaaaacaaaatagtaataaatcgaaatttttgccgaggtttcaaaaaaaaattttttttttttttttgtagttgaatttttcgtctggcactgacaacagctccaccggcgccgccactgcctcttcgctgaacagttcaaattcatcaacaacaacaacaacaaaaacaagcgccaatgatggagatgaacagcgaaggattaaaaggaccaaaacaatggcaacgacgacgaccaccactgacagtggaaaaagtagcagcaaaagccgaacaacaacaacaacaatcaacacgacgacgacgacgtcgagcagtacaagcagcagcaaaaaattgttggtggtggatgaaaatgcaaaaacgtgtggtggtgttggcattggtgctgatgggtaagaagtggttgttacaaaaaaaatggaaaattggaaaaaaaaaattttttttttga

SEQ ID NO: 51957 - DNA, 565 bp, Heterodera glycines
atgacaagcgacgatggacaagcgtcactatcaactgttcatcaacgaaaaatgacaacttcaataaagacaactgaacatttgtccaagaagaagaagaaaaaatgtaagaagcacccggagaaatgtcacaacggcgtctactaccacgaccaccatgaccatgaaaaaaaagtacatataaaattttaattaactatagaaaaaatgtggtaatttttaagggatgttgctgatcagcttggacgtaatgtcgaggagaatgaaaaccaatgcagaaaatgggagaacagcagaactttcggattttctttttgggtggataaattttatctttttctttccgtagattagcttattccttcgctttttcctatcgataaatttttcaaaattatttaattatttgataatgagaagcaaacgataaatttattttatcgattttttcgggaaaatccttaaaaattttcgtgttttattttaggtgcgattatataaaaatgcgagtaaagatcatcatctgcttaagattcactgtccctcaaaaaccaacaaaacagta

SEQ ID NO: 51958 - DNA, 1934 bp, Heterodera glycines
atgttcgtcattgccgcctccgcttcttcccatgccagcaacaacagcgaatggcaggcattgagtgcccagtttggtcagcaaatcagtgaaattgactcgaaatgtgccgagtttggcattggcattgccaaagtgccatttgacggccccaagggtaaaactaataagagacaataattaattaattatgcgatctcttaaggtgatcactagggacgtgaattttaggttttaactatttttttcgctcaattgatttgaagaaaggagctcaaaaaacgcatttctgcattaaaaattttcgattctgatgtcattatcggtcactagaaatcactattttggcaatttcgtcactaaaatagttaaaaatcactattttggcgttttgtcactatttttcactatttcgacattttttggaaaattctttaacaaaaatgcaataaaaccaaaaaatacacccctaagaatcgacctaaaattttttaaaaaaatacacccctaagaatcgacaaaaaaaaatttcaaaaagcactcctaagaaatgaaaaaaattttctcaaaaaggtattttcgtggcaagaattttaattttaaaaattatttttttatgtacctattgtgtttttttgcccttacaaatagggttcgagccccgcccccgtcacccccgcccccgccggggtcgggacatgttttttgggctcacccccttccccgcccccgtgactcagaccttgcaacccccgcccccgcgaccttcacccccgcgggggcgcgggggtgaaaatacacccctaagaatggcatattcgttgaattaaaggcaaaaatttatacaattttgaattttttaatcatcttttacaaatttttatgaaataaagtaaattttgcttatattttttaaaatatttgtggtttagtggttagtgcttcagcactaatagaaatctttgttatgagttcaacgccggttgacgttttccttaaataaattttttttttcctttaattaattttttttctgattaatacagggtttctttatgttcttgtttctaagtgttctgatttgggagtaaatccttattttcatctaaaaagaggaaaacttctgaaaaattttgctaagttctaacaaaattcatataatttcttaaaattttcccctggaggcgcctataggcaccgccgtcccccaaaattcctatctttttttcttaaaaattagccaaagatcgaaaaatttgcttattttttgtacaaaatttgttaacaaattgcattcaaattttcaaaaaatttccccggcggcgcctgtcggcaccgccggacctctcccctcgcacattcagcaaattttttggaaaaatgtaccgcaagaaaaatttaaaaaatctgagttccaattttccttgagtaaatcatgattagggctgctaattttatgtaaatacatattttttcctggcttctccatagcctaatcagtaggaaaaacactttcttttttgtgtttgcaaacaaaagtttggacttttatttacatattttagtagatattttgcaaatttgaatatctgttagaaataaatttaaaattcgctcctatcggcacgccggcccccccccccccaaaaaaaacctttttttcttaaaaaattacccaaaaatcgctaaatttgattatttttagtcaaaatctgtgcaatttatgtcaaaataaatattatcaaggcgatcaacgaataaaagaatgtggagccaaagaaattattcataaaaaatattttttttgtgagatttttggagctaattcaaagcaaacccccgcccccgcccccgcgacgcggaattatcgtgcccccgcccccgcgaaaagccacccccgcccacggggctcgaaccctaataagaatacagaa

SEQ ID NO: 51959 - DNA, 600 bp, Heterodera glycines
atgtccaaaaatggaaaacagaagcaatttgcgaaagagttgggcattgacagaaaaacattaagcaaatggaaaaaagaatttggcattgaaatgagcaaaagtaaattttaatttaatttttcaaaataataaattaaattttaatttaatttaataattatttatttttaattttttaaggatattcgaatgaagagaaaatgagcaaaatgaatgattattatgaaatgaaaaaagcaaatccttctttaagtgacaaagaaattgctggcattttgaaaattggatttgccactctaacgagatggaaaaaggaaaataattcgtaatttttcgtttttcttatttgtattggtttcaaatgatgctttttattctaatttttgttttttataatttttccctcttttatatgtttgttttttaattgacccatacaaattaaaattgtcaatttctcttaatttttttttactgtttttcggtgtacaaaaaccctaaaataattgtcccaattttcttttccgccagcatataaatttcgatttgacaaaacatcgaccaaaaaaacatgattgagtaattgaatgcaaccaa

SEQ ID NO: 51960 - DNA, 1710 bp, Heterodera glycines
atgggcaaagaaatgcaatatttgaaggcggaggccgaatccatcagaaatgttgcaatttttggcgtttgcattgccacggtggccagtttggtaaaatttcaaaaatattttaatttttttttgaaatttaaaaaatttttccaaggtttgcacaatgtccattccgttggccgccctttactttcagcggatcagcgttcagatggaaggcgagctgcacttttgtccaatccgatcaggaaatatcatgcaagaagtagggaaaaactgtttatttactaaaaaaaatgaattaactaaaatgcgatatcgtaatcaaaaaagaatttaccgtaattccttaaagaatttaatcaaaagatggtacagtatttcctacaataaagtcccaacctcttaatttcccgcttctaaaataatatctccccctttttttttggggggggggggggtttcttactagctttctaaattaaaaatttggcaatttttgaaatttttgaaaattgtgacaatttgacgtttcacaaatttggctaccattggcattttgccaaatttcaccgaaccaacatttttgctcttacttggcacagagtttgtccaatcaaaaattgtgcaggtaacgcgcacccaagtgctgtccgatgtgaatggtggcgcaccacgggcgcccgccgcgggcgcagcaacgcccaagcagcgccagacgcgcagcgcccatcaccacttggacacggtgctgcgcaatggacggctcagcctatggaagcgcagcggctatggtgccgaaagtggaggcgttacaggcggtggcggtggtggcgcgtgctgcggatgcggcacctcggaacagggaccgcctgggccaccggtaggcgcgagaatttccatattttttcaaatttaaaaattgctaaatcatttagcaatgctttttaatttagggggccattggtgaaccgggcgctgacggacaaccgggcgcagctggcaatgccggcgaagacgcggcgccaccgccgccggcgccgtacattgagccgtgccaagaatgtgggacggcacaggacggatgtacgtacaaatttaatattttaaattaatattattataatttcacaattatttagcccaagctttggcatttaatttttttaaattttttagtcgagtccatttctacaattcagaaaaggccgtaaaatttcagatttttatgaaatatatgtatatgatggaaacatttatttcgatgtttctgtttttagaaaatttttgtcggcacttttcgctaagcgccgtcaaaatttttatttattgttgaatttttgaataatttacaaaaatttagtgcccgggccgcaaggcgcgccaggaccggacggacggccgggcgagcccggcgcgcctggcgagcgcgccattcctggaccccagggtgatgaaggcgcgccgggagtggacggagtgcctggaacgcctggaggtggcggtcaaaataaattttgcaaaaaaatttccaatttttcagagcctggccctcccgggcctcctggaagccttgaacaaggtgcagaaaattttgttttccttgatcgaaataattggaacaaaatgccagattatgccccaattgttggcccacccggacccccgggcgcaaatggacagcccggcacagacggaacgccaggcggtatgtaa

SEQ ID NO: 51961 - DNA, 417 bp, Heterodera glycines
atgccgcgggttgagaaaaatttcgggttcgggtttcgggtcgagtcaaaaaacctcgggatacgggatcaggttggcatcactgttgtgacaacaataatgttggattttgatggaaaaaaagaaattaaaaaaaataatattcaaatgacaaataatttttaaaaacatttgacaaattaaaaatgaaaaaagttaaataaacggcaaattgtaatttgtaaaggaaacaatagaataattttaaattttatttcattataaaaaaatgaaattttattacaatttaataagataaagcatccaacgcacacacgcacaaaaacttcagtgaacatgatgcataatattttaatatcttataatatttccttttcagttttaaatcattagtttctgtttggaatttaaagttta

SEQ ID NO: 51962 - DNA, 58 bp, Heterodera glycines
tgtagaacataaaaggtaactcgcccggtgggactcgaacccacgaccccagcaatcc

SEQ ID NO: 51963 - DNA, 552 bp, Heterodera glycines
atgcttttcgtctctttattggccaccttttgcttccaaccgtcgcgctgtgccttttttgacaagcatcggaaacggaatgccatggacaatgtcaacggggaatgtgccgaagacggatgcgtcagcgatgttgaagccggaagtggtgccgaggacggggatgaactgttggatgacgacgacgttcagcagcagcagcatttgaaaagtgaagaatcagagttcaaaatgttatgatcgggaaaaagtgatcgaaatttcgttttatttattttttcgccaaatttactcataattaaaaagaccattcttaaaaaaagctgtggttatttttcaatattctcttcataattaaggctttatgtttgattgactaaaacttgcacaaatgctagtcaaaattttctatctcttcatttaaaatgggacttttatgcactttggttaagctgccaattatctgacaaaaacgaaaatttaaaatccgggccggtggtttggaaacttgaattttggtacttatgcattttacagaccataaaaaataaa

SEQ ID NO: 51964 - DNA, 1286 bp, Heterodera glycines
atggatgggccaaaggcaactgtcatccgaatggcaccacaacagcaacacgggtgggctttaggaaatgggagggcggcaacaacaacgggagaactccctcatctcagacgacgggatttcatcggaaaaaccaaaaacatagccaaacggtcaacggcaggtgaggtccaatttcaacaggtgaaacaaatttagaagttaaagaaataaaaatttggaattttccttcaaatgcgaattgatggccgggaagggaatgggggggggggcagaagccgtacgcctttcctccattgctgtgcttcttcaaaacgggagaattccaaaaatagaaaaatgccattggaatttctcgccaataaatcgccaaataaaaacaaaaataaatttgcatatatttttatgtgcctttttatttgttgattttgctggccagtgttttgatatgtttgttatcacttatcattttctgtttgtgagtatttgcttttcgcatttattggagagggaaaatggccgaaaggtcagaaaaaggcaaatgaaaatgaacgaacggataaaaagaaggaaaatgaaaaagacggacggacgcaatttaataggggaaaatatggtaaaaaggcatgaaaatattgaaaatttggcaattttttatttattttaaacttactaaatcatttcaaaatatttttttcaacatttcgaactcatttttattcttttgagcaaatcggagagtgaaaagaagaaatcaaaggcttggtaaaacattgaaaaagtttcgactttgaaatcaaaaattttgatacgactaaggtaaagcatagaagaaagtgtaaatcatagttagtaaatttcggttaaatgtctaaatttatgaaaaagtcactaaaaattatagaataataaacaacgcatagtcaaaagtcaaacaaatttcaaataggattgataacatggttgttgctgtcctatttaagacagtttaagactttaggactacatcaaattatgggggggaaatatattaaatcagaatatgcaaaataaaaattaaacaagataagaaaaagctggtattattataatgtaaatagactcaataaaagaaatacaatgaatagaaaacaacgcaattatcgattttttaagttggcgttggaactgttcaaaaagggaacatacaagccaaaggacatgaaaaagtaagtcaatcaatgctacatattaattggcacttctatttttgagaaccaaaatttttgaaaatttaaagcaataaa

SEQ ID NO: 51965 - DNA, 178 bp, Heterodera glycines
cagaatggccaccagaaacaacagcagtccgtacattttgccccggaggacccccaacagcgcacgccctgggacatttattaccacaaggaatctgtcagcgctgcacatacaaccgcggcctacaccatttttgagtgggactatctcgaaatcctcaccacagccgttgcgagtg

SEQ ID NO: 51966 - DNA, 966 bp, Heterodera glycines
atgctgctcaaattggccgactacttccaggtgagtcttctgatcacttatcacatcctcttttttctgtctgatcattttaatttaaatattaaatatttatgaaaaaataaatctagtattttgaatgagacaacgaaccgttctgtgatttttcgtaaaccaactttgtgtttttataacctttttctacctaactaaaattttttaatttggtaggctaattgggactattaattgccatcaaatgactcaaaacttgctaatgaatttgctatttctaaaaaacgaactgttctgctttgaggtgaccgcgttgaagtcgcgttgcgaaacgcatctgatcaattgcgtggaaatcccactgatcgaccgtttccttctgattgagcgctacggactcgaccatttgaaagtgattattatttaaaatagagttgagcgtgaccgggaattttgggcaaaaccgggaccttttcggatcgaaaaccaggaccgggaaaaaaccgagacttggtactcagttgtccgtgttttggtcccggtcccgctcaactctgatttaaaaaatttaaatttacaatttaaacaaattttaatttatttcccaattttagaattattttttgaatttggatgtcaataaattccgtgcctttttcaaggcgaacaatgaacagttgtttttggttgtcagcaaagaatttttgtgtgttttatttgtccgactttgtggatgaatttgttaaactctgctgattggttccggctttgatcaaattgattttggcatttccataaattttttttacaaaattcatttcgatgataaaaaaatttggttaattttgggcaaagttatgaataattttcggtcaaaaattttccatttgatggttttttgagtaacttcttacaattagcaccaacgataagtacaatacatgtgaatagaccagtgataga

SEQ ID NO: 51967 - DNA, 378 bp, Heterodera glycines
atgggagtgaatatttatgatgcatttgtataaatgtcgttaaaaaagttaaatagagaattcttatgggaatataaattaattttgggacaattgcactttaaagactttaaaattttaaatgtttataattttatattggagatcggtattttgaaaaaagcctggacttggacctggatttcctggacaaaaatccgggaaaatccaggtccagaaaaaatccaggctcctcgggacctggatccaggaaaaatccaggcctggacccaggtccatgccgatctcttctattatatatgaccattgtaaaaaacatagcatgttcaatgctttataattttgttttaattaagaaaaaaattttgtaaaattaaa

SEQ ID NO: 51968 - DNA, 356 bp, Heterodera glycines
  unsure (1)..(356): unsure at all n locations
atggatgtagaaattaacttcactgccctttttgnagtatttgggtctaaaataatatttgttaggtaattaaattatacgcttgatcatttctttaatacttcattttgatcccatttccaatggataatttgtgccaatggttccgaattcgacggattaaaagcatggccaatgtccgtgattttcaattcgatgatgccaaagtgtttgacattaatcataaattgactaaattctttgtatattttaaaattacaaaaataaaattacagtgcagcaaattgggtgacatcacggaatgaatagatgccaatagaaaattcactcatcactttttcgtcaacaacaataaa

SEQ ID NO: 51969 - DNA, 2411 bp, Heterodera glycines
atgcgttcattaggctcatcaattagtgcaaaattgacgccaatgcattcatttgatgcattgatgagcgcacaattggcaccgtcgcactcatttgacactgctgccgacctaattggtcataatcactcatttgatcaaatggacagtaaaaaagcgggaaaatcattgatcaatgataagaaacaaaaacatattgaattggaagctgatcaatttgtggcttttatgttgaagaaaatgctgaagaaagtgccagtggaatttaaagaacgattaaaaattgtaagaaaaaattgggaaaaaattaataaattgcggataatttttagtttcaaaaacagaagagaaataggacacttgctgaggaattgagcaatttaacgtcgaaacaaaatctactgatgcttctcgaattgtattatatggcgaattctatgggtgaaatttttctaaaacaaatcgctgcaaatgatcagacggatttaagaagattcggaggaaaaaactctctgatcgattttgaatattacgaagaaacaaaccaaaaattttcaaaaatttaccaaacaattcttataaatgagccaactaaaaaaagtgccaataaaatgtttccctttcggagaacgaaaagcggcaaagccttcttttggttcaattcccataaaacgtttttggtggctaatgaatggcgcgacggggcggagaatattttggaatggaaatttaagggtaaatttgtaatttcatttttaaattgaatcgaatttagtcaaaattgcttctacaaagcttggtaaaataatcagaacaattggccaatttatcaggataaaatgtggcaaatatttgtggaatttggacgaagaaacggatgaaattcaaaactgtgcaaaacaaataaatttcagtgaattaaaccaaattttcttaaagaaatttgccaaaaacaatgaaaatacgttgggtttgcttaatttggtaggaaatttattaaacgtcgaagcattaacaaattcggacacaaatgaaaaggtattaattaataaatatttttaaaattggaattgattcttagggatgcttttttggtttatgtcgctttttgttaatggatttagtgaaaaattctatttttaaggttttctgtttggaaatcttaaatattttggtcattttttggaaaaatctattaaaagaataataataataataaactttttagtaatattaaatttttccggcttactttggcatcatcggctctttgttttccatgctttaaatgctaaattttacaggtttcttctccttacagtgaagacatttttacagaaattgaaagttatgaacaaaaaattcacattctcaacggacttcttaattttggccgtttatttatgaatagttttttggctttagcgatgaaaattacggaagaaaatcgaacaataaattggaaaaacatttcaatcatattcactcggaacaaaaacgccgaagaggaaaattatttgttgaaaaaattaatgatagaaggtaaataaaaaaggaatctatgagtaaatggtaaatttcctcctaattacaataccttccattaaaatgaaaaaaaatattacataaattaatcgccagtaaatcaatttaaaattcttaagctggtttaatggaagaagcaaaggaaaaagtaagaacataatcatcaagaagttaaagagaattcgtcgacaattttttcgttctttcggatttcatttttaaatcgccaaaaacagtaagtaatttacatcgaaattacattgtaaaatttagtgatgtcataaagaattgattcgacggtggttattgttaaaataatcaaaaatttacacgtcaaaaccgcgtcctgattaaaaatattatatttcccaatttttgtcgtaaaaatatattattgagagatttcgtttttttatatacagattgaaattctttggtatcttattcgaaaatctggctggtatttttgtatttggtaattagcctagggaggaggaattcttattaagagagaggttaaaaagtagaatttttgagaattttttaaaggacgttgttaaatcttgaattaggtgaactatagtgaacgccccacttagaaaaggttaaatgatattactaatccagtggcggaaatagctttgaacctagttttaaaccggtttaaaactcgaaaaacgaagaggaattggcactttagcttttttaaaaattcgaaccctgacatttttgttgtcattcgaattcttgacaagctaaacgtaaaaaatcagggtaaagtcgaaccaatgccatctgctgacaatgagagattctgaaccggtttaaaacaaagaaatttagtgcaactaatgccaaatttgaaa

SEQ ID NO: 51970 - DNA, 346 bp, Heterodera glycines
attatcagagtgccgaaaatcgcatgtgatctaagcctagaaaaaaatggtgtaagtaaaatcgtaattacgctcaaaaagcttttcaaacaattttagcgcttccaattccttctacaatcgcctttatacatcccattatgagcgctaaaattatcagagtgccgaaaatcgcatgtgatctaagcctagcaaaaaatggtgtaagtaaaatcgtaattacgctcaaaaagctcctcaaacaattttagcgcttccaattccttctacaatcgcctttatacatcccattatgagcgctaaaattatcagagtgccgaaaatcgcatgtgatctaagcctagaa

SEQ ID NO: 51971 - DNA, 1180 bp, Heterodera glycines
atgcccgcgtttgctggtggtggaggatttgttgtctctccaatgaatgccgttcaaaatatgcaccattcgacgaagaacaaagtgacaattggtaagtggaaccgaaaaaggacgaacgaatcgggaccagttcatacaaaatcccatgaaattcgtccattttcaccaaaagatgaaaaagttggaaactttcccgtacgaatgctcgtaattttggtctgttgtccttcttttccatccccatttatgggtattctccccttttcccaggtgaaattgtgcaaagtggtcgaatacaaaaaaaaattggtcaccaatttaaccagtgatgaatgattatgcggagaaaatgaatcttttggggaattagttacccgcacgaatttaaggtcatctttcccaattttgagcttttaattttcagttttcgtcatttcaccatttctctaattctaggtccgatttgctcgagttggtcattgatttggagtcagtcaacagacttttccgccatttatttcgctgcccttcactcccattacgccacacttttacctcatttgagtgaaccacagccatcggatagaccagaatttttgcgaaagcaatgcaacacgacggcataccaaattgtgaagcattggtaagtaagcgaaaaaaagggcgtggagggctctgacaatgtttttttgttattattaatttaaccaaacttcccgctcattgtcagcaacactgaactgagcgtgaggaataaaaggacccttcagcttatcacttctttggcctccttaatgcttcaggtgggtctttgccaattgaattggtctcatttctcgtcatctttcagcttagaacaatcggcgctcaaaataaaagatttacttgtgagttatctcaaactagcttcgtttttacatgtttttcctttagcatccgatatgaacctcctaagagaatcaatgaagcaaattcgatcgcaaattatgccacaaaatgcggctgctttccaagactacgtagaagtacacatgaaacaaatatttactaacagaggatgaatgaggtgcaaagtttcaatgtttgaattgtattatgtcacaaatgataaatgctaaaaagcgatgtgttataaatcattttctgatttgtcgaattccgagagatggaaaataaa

SEQ ID NO: 51972 - DNA, 430 bp, Heterodera glycines
atgcttttcgcctcttccgtcttccgcttctttctccgtcctcctccaaagcgttattcgtccttcctcctgaacacaatgtggagccctctcttctgtctgctggtcttcgctggtttggccgcgtgttgcgtttgtgagtcttttcgtccgtttcgtggcactttccccgcttcagcccttccacagattcaatacgtcaatgacaagccgtactatctgatgcagaacatggaatgtcgaggaggcaaaatttacgagatcaatcaggtccaggtaaagtttaatgggcctagttttcacttttgcttaattcgaatgcctaaactgaaggacatcgacgagtgcaaggcggcatgtgtaactcggaattgccgggcagtcaacctcttccagctgggcgagttccaattcaaatgcgaaattttgg

SEQ ID NO: 51973 - DNA, 398 bp, Heterodera glycines
taagctgatcgcacggtcttgtaccggcgacgtgtctttcaagtgtctgccttatcaactttcatatggtaatgtatctgactaccatggtgatgacgggtaacggaggataagggttcgactccggagaagggacctgagaaatggtcactacgtctaaggatggcagcaggcgcgcaaattacccactctcaacgcgaggaggtagtgacgagaaataacgagaccgatctcttatgaggccggtcatcggaatgggtacaatttaaaccctttaacgagtatctatgagaggtcaagtctggtgccagcagccgcggtaattccagctctcataatgcatagaattattgctgcggataaaaagctcgtagttggatctgtgctagccgtccggt

SEQ ID NO: 51974 - DNA, 1463 bp, Heterodera glycines
atggcttggggtttcttctcgcgtccgcttggaacttctacgccctgttctgatgtgagtttgggttgttttttgtttcattgggttttcttttttagaccggcgacaaatacgttggctacgcttccagcaaatacaaacgccactcgccctctttcgaccaagcgactgttcgtttcttcgacaccaaaaagatttctccggacatttcgcgttggattgcccatgcaattgttgcgttttttgctctgctttttttcacttatattgcaaaagcgcactccgagaccgtctccagcggaatttcgcttactgctggttatttcaaaataattcttgcattgtttctgaccataattaaggttttgctgtgtccacctttcgatttctttacaactacgcatttattcccatcattggaatttgcatcggtacttccttttctcataatactgaagaactgttttccggcgcaaaagtttcaaattattctaatatagaaaagttaaatttgtgaaaaagcatagacatagcaaaacatcaactcgaacccataatcaacgaattttttatcctaaaaataaaaagaatttgtttttttttgtttttgccataaaataggttcttcagtattaccctttttcttacaattgtttcattttccattttcagttggacttttcatttttggcatttacaaattggcttcgttccgtaattatcgaaaggttgaagagaacagaaagcttattctgttggtcgaacgtatcactgacatcatttacgagtcgggcacttccggcgttgctgagccgcacgtgcgcgatatgattatgccgcctacgaagtaaggaaggagttcgagatttacaagtcttaactgaaatcactacgacccgttcaaacaatcattcgtgttttaaggcgttcggaagaggaagccaagcgatggaaggaggcggcccgtttcatcaacaacgaggactcgcgcattcggaccgaaattcgtttgataaatgggaccgagtgcaacgtgtggatttgggtcggggcaggaaaagaacgctggcagggaaccggtaattgaaaacatagggagaagaacggaaaaagccggccgcaacaaaccaaaagataatccaattcaatgttatgtcttttttgatgctaacgatactcatttgccttcctttatttgtttggttttttaaggcacgtagccgttaaatccaatgctttttaagctaattgtaagtttcaaatacttgctgccggctacgagccttaaacattatgattgttttgctttgaatgttccgtttattgtcgagaaataaatttcaaaaaaaaaacattttaaacttcagcccttctcgaggggtcgcctatggctcgggtacccgaacaagcattgacgcgctgtttgaagttacgcggagttaatttttccccgaagtgagata

SEQ ID NO: 51975 - DNA, 90 bp, Heterodera glycines
gaatcatccggattgcgacgaaatcaccctactatttggcccgtaataccgagcatgaccctccgtattggcgaggaccaatttggataa

SEQ ID NO: 51976 - DNA, 109 bp, Heterodera glycines
ttttgatgccaccaatcagcggaaatggattgcgcaatatgaaaataccaaaggaatttgacgggacagaagggggagaaggacgggacagagaaacggtgtggggcgg

SEQ ID NO: 51977 - DNA, 1084 bp, Heterodera glycines
atgcatttcatcgtccggctcgcgcagcacagtctcgcgcacggcgtcgcccgcactttcttcgacttcgtccaatgcctcccgaagacagaggaagaattacaacaaaagtggacgcgtaccggtaagaaaaaatttgcaaattcaagccaaacacacacacacacacacacattcacttcctagataaatgtgaatgccgattgccccaatgttccgcccggtgtactgccgaacccaaaaactcgccagtaccaggtcaagagcgttttggcgcaattcactcatgcatcggggaggaaatgctatttcttggagtggctcggtgagtttgatgatgaaattgaaagaaaaaatgtgtgaatgaaaaggtggacggatggataaggaaattgaaaatttattgtaaaattccaaacgtgtgccgagttaacctggtttagcttcgccacttttggaacggaataatttgagggtgtgggccgagttaacacagtttagcttcgctacctctcttgctatttcactttaaattttctttttctttttccattaaccaatccattttcttctctcattttttctcgcaattataggctttcgcggtcgcaactcatggtgtttgtcggaggacaccgactgtacagagtacattgaaagatttgggacagtggcaacagtcgacgcggtactctctgcgctattgggcgaaagcgtcccagcttcgatagctgatgagctccaggccaatcctaaatttggacaaggtgtggagagtgaggggaattaaaaattgcataattttttgtcagtgttggcaaagttcgatgacattgaagatgaattcatattgcggacaactaagtataatattttgttcgcaaaagggcttatggaaagcgccgagggccaaggaataattgaggatgtaagcacacaaatgcactttttaatttaaattatatatttcctaaggcgaagagtaaactgggacgcttcgtggcaaagtgtatgagctgatgagtgcactggccggccgaattgaacattttcaccatttaaatttcaccatttaatttcacca

SEQ ID NO: 51978 - DNA, 543 bp, Heterodera glycines
atggcccaattcaacgcaatgtttccaaatttgaattcgtccgtcgttgagtcagtgctgcgcaattgtgacggcgatgtgagcagaaccatcgatgaattattgcgacgaagtggccaagaagaaggaaataattcggagacggatgaacggcgaaagagtgtgtccactccgccgagggaccaatgtgccaatgacgagaaaatcgctttgctggtccaaaaccgcgagtttctgaggtatctccgtcgcgacccaaacttccaacgtgaaatgctcggccgttccaattcatctgattatcgacatcggcaccattcttcgactcatcgaagtcgcaatttgcccgttctattaacgtcgtctcgcacttcccaatcgcctaattcaatccgtttttttcgtacatccgccgatgttatgaccaatccagcggaagattctgtgggacgggttcctgaaggacctctcgtcgaatttcagacatcggagcaagaatgcaattcccgaaggacctttgattgtaagcgaaaagaagagtaa

SEQ ID NO: 51979 - DNA, 480 bp, Heterodera glycines
atggtttgcgttttaaaaatttttaattgctccattcaaatgtttgttactattattcattattatcatattttttcgctttaattttcaaataaattttttaaacttttgttgtgcgaatttcgttgagaaaattttttgagtttatttataataatctttatagaactaattggtggcaactcactagttagtttgttttattttgttagataatatttgccaacttgattcaaagtatatttattttttaatgaacttgctcataagtcgaagaaacagtttgatttttagtagatcatatcgataagtatatattttttgtatattaatttactacactattttttttaattactcatatttattggtgttgtttttaaaaaattatacaaatttatttttaggtacagttaaaaaatttcataaacattcattttcaaacaattgaaatatatattacttgctttaaaaaataaa

SEQ ID NO: 51980 - DNA, 118 bp, Heterodera glycines
cgaagcggccttaatagcccaacaaatttagaaacgggcgcgaagcgcccgtataagcccaacaaaatttaaaaaacgggcgcaaagcgctcgttcgaggccgcgaagcggcctaaaa

SEQ ID NO: 51981 - DNA, 726 bp, Heterodera glycines
atgcgacgacctttttttctgggaatgagcttcatttgtaggaaaaagactcaaaaagtgtgttgaaatttatttaatatagtctaaatttccatttggaaaaattcattagttcaattttttacttaaaaaattttttaaataaaaataatcaaatttataattctttggggggggggtaggggtgttcggtgccgataggcgccgccgggcgaattttgaaacttatgctctctttttaacagatattcaccaaaaatttttttagatttttccgataaatttttgttcttccaatcggttttttgtaaaaatgttttaaaatatttaaatttttatgatttacttaaggaaaattgaattgttaattacaacgaaattttcatccggcggtgccatcagaatttttttgataaattgttcaatttgttaacaaattatgccaagatgggtgttttgttattaatcgtaaaaaataaatcaaatagaaacgtcaaccggcaccgaactcataaattttgacttttgtcccagaaaatattaactacatatttcagaatatcgcctcaataaaaatcatgacccttcaaatgaatataatatgagataattaaaggaaaagtggaaaaactttttataaaaaatgaaaaaccatttcataattttacatggtatgaattgaggtattttaaaataattaaaaattctaatctgtgatttaattaa

SEQ ID NO: 51982 - DNA, 652 bp, Heterodera glycines
atgtgcctttccctgcgcgaggagatgaccttctcgctgcttttcatgttggctggcaaagtgtgcattcagggggctttcaacattctctacatgtacgtttactcccccactgattgaattgcctttccgtgccgtcccttcgttcagcttcacctccgagctgtaccccacggtgatccgcaacagtgccgtcggcacttgctcaatgatggcccgcttcggctccgctgcctccggttacatcgccattctttccgacgtcactttgcccaccgtcccaatggccatcttttgcatcttctcactgttcgccggtgtgctcatttatttccttcccgagacgagggatttgccccttccggagacaatgtgggacgcggtcaggtgagaagcgaaaagcaacggaacggcacacacttttaaggatgctgaacaacacggaagccaatcggtgtgttggaggtattcaaatggaggagggcgacagagacgaaagttacgggcaaagtgagcggaaaaagcggaggaaaggacggggagacggaagggatggaaaggaagaggaggaagaggaagagagggaagaggaggaggaggaggaagatgaagaggaggaggacgtgccattgtacacaaacgcatcgaaacg

SEQ ID NO: 51983 - DNA, 2447 bp, Heterodera glycines
atgctgtttgctcaatcgtcgcaatatgacgccgatttgccatgcacaagtgcacaggcgttgcaggtggttgaattgtaattatggggtcaaaatttaaatttccagtttcatcaaatttttttaaatttcaattttagcatgatcaacaacgacagcagcaagtgctggtggagacgttcatggatggccgactgcgattgttgtgcagcacgcgcccggatgagaacggcgttggcgacggaggtggttgtggcgaggacggtggaacgactggtgccaatgccgtcggtggcctggaacggatgagtgccgatgtgttggtcaacttttgtgccagcgatattctgtcaggtcagcctaacatgatgtccattcattcagaatttgacactcaaaaaaaaacgatgacccccccccccccgtgggtctatcaaaagccggtcaatccgggtttttccaaaaagcgccggatcggttttgccagtccgttcttctttttaatttttttttccaattttaggcgatgaaactttcctgcgtgtccacgatttggccggccctcagttgaaggacttctgtgcccaataccaattcattggcatcggcaactgtcgtctgtccaactcttacggcttgaccaacttcaaaagtagccgacagattttaaaatagagaaaatattttattaggaactacctatataaaaaaagtaaaatatcgtaaccctacatgaaaaaagggggggggggggttcaaacaaattttttgagcaggggtcttgccatgtaaagacctatttgcgattttgagcaatttttaaaggaaaattagaagctttggtggtcatctgccggagaaaatttttgagaattaatttatttaaaaaattttcatatttttctctttttatctttttccatttcgtttgcgattcaatctttccttttttcagaaattgctcacgccattttgccccgacctgtccaaggcgatgtggtcgacctggacgagttggtggagttcgacttggccatgtgctaccgtaacgtgttggacttgtccactgaagacggccattgttccgttctcttcacgcatccgctggtgtacggggacaggttaaattcagggcttttgacatgttgcttatatttatgggtgtttttctgggtcgctctgatcacgaatccaacatttattttcaccaatttcgaatcccggactcgaattctaacaaaaagtcgtcgaaaattcaaaatatcactcgcaatttgggacaaaaatgggttgcatttctttgggtttatttggtgtttagcttttgtgaaattttatcacatttttgaagagatttttaacacaggtacggtgagacaaagttggctgctgctgtgatcacacattggctggaccattcgccggtgcctccaaggtagctgagaatgagcaatttttatttttggataaatttggtaccaacactatgctccatttcgagtttgaccctgttgaaaaaaaaattataaatgcataaaagcattaaaacaaattattatttccatgaaaatagtttaaaatttttcaaaaatcactgaaaattttccactgaaatttttttcaaaaaaattttcggcgggaaacgatactgggcagggagtgggaaatagttcacccggcaaaattatatattttttaaaaatattttagctcaattttgttggcattgcgtgccaaagtggggacattctccagtgctacatggacttgatggctgagctggcacagcatggttgggccgactttgtggctgcacattccagcgcactgttctcctgcctggtcgactcatttgacacgggcaacaaattcgagccgtccggtgccagcaaaggggctgcagcttcactggtaagaaaatataatgggacatggcatcacctcccggtcccatcagggattgcattccgaggccccaaaaaattttcgtaaacctaaactccaaggcccaagaatttttcgggattccgatttcaaaaatatcggaaatcgaaattccgtgccatccctggtccacccatacattatttagcaacaatttttatttaaaattttcgtttgaaaaaataaaaattcaaaaaaaatttttttgttttttttttgaaattccgattaaattgaaaagcaaataagtgtaaataatgatataaatacaatatattgctcattatatatattttgctattattgacacattttttaggaggatcccgctttgcgtgtccatcttgttggtgatgacccgcgacgtccaaggcgaggacaaccgaagcaattggtttcgtacgaattgggggtcagttaaaaaatacgttttacaatatttgaaatgtaccgtttaaaatgacaagaaaaaaatatgaaatttttcattttttttaaataaa

SEQ ID NO: 51984 - DNA, 750 bp, Heterodera glycines
atgtcgggatttttgcgtacaaaaatcgcaatagagctaaaggctcttgagaaggcgaaaacggcaacagaattgtatgctgagccggaccaaactctgacctcattggaaaatgcaattctcctggaaagcgcggcagagagaataaagtcagaggtggaggcagtgaatgccaaaattgagcaaatttggataaccgcaagcaaatggcatgacgtcatacaaaaaatggacaaggacgaaagaaaaagtgagcaaacagcgtatgaacaatttcaaacaacggagaaactgaacacaaaaatggaagcagccaacacaaagctaacagagctgaaggacctggagatgaaggtggaagcaggagcaaagctgcaacgctccaaagcagacagagacgcgcgagtggagcaaagagaacatgcaaaagcaatgtcgaagtcgaatgcagaagcagacaaagggaataaccgtgcgagaggcaatgaaatgactgccgcattgtaccaattgccaacactaagaattaagccgtttgggggagacaaacgggaatggcccatgtttgaagaagcatttaaagtggctgtggaccaaaagccaggaagcaaaacggagaagctaaatttgctgaaatcgctggttgagcgagaggccgcattgctcatcggaggcctacgcctggaagagaaaaattacgaaattgccatgaagctgttaaaggacacctatggcgacaaaggcgaatat

SEQ ID NO: 51985 - DNA, 262 bp, Heterodera glycines
atgtcagacaatcgaaaagaagcggcggagcgaaaaatggcaaaagcaatgtaaaataaaaaatgccaattttaaattcaattttaaattttgtttccctttttttcagtttcgtttccgccgactgttggctttgtgtgttcgatttgcttccggcttatcaacttggccttggaattgcatgattagctaccgttttgacttttatgtggatgaacatttcaagacacgacgctggactctgaaatccatgaaaattaaa

SEQ ID NO: 51986 - DNA, 358 bp, Heterodera glycines
  unsure (1)..(358): unsure at all n locations
atgtttgtcggatgttgtgccattctttggttttattgggaccgcctcaaaaaaccaaaaaagaaaatgtaaaaaagaaaaaaattcaaaaatttggtatttaattttcagtttcatctccgccgactgttggctttgtgtgttcgatttgcttacgccttcacaacttggccttggcatttcaatgatcagccaccgttttgacttttacgtggacgaacacttcaaaacacgcaaatgggcattgacacatattcaaatttggcgcagaattggagaaaatgacaccaaggaaatggaaatttgccatgacggtggaaatcctttgccaattcctcaaattncattgccacgcaaa

SEQ ID NO: 51987 - DNA, 63 bp, Heterodera glycines
atggcagagaaagcaaatgagaggaaaaagaaaatagtacagaccaaagaaaagagaggaaag

SEQ ID NO: 51988 - DNA, 411 bp, Heterodera glycines
atgacctgcgaaggctgctcaaatgcagtgaaacgtgtacttggcaaattggaaggtcaaaaaaaataaaataaaaattttgtttctcaaaacctcggcaaaaaacaacaacaacaactttgtctttgattaaatctacaagcattgagatggcacagaatttcgacatttttggggtccgaattattccgattcccgaaatttaaaaaaaggtgaaatcttcggaataacttttttttttgccaattcaattgggcatcttggccgggcattttaatttctaaaataacaaaaaattagttttcctaaaataataataaaattgtttttgaagacaaggtaaagctgctcagtgtggacctgaacgccaaagaggtgcaggtggagagcagcagtatgggccaagatgag

SEQ ID NO: 51989 - DNA, 182 bp, Heterodera glycines
atgaagcgggtcagtttggtcaaaatttgattcgagataaaattccatttttaaggaccgtgaagaacaacaagaagaaatcggaggcaaggagagcgacggagaaagcaatggagaagaagaacaattcgattttgaataaaaacagttggatgaaaggtttttctttgtttttacagaaa

SEQ ID NO: 51990 - DNA, 776 bp, Heterodera glycines
atgtgcaatttcgcagtttttatacacataccaatagagcccggaattttgaaatggccgggaccgggatcgggaccgggacttggaaaatggaccgggacgggatcccgggaccgggagtcccgtttttccggaactcccggtcccggtggtttgaccaaaaaacccgggaccgggagtccaggcaaaatcccggcgggatcccggtcccgtccgggctctagaaaaaatatcatgacccataattcagcactgttatgtttgtatttgattttcggagtttcggcatgctgttctgttttattattgctcatgccgccgccgccgttttgcttccgctttaatacggcatttttcgcaacatggttgttttagccgcttctcaggcctttggtgacacttcactgagttggttcgattcgttggtggaccgtttattgcgtataaatcttcaaaaaggaattttaaaaatttgaaaaacaaaaatttcagaaaaccaagcaactccaaccgaatttgttgccaaactttttgctggaattactgaccgattcattgaatcggcggctggtcagtcggccaatttgccacatttttttgccgtttttaattatttttttcagctcgtttgccgttgcttggccgtcaatgtaccgacaattatggttcgtaagaaccaagatttttgtttgagcctctgggtcgggaatggaaccatggtcgaatttgctggatcaaaatttaatccaccccattttctgggtccgcttttccta

SEQ ID NO: 51991 - DNA, 383 bp, Heterodera glycines
  unsure (1)..(383): unsure at all n locations
atggcatttcgtgccggtgcaggcaccggtcgggaattggcacaacgaccggaccaatacttggacatcttggtaagtttttggagttacatacctgttttacaatggcattttttaagcggtaaaatttcagacaaattttgactgttgttggtcaacgcctgacgaagtgcacgcaattgctgaacaattagacgaatttgtgcaccacgaaattcggttagttttcattttctgaatttttcaaaaatattattttcggcaccgtttaaattagcggaatgccgttaacggacatggcttattgtcggaaacccattccataaggctgttcaagtcggtccgctnnaatgccgtgccgaaatatggaaatccgccgccaa

SEQ ID NO: 51992 - DNA, 1270 bp, Heterodera glycines
atgttcaaccggtcccgagaagtgtacaagtacttcgttcgttgttcaaagactactgcatggtcccttatcaaagtttctcgcactgttcagcaatttcttgatgagctcagctcattcttcactttggtatgcgcattatttgacccgattattctttgcattctccaactaatttataggtctttgatttatcacctgaacattcgcaacaccagcagcaaagtgaccacgaggtttacgcaaattttgaagccacctattcttctccacttttgctaaattgtgtttactttagacggtgtcaactgatcagacgaattcggccacatctgaccctcgtcctctgcccgttgtcaccgagtcggtgccggtgagtcaatagcagttactgaaaaaatgtaaaaccctaacaattttaggaagaatcgacttacgatccgccctgggacgaccgccctctgcgtttcatcgaaaccatggctgcttttgaagcgcaccgatcaacaaatgtaattgatatctctactatctttaattgctttttaaatgttctcaattagtagcaaatttatttttctttgcatttttgataaattgtgtttactttaggtagtgcccactgttccgtcaacatcggctgcggcccctcgtcctctgcccgttgtcactgagtcggtgccggtgagtcaacagcagtttcctcaattacttgcaaaattttagaaaaattttcaaattttgaaaacagcctttgtaaagtgtaaaaatgtttatctgttgaacaatggataatttgaatttgttttggacccgggcccagccattttatggccgtcttgtttttaataaatcacagtgtaatttttaatatttcttttcgactttattaaaatcgctcattttattttagacatcagaaattcctgccctgtttgcggagtttttgcgcaccaactgtgttggacatgtgcccaaagaggttcttgtcgcttacctggaggaggccatcaaaattttgaattgtggcggcggacaaagcgccaacactcccaaaatctcaaagttccgcaaggtattgtttcattcattacaaaataatcgaacaagacgggcccagtggggttttaccgggtcgccgggtatcactttcttggaccaaccaccgggaagggccatccgataaaaccatgtttttttttttgaccgggcggcccggccccagtcaatcgtctaatccgggtgctttcaaaatatcggttccacgtaa

SEQ ID NO: 51993 - DNA, 102 bp, Heterodera glycines
ataaaagtcaacgtagaagcctcaaaccaagtggaaaatgcgttttttatgcttaatatatcgaaactagtgcgcagaaaaaaaaggcatatgcctcaaaat

SEQ ID NO: 51994 - DNA, 273 bp, Heterodera glycines
atgaaagactatatcgacgaagtcagtgctgaggatgaaagtgaagaggaggagagagatgatgataaaagtgatgaggaggaagaggaggaggaggaacggaagaaagggagaaagaagggaaataaagatgaggaagaagatgctgagagtgatgatgatgaggaggaggaggaggaagaaagggagaaagaaaaagggaaagaaagggagaaagaaaaagggaaagaaagggagaaagaggaaaggaaagaaagacgaagaagaagatga

SEQ ID NO: 51995 - DNA, 231 bp, Heterodera glycines
atgcaagtcagtcaaatgagaacaatgtccttgtcggtggcaagtcttgttgcattgctcgttttacttgccatctccagccatccaacctttgccagtcctatttcttcaagagacttaaatgatggtaaatttgaaaaatttttgaaaaattaattaattaattaatttttcaatttagctgctgaagcaggtccactccaagcagttgaaaagcgtcggaatgcagaa

SEQ ID NO: 51996 - DNA, 442 bp, Heterodera glycines
atgccaaaaatcagaaaaatgcactccctcgatgccctggagggatgcaatgttttcccatcagccgccgataagacgacggaagaaattaaaggctctcctctggccatgggatgtgttgttgtcgtcgtctacgacgaaaattccattatcttccatggaagatgggacatcggaagaaaattggaacgcatttggcggatgggtaagcagaaatcgtggccaattcaacaggaaatgatgtgatggcgaacccaattttcacaaaaatcgtattttaaatgaataaataattaaaatgcaattttaattttatagcagtcaaatttaattgggttgttattgataaataaattaaaaaattttatgcactttattttactttattttcttgataatataataagatgatatttaattgatgataatttatagttaagaa

SEQ ID NO: 51997 - DNA, 655 bp, Heterodera glycines
atggtcacttcgctggcgtttgtgccgcttgaggaccttacaccggcgctggcagccctagaagatcatctgccgggtgaacttgagggcgttctcgattggtttgttgagtttaattttttttcaatttcattattgactttaaaggtttgtaatcaactacgttgggcgacttcgcaacaatggcacacgcactcgtccattgtttcgtcctgaagaatggagtgtgtatgagcgcacaatgagcggcaccgaccgcacaaacaacttcgccgaagcgtaccatcgcacgttgcaacatgcgatcggacaaggacacccaacaatatggaaattcatcaatattttgcgtgagcaccagaaagtaatcgacgttgacttcgaacatttccttgccggaaatgctccgccgccaaaagcaaagcgctaccgcgacacggacaaaagaattctgaggattttgcagcgctacaatgaggaaaaagcgcagccgcaaatcgaaaatgatcaggggaatatcgccaaaaccaaaaccaaaattcgattattgaaatgcttaggggaatttcgagcaattatcaaacggattgttgatttttttgttaattttatttgttattatattttggataaaactgagatttttaaaaattaa

SEQ ID NO: 51998 - DNA, 135 bp, Heterodera glycines
atgttttttggttcaatttgtgcaaatctgagcttcgccggagacgaaaaacgaatggaatggtaccagaatcaactcgtgacagtttcaacctcgatcattagcaacgtggatccatatgtctctgcgaacttc

SEQ ID NO: 51999 - DNA, 1450 bp, Heterodera glycines
ccggaatctgatgagtacaaggctctgatgaagcttcaaaagacaatggacgaaaattttgagaagttgcagagcacgattgctgtttcggaacgcgtaattgcgcttcgcggcaacctacgcgattataaaaacgtaaacgaaataaaaatattaatcaactggccagtatacagaaaaaaatttcggggagtagacccaaagaactttttatttgctctctggccttttctccaatattatttatatttagtagatatgcctgaaaatgacagaagtttgtatttttggtgtcgaactttcaaaacataatggttctaggttccgacactgccggtaggcgccggcatgaatttattttgaaattttaaatatgataagaaaagcatgcaaatttagaaaaattaaaaaaaaataagtttcttttgggggggagtgttccctcttttcccttttgttacgggcctgtaacttctttttctaaattatagatttaactattttcggaaatccttatttactactgaaatttttttgccagtttacttggtatttcagaacgttcgccgtccgatgaaaactctgcgtcgatacgtgtcgctattttgggaccctgcaattgtaaaaacagacaaagacgtggaaagattcattggtctttgtgatgaccccgacaaacagacaccattaagtattctcgacgtaagggtagcttgatcacacactaaattaattataatataaaaacagtatttttgccttttatgtcatagattaaagtaattgtttaaaataaaaatactttttgctttatcggttatagtttttatcattttaatttcatgtgaataaattatttaaatcattaagaacaaatcacctttcagtacatacaaacatacactgtcgacgactgcacaattggattgtcgcctgaacagattgaacgtcaagcagaatttgtccccatgctcaacaaaattcgtatgcaaataagcagccaaatcgaaagggaaaaattcgattcgatttcagcgggtattaaacattgctttacattaattctaatttaaaaatattttttgtatagaattagttatatggttcacagaacttgagactgacagtgcgaacagcgtgcttcaaaaagtggaaaataacattggtctgttgcacttaattcactgtctatttgctatattttaaaactaatagtctcttcatttgaatatgcatcgtcttcatcagcattttcagctgtaaaagaaattttcctcgaaactggaacatatggacccatttccgtgttagttttccatcttttttgcatttcaaaaagattttttgaagttgcttactcaatgacattgtcgtcggcaaaaacttccacagaaaggaaataaaagagcttgaaaatatcattcgtttggatgttgttaaattggtataa

SEQ ID NO: 52000 - DNA, 1255 bp, Heterodera glycines
atgttcggaaaaaacattaatcgcttggaattgtttgtcggattttttcaccgtttgcgcaaattcgtcccgtcaattctcaacgactgcccatcgcttcacgttctcactatccatgtcaccaatttcttcatcgaattccctgccgatgacagtgccgcggcatcggatggacaagcggtggccaaatggcttttcactccgcttcaaaacgatgcgccaaaggtgttgaaatgcgcgtgggacttggatgctgtgaatttgccgtcgaagattgcagccttcaaagcggtgatttcgaatgatttatttggctcttttacgttttttggagttcattggaagaaattttatgccctaattgggccaaaagtgcccaccttactaattaggattcgtgcccatccccaaccgaaaagccatattaattacatttctttaatcaattttcccgtattttaggcatttgcctcggcttcttctcctgtcaattttattgtcattgtttggtttcgtccgttgccttttgctgatcccgttgtgccctctgtgctgaccaaccaattgactcgggagcaattggcattgaaaataattgacgacaattgtactcgttttctgctcatccgttgtccaattgtgcgcgacgcggacaaatgggcaaaatgggaagaggaggcgattggctatcatcagtggaatcaaattggcattgaaatgaatgatgaggacaacatcggggacgggtgggtgagagattggttttcccaaaaaataattcaaatttattgtggtgttacgatttttaggcttcttgacgcaattcgctgcccaaatgatcagcagcagaaatgaatgaatgaattgtttgagaagtgatcgatcaatttgaattgcggtattagataattaatttgacgtatataaaattgttctttttgttgcggtgatcacaaattgtattatatatatgtgtgggtatatgcctttaggataaattagagatttcctgaaatcccaggctcattcttttgatctaatgataaagtcggtagtcactgttccttcggtttttattttattttttatggtaatttttggtgctgaaaacgaatctgagattattttaagctaatatccattttatgttgagttacatgaaagtttacgtattagcggtaacgggagaagcggctcaaaatcggtggcattttactaaaaatgaaaaacaatgtcatgtcgacagtaaaataaa

SEQ ID NO: 52001 - DNA, 304 bp, Heterodera glycines
atgggatgccaggatatgatcatgctgataactgatggagcacccggctttttccgcgaaacattcgaattgttcaatccggaaaagcgggtaaaaagggcgaagccaacaaaagtccaaaaaatgccatttcaaaattcaggtccgtttcttttcgtttgtcgttggagaagaggcaaaggattttgagcaggtgcttatcccttatattcggccaaatttgaatttgaaaaaggtccgatggatggcatgtgcaaaccgcggatttatggcacatatcagttcaatggccgacgttcaggag

SEQ ID NO: 52002 - DNA, 1461 bp, Heterodera glycines; identical to SEQ ID NO: 21390

SEQ ID NO: 52003 - DNA, 627 bp, Heterodera glycines
atgactaatcaggatgttgtgccttataatccatatttgattaaacggtttaaatcacacataaatattgaaaaagttgctgatataaaagcagtaaaatatatatacaaatacatatttaaaggatatgacgcagccacagttcgttgtgtaacaactgaaaaaggtactgtaaaggaattaatttatgatgaagcaggctcctttcttgatgcacgttatctcagccctgtagaggcttgctggaaaatttttaagttccaattacaagaaaagtcacattctgtacaaagattacctgtgcacttagaaaatgagcaaacaatattttttgatgaaaatgatgaggaggaaaaaataatcgagaaaaaagacaaaaaaagtaaactgatggcatattttgacttttttaaagagaatccaaattcacccttatttttatatcctgaaatgccaaaattttgtgtttggaatcctaagcaagggaaatggattttacgaaaaaatcatacaataagtaaaacaattggaagaatgtatccagttagcccaactgagggtgaaaaatactatcttcgttatcttttgcttcatgtttctggaaaaagttttgaagaccttaaaacg

SEQ ID NO: 52004 - DNA, 418 bp, Heterodera glycines
atggttcgtaaaaaacaaaatttttctgttggaaattcaaatgaatttccaaatacatcttcaaataatcagcaacagattgccgggttcgaagctcccgtaaaaagcggtgaaacgattgaaagggttgtaagctccctaaaaaagcagtctgaccatattgaaaatgataatgatagaaaaacgattaaacgtaaagcaaataattttgatgtgatagaccttgatgaagtatttgaagaattttttgttggtaataattgtaatctttccgagaaagacaaacagatagaaaattccgaacaaaccacaatcagcagaatgcagttatcacgtatgaatatgtccagcgaaaaagctgatgtttcccgtgaaaaagacagaaaacgaaaagtaagccgaaatcaaatgtctgagg

SEQ ID NO: 52005 - DNA, 553 bp, Heterodera glycines
atgcgcgagaatcgagagcaaaaggccaatgcaagcgccactgtttttgtaaccgaaattgccgctttcgtcgtgtttttttggctgtcctttgtgagttgtgccgcaatttaatccgtcgctttttgaaattgcggcgccgttttgctcccccccccaatcatttcaaatcagtgtcatctttccgcctattcattatgccaccccccccgggcttgtcaatccaaacgcgaaacaacaaagatgctgttttgaacgaataaagggcataggttattttgaagaagtgtcaaagaacatgcagcaataagcctgcaaaatctaataagtggaaaatacatgagtatagaatttattttcagaaagtgtcaacagacttttggaaaaatatatttgcaatttatcaacaattttgagaaatgagttagaaatgataaacttttcgattcaaaccaattttcgttgctctaattaaccgggataaaaacattcgaatcaattaaatagcttctgagataataaggtttatcataaaatttcatttaaaaataaa

SEQ ID NO: 52006 - DNA, 1242 bp, Heterodera glycines
tggattcggtcgaaacactcccccgcggacagtcaaaccgttatcacctttacaattcgtctgccagtttggaaatgaattcggtgcctcaaccattgcacattcatcagcaacaacaacaccagcagcagcaggtcggacagcaacaacatttgggtggcacgccactgacaccacgtaatgcgcacgtggtgtacacgcgagtggacagacaggtcgactgtccggttttttgcaaaaatataatgtctgaatattcaatttaccgcatcgttatgtatttgtttagcccattgccaaaatggactttaccgtcagtgggtcagcagtgtccaatggtgttgttggaccaccgcatgattcgccacacaatctccaacagcggcatcagttttccggcactgtttctgcctcaggggctggcggcacgccaccgcttccacctccgccatcgttgacggctgccaacagaggcataacaacagcagcagcaaatgtgcagcagtacaacagaaatgacagtaacggctaccaaaccgttggcggacgagccaatgcagcaggcggcgctgcaatgctttcctttgtgaatgggacgacggcggatggggacgacggcaaaggcgggaattgtgacgcagcggagcacggagttacatcagcaggagaacaccaacaacaaaaagcagctaagcatcagcaccaccaacagcaaaggatggcacacattgttcgacccattgtttatgtcggaggcggtggcggcgttgccggaggcgccagtccatcaccgtccaccataagaagtgccacagggcaatcgcaagcgcaaaaaacaacaccaacttccggtaattattgtcagccaggaccgtaaactgataatgagcgtgggaaaagccagaatcgcctttttttcttaaaaaatattatttggattttgaaggattctcttactttactcttctttgtttttgagcaattgtcaaacattcactaatcatcttcatcttctccacagtccataagtttgcctacaacaacaacggtgccaaagtgccggttggccgtgcgatggttcagccccgtgtgaatttggctgtgtcgtcatctaatgccatagcgacgccttacggatgttcttcttcctcctcccaatacgcgagtgttcgtgtcaacccctcaaatgccggaagtgtttccaataatgccatcatcgaaaatgacgaaagtgaagtcaag

SEQ ID NO: 52007 - DNA, 105 bp, Heterodera glycines
atgttgttgctgtccgacctgctgctgctggtgttgttgttgctgatgaatgtgcaatggttgaggcaccgaattcatttccaaactggcagacgaattgtaaag

SEQ ID NO: 52008 - DNA, 426 bp, Heterodera glycines
cattcaatcactggggactcaacccaccaacattccaatcaacgggactcaaccctccagcatttcaatcactgggactcaactctccagcattcaatcactgggactcaactctccagcattcaatcactgggactcaacccaccaacattccaatcaacgggactcaactctccagcatttcaatcactgggactcaacccaccaacattccaatcaacgggactcaaccctccagcatttcaatcactgggactcaactctccagcattcaatcactgggactcaactctccagcattcaatcactgggactcaacccaccaacattccaatcaacgggactcaactctccagcattcaatcactgggactcaacccaccaacattccaatcgccgggactcaacctcagcaaatttctttag

SEQ ID NO: 52009 - DNA, 884 bp, Heterodera glycines
cattttctcgtccgactctcagcagttccccttcccggtgcctccccagtcgcttcagtctgtgatgagcggtgccccctctgcttctctcgctcgtcctacctccttcccagccgtactctcttccccgagttcgtccttcgttgcccaacatcaaagttccgcctcttcgtccggccaacccgccgtcatttcctcgtcctcgcccgattcaccgatcacttccaatcacccggcagggccaatggaagaggggcaaatgcacgaggagcccaaattatgtgccgtttgcagcgattacgcaatttggtaagtgggaggaatggaatgaaattgaggaggagggaagggagggcactccctgcaggaaagagtgccaacgaattggtcaccgttcgtccgttattccctcaacaatcattggcatttggttttagtcagcactatggcgcgttgacttgcgaaggctgcaaaggcttctttaagcggacagtacaaaagaagtcgcagtatgtgtgtggtgagtgtccaattgtctctttttctctcaccgtctctctttaagcgggcaacaaaaattgccaaattgacaaacgctatcgctccaggtcagttcttcgctcttttggtcgtttattactcaatcgcttggcagatgccaatattgtcgcttccaaaagtgtttggaggttggcatggtgcgcgagattgtccgttacggcagtctccagggacgccgggggcggttgccttccaaggtgaaaagttcgagcggagggattggcggcagcgccggcacggcgatgccaattggcatgggcggcggagtgcagcccgagccggcgccaagtccaccgctgcccattctgaccatcattgccaag

SEQ ID NO: 52010 - DNA, 893 bp, Heterodera glycines
atggaattgttttacgcagggtgagacagttcaaaagaattgtaaaaagataaattatgaaaattataaaaaaatatttttttaattttccatttaaattaacgcaataatttcataatttaagtcaaaagaaataaattcgtacctttttaaatttttttttgaaaaaattattaaaatatctacataattattcatatttccgtatttttatcaatttatttttatttcatattcttcgtctttaaattcaatattttttgcccatttagcaaattgctcaatcgaattttggacctccataaagccgaccaaagccccacgaccataacggagcagccaaaatctgagccgaccgaagaaattggtgttgatcagaatctgaacccggtagtacaagcgggattggcccatttcagtctggtgagccttatatgctttgctaaattttttcttttttgagggtccttttagcataattttttagtcttaaaatttttatttaaaaaaccgggacttgaatcccgtaattttattccgaaaaacacgatttaaactgattatttatttaatttaattgctaatttttctttattttttgcaattcgcataaaaattcaataataaaaaacttcggtttttatcattagaatttttaaaattttcaatctttaaatttccattttttgtccttaattgtttcacagttgacgcacggatttggtgggcattcggtgcaagcggtgcttgaaacaatgatcagagtgatcaacgagtgtaacgttgtgctcactcgcaaataccaatcgccgattaatgccgtcactgccgctggccaacaaaatgccgttctatcgatgccatttgatctcccgtaattccgactgaacgca

SEQ ID NO: 52011 - DNA, 574 bp, Heterodera glycines
atgatgctgattgacactattgatcacggaacccgtcagttgggccccggcacgtttgggccccagcggttttttggttataacttttttttctttgtcatccaaatcaaacattgttggtatcattcgaaagctgtaagtgtcctctattagcctgcaaaattttgaaaaattatgttaaggttcaaaacaattatggccagaacaactcaaaaaaccagattttccaacttttatggccataaatttgttcaaaattgacacaattttttgaaaatttgcaggctaatagagcatctgaagggctttcgaatgataccaatgatgtttgatttggatgacaaagaaaaaagttatagtccaaaaacctgctgacgcccaactgacgtagaccgccccctcactctctcattttcccatattttcaccaacttttatctcaattgaaacagatgattttttgtttaattctgtctcattgtcaggcatgagcattccccgttggtgtccacgtggagcactcggcgcggaacacgcggcgcccatttggtcagtgatccattcgatgacaaaa

SEQ ID NO: 52012 - DNA, 2041 bp, Heterodera glycines
  unsure (1)..(2041): unsure at all n locations
atgacaaaatnnttttaatgaaattgggaaaatttcaaactatttacactttttaaatccctggcggngtctggcggcactctctgcgaatttaaaaaaatatattttcgcatgataagagtagcattttgcgtgcatgcaaagactataattgattctgttgtcattcactttgtgataagaaagggggaagcaaatgaatgaatgataaaatggcacataaaacggacaattctctccgtttcctccccccaccccaagaaaatgcacaagggcagtttagtgccactttttggcaaaaatttgcgacaaaattcgtggagagcgtttggggagaagagcccactgaaaaggtggcgattaaacaaattaagtgccttcaaatggcttattagttttctcttctccaaatcgcttcccctcgtccttctgctgatcattttgctgctttacttccaatttcctctgaatcttttcggcccgagcgatggcaccgattttgggcgaattatttccaatggcactttcctcgccaaatttgttgattttcaaaaacggtattttatgagcaaaaggcaaactttcctttccagtttttcaaaaaattattcaaccatcgaagaaaagctgaggcgtttttcaatttttgttgccaatttcgaacaattggaaaagatcggaagggaaggcgaagtgtacggaattacgacatttttcgattggagcgacgaagaattgaaagaagtgatcactgatcagacacaaggaacttactgatcggctccattttcagttgataatgccacatgaatactttgaaagcgttcccttttcttgggctaagccaatccgcgaatttcgtccgatggatgcgaattttaagcggccgagcgaattcgattggcgcaaaaagggagtggtcaatcacgtgaagaatcagagtgagtggacgaagtgatcggagaaaaggccaaaaatgaaaagggatttgcttaagtgcgttgcggcgcgtgttgggcttttgccacggcagcagtggtcgagtcacagcacgcaattcacaacggaacactgctcactctgtcggaacaggtcactgactccaaacgaaagtgatcagccgaggccgaaacaaagggaataaatccgacagaatttagtgggatttgcaatttcatagaaatcaaaagccagaaataattctgcttgattttgcgtattgatcagattgctttgctgttgatcaactgtttgtttagcaaatgatcgattgcgaccaatcgaacaacggatgcgaaggagggaacagaccaaacgcatttcggtcggtgctccctttgatgccattcattgtctgtctttcacttcccttcctcatttgtcagctacgttcgtgataatggccttctccgtgaagataattaccctgtctctcgccccccctcccaatttgccacttttgtcctttcatttgccttttgaagtaccgcggtgccgatggtaactgcgaattgtcgccgggccccgtggacccaacgcaacggacattcgtcgacgaagtgcgaactttgccgagcgacgagcagcaaattgcggattttgttgtggagaaagggcccgtttcatttggtagacgaacagcaaaaagaaagggaccaatgggaaaggaactctttgaggaatgaatgtgaccaaaacaatgtttcattatgtggggggcattttctcgccaactgccgacgaatgccaattccattcgatgggtcggcatgccatggaagtggtcggatttggagaggacgaaaagagtggcggaacacccttctggatcatgaagaacagttggggcagttcgtggggcatcaacgggggatatatgcacattcggaggtcggcagaagagggagtgatcgggaggngagggggggggagtgatcggaaagcggtcgtcgtagaagtgatcgctgctttgtcacgacttcttttcaggngggtcgatgcgtgcggactttcgcgggaagtacacacggctctgattacg

SEQ ID NO: 52013 - DNA, 398 bp, Heterodera glycines
gtgacaaagacaaggccaacagctatcacaaagagttccaaacttttcgggaggatgtccatgatttgttctacgataagggcgggtggttcgactacgacctgaaaaatcaaaaactgatcaatcgcttctacggaagcattgttgtgccactgttcgcgagatgctatcacacggccgacgtggaggagacggaaaaaatgttaacccaattggaagagttcgacaagaaaaaccaaataatgagccagaaatttggggtgccgacgaggtaaataaatggcaaattgaactaaaaaaagaaaaagaattgtttcagcgcaattgcttcggggcagcagtgggatttccccaatatttggccggtaaaggcggaaagcgtcgtttattacaattaa

SEQ ID NO: 52014 - DNA, 1113 bp, Heterodera glycines
atgattggacaacttttcgcttctgttctaccgcttgtcttgttcgccaacttaataaatggttagctttttaaagtgaatttttaatttttttttaatttagttggcgaaatggtccgtggtgggtcaaattcgctttctatgactaatggtggtgggccaccaattcagcaacaaaatccgagcatcaacctggtgacgaatgtcgcccattcacttaacaatctcaggctcaatccatcggcagaaggtaaagccttcggaaaattgaatttatttattcataaataaattatttttaatttagaaaatcaacatcaaccaacaccggtaaacgcagctcagccgaaaatgtaaaaataaaaaacattaaaaaattatttaaaaaataaatttaattattttagacggcaaaacccgaataaaaaaggtgtgaaagttggaagcaaaatgaaactgcaacaaaagcttaagagtggagtgaaaagcaaagatttgggtgaaaagaaaagcaaattgggaatggcaatgtaagtggacgaaaattttgaaaattcataaaaaaacgatagaaatttttgtattaacttattattccatcggacagaatggacaatcccaaaaatatcacgagactctcgaaaataattaaatttttatgttttcgaaaattatttctaattttttgggtttgaataaattattaaaaaaagctcaaaattataattcaaggttttatgtgtttatgctgatccgtttgttcgtgccacatacacatgtgccaacaaatgtgatgctccgtaagtattttttcatcatttttttaaatgcaaattatttaaaatttaatcaaataaaggctatgacaatcattttgtgccaattgagcaacaatttgtgtcatgccaacccatggacaataatggcatcgggcaaaagtgtgaattcattgtggaacaaatggcgatgaataagaacatgccgaatgtgtcgatttgggccaatttggacggtgacaaagaaacaatacaacaattgggccatcaagttggaataattcattcatttaattaaaacatttttttataattttattggataggcaaaaataaa

SEQ ID NO: 52015 - DNA, 261 bp, Heterodera glycines
atgtactgcaacacaaaagtccataaaatgaatgtaagagtttttgaaaaaattagcttactttctttacgttttaaataattttcaattctttttaagagttttaatttaaaaattattttccattttattaaaatattcagattctatgtttgtgaatttatttatataatttggatgttttattttaattttttcattttttatttttccaaaatttttttcaattttcaatttctttttgagcaatgatagaataaa

SEQ ID NO: 52016 - DNA, 570 bp, Heterodera glycines
atgaccgtcacatccaacaccgaattccgactcatcgaatgtgtgccaatccttgaggaagttgctcgtgaatttggctgtattacgccactaccaaaccttgggtatgtttctttcgttttacaacactaactccagcatacagtagccatcgtgactatcgtgtaagcggatgtatgatgattcgcacgctgacatcgttgaatcgactctacattttcgatgctgaagactgtattgaggttaatggaaaatatgtttcatattttattgctattttaggtgaagggtttcttaaggcaagaggacggcacgagccaaaaagtggtcaacgaatattatgaaaaatatgatggactaaatggatttgctgaatttattcggaattgggcctttacttttttttgtttccatgccttatgaggatgacacatctgatgaagactaatttcgttaatatttattctatgctctttgttacaaaccgataaacaaatccatcagggttatttgaacgattcaaaatttgcataatattttcgaaacacaatccgacggacataaaataaa

SEQ ID NO: 52017 - DNA, 235 bp, Heterodera glycines
atgccgtatttccgaattctgtcgttggcattctctttcttaaaaggtgttccgcaccccgactttggcgaggcggtcgtcgccgtctgcgaaccttccgatgccttcgcagaaaagctcagcggcgttgcgcaccaattgacggacgatgagaagagtgccttccgtcaaacattggcaccctacaaaattccaaaggctgtccaatttatgccgttgccacgcaatcaccttg

SEQ ID NO: 52018 - DNA, 1010 bp, Heterodera glycines
atgttggtcaccacgtcatccacttccggcgggtaaacattcagtccccccgtaatgatcaaatccttttggcgccctttgatccaaacgaagcctaattaaaaaagcaaacaaacaattaagttttataattacacgaacaaatcatttatgggagcagaaaaagtcaacagaaatttatactttaaaatccataaacaaatttttttttaaattttccaaatgacaaaggcattttaaataaaaaaaattcaagaacttttacgaattttatttaatattttctcctcatacagtaaataagttcatttcttcctccatcactcattaattcaaaaagaataaaatttaataaaataataaataaatttcaccgttttggtcaatttcgcccatgtcgccggtgatgaagaagccgtccgctgtgaattcctgcttggtcttctccggcaggttcagatacctacccgttgaacagactcggactcttcagctcaatgactccggggggggggggcgtcgtgtggaaatacaaacaaagaaagtgtgctaggcagggctgcacgcaattacggattgcggattacggaaattacggggttttgggagttacggattacgggttacggatttttgggatttttccgtaattttgatccgtaatttgacttttggattattttttcgagacgatttcttgtacgattatttttataaaaaacaaatttttctattttttatttaaagggctacccgtatttcgatttatttaagaattaaaatagatttataattttttatttgttgttgttaaggctatttgggtagttcgcctagaaaatagaggcatcacttttttgtcacacctatttttcacgcattttatgaaaattcataaaaccttagccaggtgaggggaggaattccccccttcccccgcccgaaatgaaaaattaaaaatttttacaggaaaaattgggacttttaaatttttttgtcgatttttctta

SEQ ID NO: 52019 - DNA, 52 bp, Heterodera glycines
atggagaaggcctgcaaaatttggagagattatatcgattttagtgcgctag

SEQ ID NO: 52020 - DNA, 701 bp, Heterodera glycines
tttggtgcgctttagagcactttctgaaaaaaatatttatgaaacaaaaaaatcgattttttcaagtgtccgtttggggtactcaaacatttatggggagcaaaaatccaacgcagaattaaagtacaggctatagggaagctattcccgaaggattcggtctccccataaatctgggcgcatcggttcggggggactgccccgaaaacaaaaaaatcgattttttcaagtgtccgtttggggtactcaaacaattatggggagcaaaaatccaacgcagaattaaagtacaggctatagggaagctattccggaaggattcggtctccccataaatctgggcgcatcggttcggggggactgccccgaaaacaaaaaaatcgattttttcaagtgtccgtttggggtactcaaacaattatggggagcaaaaatccaacgcagaattaaagtacaggctatagggaagctattcccgaaggattcggtctccccataaatctgggcgcatcggttcggggggactgccccgaaaacaaaaaaatcgattttttcaagtgtccgtttggggtactcaaacaattatggggagcaaaaatccaacgcagaattaaagtacaggctatagggaagctattcccgaaggattcggtctccccataaatctgggcgcatcggttcggggggactgccccgaaaac

SEQ ID NO: 52021 - DNA, 156 bp, Heterodera glycines
  unsure (1)..(156): unsure at all n locations
aaaaaaatcgattttctctagtgtccgtttggggtactcaaacatttatggggagcaaaaatccacngcagattaaagtacaggctatagggaagctatccccgaaggatcggtctccccataaatctgggcgcatcggttcggggggactgcccc

SEQ ID NO: 52022 - DNA, 892 bp, Heterodera glycines
  unsure (1)..(892): unsure at all n locations
atggttaaaaaatttttccttttatcaacgaatatgccattcttaagggtatatttggggcgggggcgggggtaaggccataaaacctgtcccgtccccggggacggggtccgaaccctattttaaatatttgcaaatgttgttattgcatttttataatttatttacttatttattcaattttccatattttattttagctatattttaattgattttacaatgctaatttttcaaaaattagcaaaatttttggaaaatatgtgtaacgaaggtattgaagcggacgccatgaaggctgggggtccagcggtgtcgttaggcgccactgggaaaatgcacaaatgaattttctgaggagaagaggaaatgaatgggtgaatcaattgggcactgttgctgccattctctcttctgcctcttcttcggttgaccacgggcagaaaaaccaaatgaatcaattgggtgggcgtctcatcgggtcggcgtcagtttggcgcggccactggcgccggtttttggtgccgcttttttggagcggccgttttagcgcccgtaatggttttttggcgccagtgtttaaaaatcaccaaaattttaatttgcctttcattttggataattatatgtcattttctttacaataactcaaactcgaatatttagaaaatttttttgaaaatttttagggatgggaaaaaattttaaaaaattttttgcttatatatagggttgtgaattatatggactaaaaaacactaaatgtggacataaaatttggactaaaaactcaaaatatggtacanaacatggacaaaaactgccnaaatatacgttataacccctcaaaatcacaaaaatgtttaaaattcttggtcaagaaaataataaa

SEQ ID NO: 52023 - DNA, 749 bp, Heterodera glycines
atgattcgtgcaatcacacaatttactcattcatctcaagtggatattattggctacagtatgggatcacctattgcaagaaagttactgtaattggcggtgtaccgtaaaatttaaaaaataaatttattaattaattttccatttttaggccattcttggtggtgtttgtgtggacaccgaagaacaattgggcccaccattaacccatttggtgcatacattcatcggcgttggcggtgccaaccgtgaagctgtccatttgtgccgactttttgagtgggcaatgccgtgcaatcctgtcaatggcatgcgatgccattcccaatttttatatgacattaattcaaagtaggaattttcattttagaaaactattttttaaatttacataagccgaaaaaatcggcaggatttattattaaaaacccaaatagggccacaaaattgagaaaatttaaatttaaaatattttaaattaaagggttggttatgaggcaaccacacgaattttcgtcattcggtcaatggacgacggaacggtggggacaagggattgtgaaggacgttcagtgagcgcaattgatggacaaaatgacgaaattgtggtaaatattaataataatttaaataattaaaaattatttgtgtttattcagctgcggaactacagccatcagatggtaatttttggaactggagacaacagctcaaacttttacattttgatcaattgttttttaaaatga

SEQ ID NO: 52024 - DNA, 562 bp, Heterodera glycines
atgtgcccgccggcgacaaatcgtacaacggacactgatcacatcaaagtggcggctgctacagtagacgattcgcgcgctaccgtaggcgaggggcttgcggacggtgacgacgacgcttcgcaactgcgacacgcgtcaacaccgttgctgacgcgctactattttgacgcggtcaccgctcaatgttatccgtttggtgcgcagacatgtggcggcaacgaaaatcgcttcgaaacgaaggagaaatgcttgacgaagtgtcgcattggcaccgattgatcttttcaaatttttatgtgattcaaattttgttccatcattgcctcgtttatttgacattttggcattcttcagactataaaaaccgggttggcaaattgtctttttggcgtttggaattgatggtacatacatagaccatcaatgtgtgttttactaaatccaatttttgagttgattaaggagcatatttttataagcttaaaacctgatccctcccctaaattagacccctgagaaaacccaacttatgagggagggggagggcgtgaaaaataaa

SEQ ID NO: 52025 - DNA, 925 bp, Heterodera glycines
ccaatattctgtctttattttgctgtgcctttttctgattgccgaatttggccacacttccgcagagtgccaaaaggacaaaaccgaagcgacaaaagaagcattattgcttcaatgtatgaaataaatttaatgcaaaaatatgaaaatttatttaaaatgttttaatgatttaagtgaataaaaaattaataaaaaaaatttttcttttagagaattttttcgaaattttggcaaattttttgttagtgtattttgatatttttagaaaaaaatttcgtcatacccctggtatggatcagggatggcatagaattccaattttttaaatcacctttcacttgatattttaaatttactattaaattatttagaaaattttattattttttttattttttcaaaaattttcgcaattttttgggtttaattccgatttccggaaaaaaaattttgtgtctcggaattccgattccgggaaaattttgggcttcggaatgccatctctggtatggatgagtttggtttattaccccattaaaattattaaaattttcaaaaattcagggctaaattaatagatcatcaagggcatttgtgcctaaatttgttaattacctaattaggcaatttctatttttagcattttagacttttttgctcgtggtttcccttttctgtccgactccgacgatttaccaacagcagcagcagatgaagtcaaacaaaaattgacaaataaatgtgattgatgatggtgatcggcagtgatcggttgagaaaatttaaaaagaaaattttaccaaaaatgtaatttcattaatgatttttaattggtgattggagtttgaaaatgagaatcgcagatcatctcttcatttttggttaatcaaatgaaataaaaattgaaaaaaaattgtacgaa

SEQ ID NO: 52026 - DNA, 341 bp, Heterodera glycines
atggcctcgaagattggcggcccgggcagccttggggatccgtcattatggggaagcagtagcagaacaagcacagcaatccttctcaacaaaaatgatgctgctgatgaggaatgtccaaattggcgatgtgttattatgggaaagttattctgataagctgataatgccattctaaatatagaaaattgttatagctcataattttcattattacagtaatttgaggagttgaaattgtaacaatacatcaatttgagggcttgaaattgtatatttcttttaaatattttggaaaatttcaaaaaaagaaatttcggaaatttaacgccgataaagaa

SEQ ID NO: 52027 - DNA, 157 bp, Heterodera glycines
atgagtaaagtgagtaaaccagtaaaggagaaggcaacaaaagatgtaagcatcattgaaaaggaggagccagaatgtttttatgttaaaaaaattttggcaatgtacgtgtgccatgacaaagaaaaaagtcgacttttctacattgattgggaag

SEQ ID NO: 52028 - DNA, 1781 bp, Heterodera glycines
atgtgtgaacgacgcgttggcaatgtgctcaccgaccgcaaatgtggcggatctgatgcacttgttgtgcggcgtcaaactgaccaaacgcgagcaaatgaagtgcaaaattttctccgaaaaattcatgctcaaaagtcgacttcggcaaagccaacgaaacggtaaaatttttgaaaaacaaacttttcttaagttaattttctggaaaaaacgcttctatgaagccaaaagtgttttaaaaatacctaacatgaaataaaattcaaaaaaaaaaaaattttttttttgacaaatttaaaaacctaacgaacaatttgttttactaggaatttagggggttgagcggtttttttttctttaattattatttttgccttatttcaacagaattccaagcggttgctgagtttttctccaccaatgcgctccgggcgtacaaacgcgtgttcggctttgtgtccaacctgcagttgcagcgggctcagttggactacacgggacagaatttgttacgcgttgtgcgccagcggttggccacacggagcggtgcgttttggtgcacagtccccctccccctcgaatcaaaaaaaaattttttaaatcttttttgagattttttgaaacttttgtagaaaaacatagttttgtcatcataaaattttgaaaaaatcgctaacaaattttcaatttaaatttttctaggtttctattttgaaaagtactaattgtaaatttgatttaaaaaaaaaacttcggggggggggagaggtcgtccggcgcgtagtggagaaggacaggaaaaaaattttataaagcaaactggcatattttaactaaattttttatttgttgcagaatatcgttcctctttctactcgatgctcatcattttgcagaaagtccgaatgtttctcaaccgactggcccattatgtgtttgaagaggtacaaacaaatttaaattaattaaacaataaattggtgacagaaaattggaaaaaatgcctgtctcgaatttaatgaaaaataatcacatttgagtatgtgagattctaaatttataactgtttgattatcatatcggatcctctgtttaaaaaataacaaaattttcggaaaaaatctcactaaaaggtgatgaccacccccattctttaggtgttgctgttggagagcatttacatttttgacaaagttcgtgccacgaaggacccgcatgtactgcttgcgggcctttacccgttgctgagtggcgtgttgtgagttcattactttttatatatgtgtgataaattaactttaatttaacctaaataattgatttttgtgttttttttaaatttccctttctcaaaaaaccataatttacatttttgcaatatttatgcagggtaaaatattataaatttaaaaaaaaaattttccaggctcgcacttttcttaccgtccgctctcagcaaacttcatgaaagtgtgcagcagtgtattcgaaatgccagtgattttgtgggatcaagtaagaattttcttttttaatttaattaattaattattttttatcattttttaaatttccccttacaaatttcagtcagcaaattttgtgtgttcattgaacactcggactcggatgtgttggatgcgctgttgttggcatcgactgacgacgacgacggcaccgcaacaaacgatgaccgggacaccaacaaaaacatcagcaaccaacaccagcaggacgacgaagatggcactgatcatcgtcatgatgacctgaggtaa

SEQ ID NO: 52029 - DNA, 410 bp, Heterodera glycines
atggtttctccagacgaagttgctgaagagtataggttcgtatttaaattgaccaattcgttcggttttcttgaaaaacaaatactaattcagggcagcgctgtcggagctgacacgcaatgacaagactcagatcaatctgctcacaattttggccgaggattatgcgtcatatgccagcgcaattgttgctgtgattgaggaacgtctcttcaaggttttttgaatgggactttatttttgcatttctttactgaatagcattgcccgttcagtgtccatcaccgatgaaaatcgtcatgctctatgtgctcgactcgatcgtcaagaacattcccgcgacaagcggcgcctaccgtgacttatttgcgaaaaggattgttgacatgattgtccatgtgttcaaggag

SEQ ID NO: 52030 - DNA, 836 bp, Heterodera glycines
atgagaaaggaacatgcggacagaccaacaaaagttgagctgaccaagggaataagtgtactgatgaatagaggtggcgaagaaggcgaagttgttgataccccacgccgtcctcccgctcctccaccaccacctcctcctcctgggagacctcttcgtcgtccaccgccgagtcctccgggtcccggtggtccttcgccaccaagtcccccacctcgtccacaacgccccccgagaccgagcaggacttctcggagaagtggtcgtatggagcaatggcgacaaaggcgatacgatatacagcaacggcagccgccgccgctggtagtgcgagacctcctcgcagaagcagctgctgcgccactgcccgaaagtgacgatgataatgatgctgatgatgagtatatgttggagaacggattcgcgctaccagcaccatcacaatactatggcgatttgcctgtgctgccgacaatgcggaagaaattgaggaaatggacacagctcagcgcaggattgccatcagaagaaaattactcaaggacgaggctgacgatgatgatgatcaacgcaaaaaatataggatttatcaacctccaccactgcctcgcgcaaaagtaaaagttgagccgaggcctcctccagctcgaccacgtactaacatcaagagagaacaacataagccaaagtcagaattcaaaccgtcgctggcaccaaagcacgttgatcaccccacttctacacctagggcaaaaagagagcctgactttaatctcgatccacgaccatctacatcaagacaagccggatataacccgcctcccccgacgcccaaa

SEQ ID NO: 52031 - DNA, 575 bp, Heterodera glycines
atgcattctgaaacagttttcatatatgctcaggaacaagagccgaaacataatgataaaaactggaaggcgccgttaggggcggtactaaaacatcaaattttggacccgccacaaggattcggaattcctgtttcaggaataaccgatttctacatatatcttaggcgttgtgcagcattttttcctgccaatgcagagaatgcagacctgttttcaattaatattataatgccaaataatacagaaggattaacaatatggtaaattaagtttttaagctttagatttcagatagatataaaaaagatacccattaaccatcttttgtctaaaaaattatttataggtatagtatcccagctgccgattttcaaaaatttaaaagtctagcagtacatattttgtgaaagaattttcaaaaaccgatgaatatttaagaaagaatacacccaaaaattcttgtcaaaaacagaattcgctttgttcgaacggcggggagggtattttaacactaccagggtcaattcattttggatttagtacggtaaaattttatttataaacttgcaata

SEQ ID NO: 52032 - DNA, 1733 bp, Heterodera glycines
  unsure (1)..(1733): unsure at all n locations
gagaacaggaaaaanccgaattttttcttggcgttgactcaagaccgggtacaaaaaatgtacccccaaaaattgcgtcattttcttacactttttttttcaaaaacagtgagttgaacacccatcagccccaagtggaagtggtgcgctccaagggcaaggagttggccaagtccagcgaaattggcgggccggagattgagcgccgtatcaaagcattggaccaaagttggacacaaatggtcgaattggcagaggaccggcaaaaaaagctgcaggagaggtgggaaaagggagaaaaagcattgaaaatttcaaaattatatgagtgaatttattttctccaattttctaatattttttgaaaaagttattgaaaaaatatctcttcaaaagctacacaaagcgatattttcaaattttatttgaaattctcggtccaaataaatttatttaaatttctgtaataaatctcaaatttttggattttgctttttatttattgcttaattttataaatacctaaaattcagtcaattattttgcgaaatgaacattgattgaattacccaataataattaaaaatttatttttttaaatttctattccctattttttcctccccttcccatcagtgaggagttccaaaatttcattggccgtgttgaggaggaggaagcctggctgaacgagaagcaacagatactcagctcgcccaacgtcggtgagaacatggctgcagtgcagggactgttgaagaagcacgacacgttcgaggtggacctgcagatgcaccagcagcgcattgacgaactgcagcgccaaggcgaacaggtgggagacagaatggcatggcacacgcgggggagggcgaaattgacacataataaagccaaaatttgtcttaaaaagggacatattaaaatatttttattcaaaattaataattttaaagaagctaacatatttgtttccttgggtgactttataaacactgtcgaaaaaatttctcaaaacgaaaatctcagaaaaaagatcagctactttattttattaacattaaattcctttaattttgttaattataattattaattgataattacagctcatcaattctggcaatcaccacgcaaagaacatcggcacgcgcacggaacaattactcaagcatttgatcctgatcaaagaattggccgtccaacgattgcaaaagttgcgcgacaacaacgcgtacatgcaggtagataattgactcgttgttgactggtttctcaagactgaaagtctgtctaataatattgactttttcaatactctcgaaatggtggaaatttttctgattattttaaatttttgcatgaagactgatcagtcattaatataatccggcattattggattcagagacatggcatctaattgtttgaatgacaacttctatttattcgagacttcttaattttgagactccccttaaatgaagcgggattcgaataatttttgtccaccttcaataattcgcatttcttatggcaccaaaccggatttcgaaatgccgtaacccaatggtccaatttttcagttcatgtggaaatgcgatgtggtggagagttggatcggtgacaaagaaccgcacgttcgttccgctgattatggccgcgatttgtcgtcggtgcaactgttgctgaacaaacaggacactttcgacaatgggctgaacaattttgag

SEQ ID NO: 52033 - DNA, 315 bp, Heterodera glycines
atggccaaacgttcgcttttggccaagaacgcgtcaaccaatgacctcacccaatacatcaatcctgtcctcgcaaagtaagttaaaacctaattaatcttaattaattaattaattcggtttgccacatttagtcgtcgccgttcttctctgttctgcaccgctgtcgacccggcaatgaaacggctgcggcagcgcgaggcgtacaaaacggcaatgtgccaagtgggggctttcactgctttaggaaagaagcattggcttcgtttattttaatttaccttatttgtttaattatttggaataattaataaa

SEQ ID NO: 52034 - DNA, 1272 bp, Heterodera glycines
atgaggtacaaaagtgagtaaaaatacagtaagttaaaagccatgaatagttaaacaaaaacccatgaataggaaaatcgacaaatatatggaaggattatggggtgtataaaagtgattaattaatccacagagacagagagcgaccggcccatgcagagaacagcgacttgagtcagtttctaattgcttatttgaatgtaagctctttaaatctcaatgattcttcgagatgaaccgtggtttaagcgtgtcataaacataaatttctgaccccgcccgactaattagtgcccggtcggtctttctctgttgaattgtttaaacagtgaattaccaatgccacaattagtggttgcctgtttgctgctgatggccaacgtgttcatcttcatattcatcaacaatttctgcacgaatcagcacttcctccggccacaaaacatccgaaccgaccagacgaatttcctttttttaaattagggcataattaagcgtaattaattatgcctaagggcacctctgtcgaagtgtcagctgccgaggtgaagtggaggcggcgaaaaagctttgaaattgccgtttccaatactttgttggcgagcggaaggccaacacaatggcgcgggccaaacccaccaaagggcagccaattcaattgccaatccgcggggagggaaccgtcgtccaaccatctttcgggaatatggttttaattagtaattaaaattgttgcaagccaaacaaattcagcgacagttttggggagtgtcgcggggtcgcccccccggggcactacgttcccctcgccccgccccccgccccggtatccttcaccacccacaccaaaaaatttcaaacccagaaattttccaataaaaagtcttaaattttttaagaaaatttcaagaaaaaaaattggaaaaattttgcggttttgttggatgaaaaaaaaatttagaaatcatcataaaacttgaaatctttaaaacaaattttaaattaaaatttctgaattttctttcaaaaaaattttttttagatggcggaaagggattatattttgaagaaaaaaaatccaaatgtttcccaagtggaccttaccggcctcagtggattttttacacagggacgagggaatggggaggtccgttggactcatttgtcagtgtggtcaagccgaaaagcacaataagtaaacagcaggtaaagcagggaatcggtcgttttggcgccgccgttttggcgccagcctcagtttttttattataa

SEQ ID NO: 52035 - DNA, 733 bp, Heterodera glycines
atggccgcgaccaaatgcagcgaagtgctaatgatagggagaaaaaaagtaaatcgactaattatggccggattaattagtgaacttcaaggaaatgatggaagaaatggacaaaaaggtttggtctcgaatggaatcgaacccacgcctccacccacagtcgagggcaacgattaaccactgagctaacaaataagcgggcattcactactttccgcattatacctactcatagcttttttccttacatttatttcaggaaaatgcgagaaaatctcgagtttgagaagagtcgcataacattagatatgtaatttaaaaaaaaaatgcgactcacttgtgaaaatcaattgctttgccctcattcgctgcaattgtgcgcagcattgagtccacggcagcatttagcaacggagtgagctgagaagaaaacgccatctttcaatttatatttgtgcactaattactcccccccccctccctttattatgtgccgctctccaaaaaatccacgccccttttgagtgaaaagaatgtctacggtagccccattagagcaattacgataactgtgtaacggagaaaaaactcaccgccttcacttttgtgtttgagaagacggacacgttgtgcctcaacttcttccaatggtcgccggaagcgatgaacacgtggccagttttggaagaaaagtccttaaattcgacaattttttaaaaatgatcaaaaaata

SEQ ID NO: 52036 - DNA, 1380 bp, Heterodera glycines
ttgggatttggccaaattaaaattaattaatttattgtttctaattttctatttttgctcatttggcccaattaattaattaaacactgacaaaaaaaagtaaccaaaactgctgaaatgtgcttaataaaagtaagcaaacatttaacaaaaatactttgatgttccaaaccttctgactagaataaatttggttaaactgataagattttttaaaatatttttgatgattttgtgtaaataaaatggtcaaagattgatgcccaattgaatttgcttcgtgcggaaaaactgtgttaataaaagtgattagtgaaggtcacaaatcggaaacgcatgtgatcatttgcaaattatttgggtaattaaatggcatttgacttttatcggcccacaaattacggtaattgtgctaaaaggccaaagattccattcaaatgattgattatttgtgctgattaagcgaattttctccgtaaaaaagccctttaaaaggcatgccaaaaatggaaattcattcaaaataatttaattttctctgttttccgaattacaaaatgccttcttttctgccaatgcttttcctcctcctctccgtccaattgctctcctttttgccctgctccttctccgcttcgctttctgttgctcccgcttacaccaccaaagacacgtgcctttccgagtcgagtgccagcgattcgatcagtgcgcagctgaacaaaccgatcagcgggggccaattcactttttacggaatcggcggacaaggcgcgtgcgggttggacattgccacggtatggacgatgatcggacaaaattgtgaattgactgatcaaaaatagacaccgaaaagtgatcagagacaggcatttggggcaacaaatttgacaattattaccgtaattagcaaactttacgtgcctttttgcttaattaatgcaattacatagaaacaattggtgcttataatttatttcttcaaaagtacatcaattttaacattggaaaggtcacaaatttgaattttccgcccaattttagcccacaaaatctgccgctggctccggcacacttttcaactccgacgccgcgtgggttgagtcgtgtttgccggacgcgcgttacttgctcaacgatttggtgtgcattaaccgatgcgtcaaaatcgaatacaaagggaacacgtaaacattgaaatttggggtttaattaattgttcaattgactcaatttggcttaattagtttgactgttccgatcaacaacaaatgttccgagtgcgcgaaagaccacgtggatttgtcggaggaggcgttcaattggttggagccgggcggcggatcggtgggagtggcgaaaagtgaaaaagcaaaaaca

SEQ ID NO: 52037 - DNA, 1071 bp, Heterodera glycines
atgccttcttttctgccaatgcttatcctcctcctctccgtccaattgctctcctttttgccctgctccttctccgcttcgctttctgttgctcccgcttacaccaccaaagacacgtgcctttccgagtcgagtgccagcgattcgatcagtgcgcagctgaacaaaccgatcagcgggggccaattcactttttacggaatcggcggccgaggcgcgtgcgggttggacattgccacggtatggacgacgatcggacaaaattgtgaattgactgatcaaaaatagacaccgaaaagtgatcagagacaggcatttggggcaacaaatttgacaattattaccgtaattagcaaactttacgtgcctttttgcttaattaatgcaattacatagaaacaattggtgcttataatttatttcttcaaaagtacatcaattttaacattggaaaggtcacaaatttgaattttccgcccaattttagcccacaaaatctgccgctggctccggcacacttttcaactccgacgccgcgtgggttgagtcgtgtttgccggacgcgcgttacttgctcaacgatttggtgtgcattaaccgatgcgtcaaaatcgaatacaaagggaacacgtaaacattgaaatttggggtttaattaattgttcaattaactcaatttggcttaattagtttgactgttccgatcaacaacaaatgttccgagtgcgcgaaagaccacgtggatttgtcggaggaggcgttcaattggttggagccgggcggcggatcggtgggagtggcgaaaagtgaaaaagcaaaaacaaaattggcattaattttcatcttaatcattttagatgctacaataacctatgtgaagtgttaaccatggggatatgaatgatctatgaaaatgctcttaagtgatattcttctattttatttcacatttttttgttaaaataattattaaatattattattcaacaattttcttatttttattataattgcttaatttaattatgaatggttagttagtcttttttttagtcttttatttattcgtga

SEQ ID NO: 52038 - DNA, 3782 bp, Heterodera glycines
cagcaacaacagaaccgaattgttatttcaatcacatcacattgttcgtcaatgagcaccagcaacaaattgcgtcgcaaaaacagcagcagcgcaacgccctcctccgcctcactgctgcacatcaatgatgcacggattgcgggactgtacgacttggagcacaccattggcaagggacactttgcggtggtcaaattggcacggcatgtgttcaccggggaaaaggtggccgtgaaagtgatcgacaagacacggctggacccggtctcgcaggcgcacatgatgcaggaagtgggaaaagcaaaacaaaaaggggggagcaaaacaaaacggaattgaacaaagacaaattgtagggaaagtttgaagacaaaattaaccctttttattacttgtaccgaccgattgggcacccggaaacttattttttttaaattaaaattagggcaaattaaaatagaatgaagtccaggcaacggaatggttcaatacaatagttaaatctgcctaatttaatgccatggcaaaacaaattccattttttttctattactatattaacttttaaggtccgatgcatgaaattggtgcagcacccgaacatcgtccgtctgtacgaagtgatcgacactcagacaaaactgtttctaatcctcgagttgggcgactacgacatgtacgaatgggtgatgagaagaccctacgaaaagggcggaggcggcgaagcggaggcgcagctgtactttagccaaattgtcaaggcgattaactactgccacaagttacacgtggtgcacagggatttgaaggttggcaatggacggaatttcagagacaaaaacaattaataaacaaattgccgtacttttccattgcccatcccaaaaaaaagttttaaatgtctattttcctaacatttgttatttcagcctgaaaatgtggtgttttttgaacggcttggcatggtcaaactgacggacttcggcttctccaatttgttcgtccccggcgaacagcttcaaacgtcgtgtggaagccttggttttttaataaaaaaaaatagcaaacataaaataccccatttacagcttattcggcacctgaaattttgctgggcgattcgtacgatgcgccggcagtcggtgaaaacccaattaaaatttggtaattaaatttcattcccccccccttctttagatgtttggtccctcggtgtcattctctacatgttcgtctgtggtcgattgcctttccaagagtccaacgactcggaaacactcaccaggattttggactgcaaattttcgtttcccgaccacgtgtccgtcgattgtcgaaggtattccttcgccggcattttgtgtgattacattgtttcccccgccccattaattaggctaatttcgtcgatgcttttgcgtgatccgtcgcgtagagcaacccttgagcaaattgtgcagaacaaatgggtaagtcggtgaaaatggaatacattttgatgaaggatttgtcattatttccttttcttaggtaaaagccggcgacaagggacacgccgaggcactgccactgataatacgcgaccatttgcccgcgtgtgctcatgcgaccattgtcgagcaaatggtggccgggaaaattggcggagaggaggaaattctttggtaaaaaatgctatagggtcgaatttttattttttccaggggaaatggccaggcttttctgttaccaatttttttcatttccattaagaaactttcgttgacttttttgccattttcagtgccattgaattaaacgaatataatcatttgacggccacttactttctgctcgccgaacgtgttctttcctgctatcgccaggcacaggcgaatcgtctgatggcagccgttgaggaatgccaaatggggtgaataaatgccattaaattttctaattattctttttattattaattatccctttgtcaggtccagcgacctctcctcccaactgtccaacggcggtggcactgctgcaacaacggcgaatcaaaatcggagtcggagcagaagcaactcgtggcgagggccggcaccacggcgggcctactccatactgaaggaggagagcgaggaggagttgtcttcgtacaacttgcgttcctcgtcgcggcaatcgtccaggtcagtgggggggggggggggtgaaaagtgtgcggggttaacgctgcccaccgacggaatactttccgggaatcgaattaaaccaacaatttctaggtttttcaatgtcgtcccgtcgtctgctggcgttgctgtcagtgcaaagcctcgcgacgcttccgcccgttccaatttgttggccaccagccgagcgaatagcaacgacagttttgcgccgggtccatcggccattttggaggacgaagttgaggcggacgaacaacagaagccgacttcctccaccgaccaaagtcaatcccagtcggaagacgacgctctggcatccctccctccctcgacttcttcaacggcacagtccgtcgattttccgcctccatccgccacttcgacaccctttttgcaacggattctcgccccaatttgcgaatttcgcgatcaatcgccggataccgccgtcgattccgttcaaagtgcctttccgttcgatgttccgcttgttgcaaatgaaagtgcaagcggcggaggcattgtccgacggattcgaccccattcagccgtttttggtgcgtccgccccacgaccggtgcctggccgaggcgtggcacttccgtcctccgctggccatcttccgccgcttccatcatcgccagaaaaaatgcggacaacacgcaatggccataaccattcgcggatgcgtaatgcttccagcctggaaatgtttccgatttcaaatggaattggtggcaaagaaaacggctcttcatttctgctgctcgaaccgtgctcggcgaccagtccacccacgccaaatccaaacaacaacggtgttgtccactgctggccgaacatgctgctcgaacggcatccgaacttcaccaatctgtgcaatttgccgatctcttccgccgccaatttgatcaaacgcccctcctcatcgtcccttacaagaaggcgagtagttttttctgctcgggcatttgtttttgattttcattttttattcaggaattcctccccatcagcgccactcacatttcgtgccaccagcagtctccattcgtcatgcgatcggattagtccccatgccattcaagaactactagagttttcccggctgtcgggtcgaatgagacggacggtaattggccaacctgctaattattttgtttccactaacactttccaggccagccccgattcccgactgtccagcagaagtcccagtccgtcctgtctgtccagcggtcgtacttcgccagcaatgtccggcattgtttcccgcctgaaaaccaccaactttttgccgtccaccggtgggatgcgcaaattgagcagcagtccgcatctgctgggtatctgtgaggtgggttttctcctgactcattcattcaatgttaaaattgcttccaggagactgaagaaggcggagatatgcaagacttgctgggccaaggcaacagcgccttctgccccgacacattcatcaccagcagagccaacggcacaagtcggcgtcaagactttcagtgcaatggcaaaagcgcttccgcggtcgtcgttcgcagtgcgcggtccgcctccatgggattgggcaccatcgggcgaatgtcg

SEQ ID NO: 52039 - DNA, 1065 bp, Heterodera glycines
atgttcggccagcagtggacaacaccgttgttgtttggatttggcgtgggtggactggtcgccgagcacggttcgagcagcagaaatgaagagccgttttctttgccaccaattccatttgaaatcggaaacatttccaggctggaagcattacgcatccgcgaatggttatggccattgcgtgttgtccgcattttttctggcgatgatggaagcggcggaagatggccagcggaggacggaagtgccacgcctcggccaggcaccggtcgtggggcggacgcaccaaaaacggctgaatggggtcgaatccgtcggacaatgcctccgccgcttgcactttcatttgcaacaagcggaacatcgaacggaaaggcactttgaacggaatcgacggcggtatccggcgattgatcgcgaaattcgcaaattggggcgagaatccgttgcaaaaagggtgtcgaagtggcggatggaggcggaaaatcgacggactgtgccgttgaagaagtcgagggagggagggatgccagagcgtcgtcttccgactgggattgactttggtcggtggaggaagtcggcttctgttgttcgtccgcctcaacttcgtcctccaaaatggccgatggacccggcgcaaaactgtcgttgctattcgctcggctggtggccaacaaattggaacgggcggaagcgtcgcgaggctttgcactgacagcaacgccagcagacgacgggacgacattgaaaaacctagaaattgttggtttaattcgattcccggaaagtattccgtcggtgggcagcgttaaccccgcacacttttcacccccccccccccccactgacctggacgattgccgcgacgaggaacgcaagttgtacgaagacaactcctcctcgctctcctccttcagtatggagtaggcccgccgtggtgccggccctcgccacgagttgcttctgctccgactccgattttgattcgccgttgttgcagcagtgccaccgccgttggacagttgggaggagaggtcgctggacctgacaaagggataattaata

SEQ ID NO: 52040 - DNA, 582 bp, Heterodera glycines
ctggcgatagcaggaaagaacacgttcggcgagcagaaagtaagtggccgtcaaatgattatattcgtttaattcaatggcactgaaaatggcaaaaaagtcaacgaaagtttcttaatggaaatgaaaaaaattggtaacagaaaagcctggccatttcccctggaaaaaataaaaattcgaccctatagcattttttaccaaagaatttcctcctctccgccaattttcccggccaccatttgctcgacaatggtcgcatgagcacacgcgggcaaatggtcgcgtattatcagtggcagtgcctcggcgtgtcccttgtcgccggcttttacctaagaaaaggaaataatgacaaatccttcatcaaaatgtattccattttcaccgacttacccatttgttctgcacaatttgctcaagggttgctctacgcgacggatcacgcaaaagcatcgacgaaattagcctaattaatggggcgggggaaacaatgtaatcacacaaaatgccggcgaaggaataccttcgacaatcgacggacacgtggtcgggaaacgaaaatttgcagtccaaaatcct

SEQ ID NO: 52041 - DNA, 387 bp, Heterodera glycines
atgcagaccagatacgccagctctgtccgtttccacctcatcggtttcacgtcctctttaactctctcttcaaagtgctttgcaactttccctcacggtacttgttcgctatcggactcgtggccgtatttagtcttagatgaagtttaccacctgatttgggctgcgatcccaaacaacccgactccaagacacgtaaagatgggtaggcaccgccagttggacaggtcttgcaccttctctggagccccggtcaagggaaacttgaacaagcgggccaacccaagctcacggtctatacgctacacctcgcaaccccagaggagctgcgattcagcgctggactcttcccagttcactcgccgttactacgggaatcctcgttag

SEQ ID NO: 52042 - DNA, 1677 bp, Heterodera glycines
cagctgcgacagcgagcgcggcgattgttgcggcgtcgactttggcaccggcagggccaccaaaacaggcgacaagggcacccagcgactgttgcgacggcaccgcgacactggtgactcccgcgccgtcgtcgccgacaccgcagttgtcgtcgcaacaatgccatcgtcccagtcgctgtcgtcgtcggccgcgactgcggctgagacgacaacgagtaacaacgacaacggcaacagcaagaagaagtcgctgcgagaacgcttgcggcacccggacttgcacctcggctcgctgttcaccagcggcaaaagcggcggcggattcggcgcgtttcgacgcgccacactttcaagcggttgcaatgatggtcgtaaagctgcgcggcgacaacaccatcatgccgtcgctgcggctgctaacagtcgccatgcgaccgcgtccacaacggttgccgaggagtcgccaccgccgccgctcgctggtggctgcggcgacgacacgcagtcgctgctttcgtcggtggatctcaacaagtccgaggaacagccctatcatcatcagcaacaagtgccgtcgtcatcgtcgtcgtaccaaccggcgccggtgccgacacgcgggcgactgcagccgagcgtcagcgtcagctgttccaccggcgcgggtgccgtcggtggcagcagctacaattaccatacccatttgggcggcatgggcgcacacgggcgacgcgaaagctttttgtaccgggcgggcggcttcggcatgacggacgacacgtcgccggtgttgcagttgcgcgactatgccactgttagcggttgcggaaacagtggcgctgccggtttacaacgaccggcaagccgtgccagctctgtggccagcagtgaactgacaaccgccgctatgtaagtgccacccgccagttgtggtggtgccaaagagtttatggacaatgccaacaatggcacttgttcttgttgccaaaactttgaaacgctgcgccaagcattttgcgccaaattcaaattataagacgacggcataatctccaaaatggcaccaaccgaagcttggggatttatcccgattagtatacccttatttttggttcttctattccatgattaacgcatattttttgttttcccaattttgtcgagattatgtccatttttagacaaattgtaaatttttttcaaataatttaaatttaatttttcatgcaatttttgtagtgattagagggtttcccaacatattttgttttcgggggattatctgagaaatgagttaaacaattgaaaatgtaaaaaattttgcatatttggcgacatttatcaatttggcaattatgtaatttttttttttacgttttaatcgaaaattaaaaaattctaatatttattggatcaaaacaccaaaaaaaaaaattgtgccaaaattaaaatgcccgatgtttattgtgtggttccttccaggcacggcgacgacttcatcgtcaccccgttcgcgcaactgttggccagcctgcgcaatgtgcgtgccaacctggtggccattgccaatctaccgcaacagtgcacggcactggcgccggacgatggcaccgccatcgcaacgatcaatgtcggcggcgccacttcctcggccaatatgaacaatgtgatacaacg

SEQ ID NO: 52043 - DNA, 1227 bp, Heterodera glycines
atggataagccaaaatgtgatgatcaatgggtgataaagcaaatgttaaacaatctcggcacatcaccaacccaagaggaaattcacatgcgcataatggcacatttgattgaaacgaatgtcccttttttcgactttatgcatcaaagtgcaacaaatttaccacattcgtttttgtctgaatatggtaatttgtttatagggcacgagttttttgaccattttctgccaatgaaaaaatttccgccctcccccttaaaaattcatcttttgaaaattaaaagaaataaacatactaatcaagagtaattttttttattttatttaatgttacattaaaaaataacttaaaaatcattctctgcttttgaagttttgaattaggtcaatttacaattataaaaattgtttttttttgtttattatttaatttttttaaatagacgaaatttttatattattcttttaaaatgccactatttttaccactattgtcattttgattcgttaataaatatatttaattttttttctatttaaacttaatttattcacttttcttttaagcctttccagttaagcatttgctgaattttaggctcaattaatgcaaaggaattaaatattttctataaaaattatttgctgaagcaatcaaaaattgttgggtcatgggaaataaaaatgataatgaagcttttgttcaagcaaagtgctgaagttgaacagaaaatgcatcagacgaaaaaaaacgaagtgcaatggcaattgaaaaacgaattttccaaagggcaaataaatgaattttatgggccacaaatgctgaaaaaagcgcaaaaaatgagcgcacccgaattaatagggcaaattgtggaacatgcgcaaatatttagcaaatataccgcggcggtatgccaaaaggctgcggagccgtacgcgaaaattgccaacgcaaaagccgaattgttcgcaatgcttaaggcaagtgcaggcgaaatgccaaaagacatagagactaatgagcaatcaattaaaaaaaatgacactttgttaggttttatttgtaaattgactcaatgttaaatttacaattttaaaaaactttcattaatctattttttaatgctgatcaaaaaaagtttattacaaaacaatgatcagatcactccttcacggagaaccgaaagccacgaaaagcttacaagggaaaattttcgcaaaaataaa

SEQ ID NO: 52044 - DNA, 944 bp, Heterodera glycines
cccggcaatttgttggtcaattccaattgcattctgaaaatttgcgactttgggctggcccgcatcttcgaccgatgcgatgtgcagaatatgacacatgaagtggtcacccaatactatcggtgtgccaaaaaattttaaaaaaaattcaaatttaaaaatttttcttacccccacagggcacccgaactgctgatgggtgcgcgaaggtgtgttaattaatgaatgaattaattaattacgcaataattgttgggagaaaagaccaatttaatttgtccccaatttttcaggtacaacgaaaaggttgatggtgagttttttttaaaaattttttcggggcttttgaaatattaaaaaaatttaaccgtggattttcattttccatttttatttcttatttttgttcgatttgcccttctccattcttaggtatgcatttgatggactgggaaagtcatgaaatttaaaatcggaaatttaaactgcggcatttttttaagtttttaaaaatgaaattttaaaatattttcagtttggtcagtcggatgcatttttgccgaggtgaattctgaataataaaaaccaaaatatcttataaataagtaacccattacactttaatttagttgctttcccgtcggattctgtttcaaggtattaaaacagataaatattttaatttttgctccaattttccattttttaatttttattttttccattttcagcccaaggcccaattgatcaggtgctttttgtcgtactttttgttctcttctttgtttatttgttcttaaattttcatttttacagcttaacatggtgattgatcttcttggtaattgccctaattaatgttttaaatatattttttaaattttcctcaggcactccgaagccggacgaaatgcgcgagtgttgtgagggggcactgaagcatg

SEQ ID NO: 52045 - DNA, 60 bp, Heterodera glycines
agagcccgtgaacagctgcatcggatgcaagtgccgccgttgctgtacgcctaacagttg

SEQ ID NO: 52046 - DNA, 571 bp, Heterodera glycines
atgagaattttcggaaatgtccagctgtgtgctgtacgtcgtctgcacacctctgttttgcggcgttcgatggctgtgccaatgagtcgttatgagccgaacagtcgccttccttatcaaaagcttgatgctaatttggcagtcattcgaaaaaggtttttttcaacaaccggattacaaattcctgggatatccgaaaaaccaattttaaatcttttctgcattattgaaaatcgagttgctgccaactttcaggttggaccgtccccttacgctggctgagaagatcatttactctcatttggatgacccgcaaaaccaaaaattagaacgcggtgtgtcatatctgaacttgcgccctgaccgtgtggccatgcaggatgccactgctcaaatggccatgcttcagttcatgtcgtctggaattccggcggttcaggtttgaacactcaaaatcagagtcaggcaagaaaggctttctatgttcattttacaggtccctaccacaattcattgtgaccatttgatccaagcgcaagtcggaagtgagaaggacctttaccgagcaaag

SEQ ID NO: 52047 - DNA, 284 bp, Heterodera glycines
atggaagcacccgctgaaattgacgaaatatacaggccacatgaagccagaattcacgaagccttttttaatacgctttccaaaccaattcatagcaaaaacgaaagaaggaaccgagcagaaggaatcttcacaacatcggtcattgccgtgatttaaaatagttgaaaaagatacgttttaaggaaagtcaacaggacagggaaagaatacacgtcacatggcgccattttggtcaaaagaccaagttcttccttgaccgtaatgaacatgatttgtttgag

SEQ ID NO: 52048 - DNA, 164 bp, Heterodera glycines
aaactggcgcccaccgcccattggccccaactccgtgccctggtcatcgtcgtcagcagcgggcacaaaaaggtgggcagcagcgtgggcatgcgcaacacagtgcgcacctccgagctgatggacacgcgcgtgcagcagttggtgccgaagcgagtcgcaca

SEQ ID NO: 52049 - DNA, 243 bp, Heterodera glycines
atgacccggccacacttaagaaatgcgccagggaccttttccgttttggtgccgcacctcattttcaccgacaaaaaaattttatatgtatcggtgtttttttcatttctaattgggtgcgacgccaaaacgagaaagtgtctgcgccaacacctgtatgaattgttgtacggacaattcgtcaatggacaatcagtcagtaatggacaatccgtcaggatatttgattttttagatacatag

SEQ ID NO: 52050 - DNA, 186 bp, Heterodera glycines
atgaactgtccaatgaccgattgtccaatgattgattgtccgtccgggtgccgtagagtctatttatattcgatgttgtctccgtttcatcacaatttggcgagcaattttataaatccatcttcgaagtcccacgtccatcggcaagacgaagtacaaaatggcagcaattaccagcaaaaggaa

SEQ ID NO: 52051 - DNA, 503 bp, Heterodera glycines
  unsure (1)..(503): unsure at all n locations
agagtggcgaggagaaattgtggacggacaccacagttgggtgaggttttacctgcaggagaaggcgggagacatcgaatacacgngatattacgtgaaaccacggcacggcaatttcatcggcaccattcagtacaaatggaagcagtacttgaaaaggatcggcggtttcatgataggcacgtcgccaggtaagcggacgcccctggggcacttttgaaaggcattccttcggtcgaaagagactttggctgaatttagcttccttttggcatttccctttcctttttggcactgtattttctctttttggcacctcccttttttctcgtccagcttttgacttttctctgctcaccgtttgcattttgactgaaccgggcgaccggaagtgcaaattccaactgaaagaaactcctatgttcgtctcctccttcctcgaggattgtgtcatcgacggatccttcagacacaacttttgcattgcgaccgcttatccgggc

SEQ ID NO: 52052 - DNA, 882 bp, Heterodera glycines
caagagtgaaaataatttttaaatttgaaaaaaacagaatgccaagggttaaaataatttttaaatttgaaaaaaacagaatgcaaagggttgacataatttttaaatttgaaaaacaatgccgagtgaaaataattttaaattcgaaaaaacagaacgccaagggtgaaaataatttttaaatttgaaaaaaaaaaaacagaatgcaaagggttgacataatttttaaatttgaaaaaaatgccgagtgaaaataattttaaattcgaaaaaacagaacgccaataatttaaataaattttaaatttgaaaaaacagaaagccataatttaattttgaaaaaaacagaatgccaagaatttaaatattttttaaatgagaaaatggggaaaataaatgcaagaaattggcaagaaataaatagggaaatttggcacaaaaatgtgcaaaatttggcaagaaataaatagggaaatttggcacaaaaatgtgcaaaaatttgacaagaaataaatagggaaatttggcacaaaaatgtgtaaaaattggcaaaagaaagggttaaaaattgtggcaaaataatgcgaaaaattggcaagaaataaatagggaaatttggcacaaaaatgtgtaaaaataggcaaaataaagggttaaaaatttgggcaaaacaaagccaaaaattggccagaaataaattgggaaataaggggcaaaacaatgccaaaaattgcggcaaaatggcacaaaaaacggtaccataataatgccaatctggcacataaataataaatggcgaaaattaatgggtaaatgggtaaacaaatgccaaagaaggaaaaattaaggcataaataaatgataatggattattgattggct

SEQ ID NO: 52053 - DNA, 449 bp, Heterodera glycines
atgaagccaatgcaattcgcctcattttcccccgttgccatcatttttttgctgtttttggtcaccgaactttgggcaggttgcgttttatcaacgcaaaaaccgaaaaaaggtgaaaaacaaatattttgttgattatttttgtaatatttattggcaatgataataattttcaaacaaagttatggccaaaagggcaaaggcacaaggtttccaaaaaaatttggccataactttttgaaacttaacgaaattttttgtaattttacagattagtagaaaaaacctattttttttttattttcttgatatcattcaatagctctaagtattttctacaagcctgtaaaatttcagaaaatttcatttgatggtttttttataacgccctttttgatggcgttttttttataacggctcagcaccatacagacagaatatctgtcgaa

SEQ ID NO: 52054 - DNA, 1125 bp, Heterodera glycines
acgacgagagggtacagaaagcaggcaaaaagagagggagaacagagaaaaagaagtgcaaagagacagaagagagcgagagctccgaagaagaaagtaaagaacaaaagcaaggaggaaaagaaggaaaggggaagaaagagcactcaaaaggagaggaagagacgaaagacgaagagagaagaggagaaaaaaaggaagacgaagagagcaaagagaagagagcagagccaacggccgcggaagagaaagcaagtccaaaagaccaagcgcaatcactttacgaagaagcgaagccggcgagtgccgcagtgccagccgaagccgcgccggctgaaaatgcccccgcgggagacgccgcctatggaatggcaccaaatgcttcacaatcgccaccagagagcgcagcagcgccagctggtggcgccggatacggcgccacaaacgcatcgctgccacctcctccggccgagccgcctaaagaccaggcaaaatcgctttacaaagaagctaagacgaagccggccagtggcacagcgccagccgaagctgcgccggctgaaagtgccccagcgggaggcgcgccggccgaaggtggcgcatcgaatgcgtcacttccgcccccaccaccgcccgatcatccgccgccaaaagatcaagcgcaatcactctatgaagaagcaaataagcctcctgtgagtgcagcagcgccggcagcaggtgccggatatggggcatcgaatgcgtcacttccgcccgttcttccgccgccaccaccgccagccgaaagcgaagcgcagaaaggtgccggatacggcggagggggaaccccagcagaagaaaagaaagagaaaacgccggacgaacaattggcagatgttttgaaggagggcaaaaagaaaggattgatagtcgacaagagggaggaggagggagagaaagaacgggagaggaagaagaaaaagaagaagaaagaggaagagcaaagggaaacggaaagggtagaggaagaagagaaagaaagggaagaaacggaggaaagggggaagaaaaaggaaaagggagaggaaaagaaagaggaaaacagagacaccgaagcacaaacctcatctggagaggcacaaa

SEQ ID NO: 52055 - DNA, 1441 bp, Heterodera glycines
  unsure (1)..(1441): unsure at all n locations
cataccgtttcttgggccgttttatgctgaactacatttggaactcgaactacccggaagacgtgctgaagagcctgttcctgatgtgtcttacgtacgcaatgaagggagcagaagccatgaacatcgtggccaaccacttcatcttccttctgacggcacgccaccttgactacgagattgccgtgcacttcaaaaacatcaagaagatcgacggaacaatggctgagacaattctgacgcgctttgagattgtcgaccagagcaacaaggcgaaggaaaggccctcaatctgcgaagaatcgttcgtcatcgacatcacggcgatcgagagcggaaagcagaggaagaagctggctggcaaagggaggagacccgacttcaacatcccgtacagcatctgcgatgggacaactttcgagctgatgaacaacgacaacttttgtctctttcgggcgtttgaatttctgcgaatgaaacatgtgctgccacaacaacgattctcggaatataagcgcaaccctggatggcagctgaacgatgttacaactctgtgccaagcctgccggattaatctggagcatcccttctattccattgaggaatacggagaaacaatccaggcaaaacacctttttaataataataattaactagtatttttaaggaatattatgccgagcttcacccggacacatttcgtctgttctgttttgggacatctggaaaaatgaagcctttgtggaaagcggacgtgaacaactactaaaaagagctatgcgtgctctttacagaaggagaagatgacggcgccggtcactacgaccctataaaatcaattggaaaagtctttggaacgaggaactactgttttggagtaatattaaaaacaaaggaaaaaatcataataaaaattttttagtgtgaaatgccatacagccaccaaaaccagcacaattctaaatgcaaatggaagtgtcacaactgccagcgtgttggatcggacttcaggggaaattgtattgactccaacgataattttttcgagacctgcctgggatgttcaaaagtaaagcaatgaatccgttgtatttttaaatgaattattttagacattcaaatgccgaaagtgctacgaacaccactgtaaactgtcacaatgtaaaatcaagcgcgggactgaagtgacaaccatcgaaaaatcgatctgcaagagttcgaaaaagtgtgtcgactgcggaataatctaccaaactcgggtaattttagaggataaaaaaactacaatccttttgattttaggtgcacaaagacaagccacacgtgtgcggacagaagttttgcaaagtctgcctcggcttccacgttccacgtgaatgctacatcccgtaccggncaaagaagaagacggaanagcgcatcattttcttcgactttgaat

SEQ ID NO: 52056 - DNA, 505 bp, Heterodera glycines
tttgtttgacggacacagtttattaaagccaaacaaaaaaaaaaaattttttttttgattttttttttagatggacgttttgattgcctattggctgacatcgcatgttttctggtcctaccatcagcagtttgagatgccgacagcccaacgcacacagtccgccctgtccaatatttggtggttttggctgtgctattggtcagtgggggcggggatgtaccagggttgcatcatcgggtctcgagaatggtgccggattttgtgtgcctctagttgtccgaaaaaaatccgtattggattaaattttgattcggctgtaccgaccggtttttcaaaagacttgaactagtgtaaatcgtctttttatgcccgaaattccgtttttcaaaggtttgaaagtgaggtgcccgacacgggtcctatcgtcaacgattggaattggccgttcgcgcagccgcacttcatgcacacactgatggccaagctgaacgcgaagctgcaa

SEQ ID NO: 52057 - DNA, 307 bp, Heterodera glycines
atgccaccttacggctatatgccgcaaaatgtcccacaaatgggatatcagcaagcgccactcgcgccgccacaagtctcggtgccccaaggcaaaaccggtggttacaaaccatcatgtgctggccccgcaccagctccggtgccatgtgttgccgaggtgttgactcagcttgtagccgacttcaccactttcaccactgagttcaacaacaacttatcagcctttagcaccgagttcgcgcagctatccaaatggctccgtgagaatgtgggcgtcgcttaactttcctaaatcttttttaaaa

SEQ ID NO: 52058 - DNA, 433 bp, Heterodera glycines
atgaagtggacatctcatatgcgagctgcattttccaaaactttagtataagccgaaattttaaaatttttcgtcaaattcgttacaacaataaaatatttaatattttcggttttttactaatatctcaattaatcaatttatataatctatcgattattttaatttaaattaaaaattatacagataattttttattaattatttcttaatttagttaatagtatatttaaattcatattttcattttacgcttccgataattaattctttattaattgttgcaacaatccgaaaaatggaaaggacagtgggcagttgtgtgagacacaactccgtgtggaccaaatgtgataaaagacaaattcccgaaaaaggaaatgtttcaccttttggtattgacaaaatttatccttacgattcgaaaggataa

SEQ ID NO: 52059 - DNA, 532 bp, Heterodera glycines
atgttgtacatgacttatgcgggcgcggcaccaacattgctcaaatgtggccaacacgtgtttccggatgccgaaaaggcgaacaaacgatgcgaagcattggctggcatggccaagtaagacgtgagggggggggaggctttgaattttgacgagcaccccaaaaagtcgccggaaaattttttggaaaaaaaaaatttcaaacagaaattttacaatgaaaaaatttttagaaaatttttgaataagaaaactaaaagaaaaaaaattcagcaattttttttcaaacttttatgatgaattaattaccttgattgtaaatagccaaattaaaaaaaaaaaaatatatcattgcagaagcaaccaagcgaattgtaccagtcaaaacgctgaatgggccattcaatttcgctcagtaaatgtggaatttgatatgcattggtaaatgattaaaaaaaatgaatgaattaatatacagtatttattgaattatagcccccccccctgaattagagcccccctctgaaataaa

SEQ ID NO: 52060 - DNA, 788 bp, Heterodera glycines
atgcgcacttgccagcagctgaactctccgtcgacaaaacggtctccgatcaaccgccgcattgggccgtcggtaaatattaatctgagggctcaaactcaaaattgcttaaaaacagtggatgtcggtttaaaccgacccgaaaagtggaaaaaaggattgatctgtgccaatgacttttttcacagaatggcacaactcttgtaagtgaaattatgtaattggaatttccgattgtttgtggattcgtcgactttcgctttgagcaaatgcatgacccaaccgatagaagaacagaacgaataaataaatattttaaatattaatgcaatccttttttcaattcgataaatctgaccatcgcggggaggagagagcaattagctaattgttgcgattttaatgtgaaaattcgcatgaaaatattgtttatgtaaaggcgaatttatttttaaattgtctacgattttttgaaaattcaagctcattttgaaaactctgctgattgttactccaaaaacattaaaatggaagagttttttacattttgtcttaaaaaatttatacgcaacaaaaactaatattttttaatcaacagatttatttaattttgttttttaataaaagttatttccgttaataattttaatagaaattttagccaattttataataaatttttgtgataaaacaaacaattttaatttaggctttgaactaagcggcagggctgcaattgacataagaatttaatcaattaattacttttattaattagtcactataaa

SEQ ID NO: 52061 - DNA, 734 bp, Heterodera glycines
atggcccatttggaaattagtcgaaattcacaaagaccgtgggtcggaaccaaaacttcgtctgtttaccagctatgccgattttaccaatattctgaattttccgttgcccgaccgtccgctgcccgagaaaacacgctttaagcgtcttgtgatcatgtaattaaattaaaagcattgttaactgataaaagcatcccattttcaggtacattgatcattcagtcatcgcatttctccgctcaaataaacaaattttcaatggaacacgattcgcattgagtttgtcagtgcaggcgcccaagaacgctgcccagccgatttgggatgttttggcacgtgaaatttggtcaattattgcgccaaacattcgccgtttgtacgttcccgatgctgaccatttggacaatttgcgcagtcgcacttcgccgacaattctcacggatctcaacattaattccatcctttctggtcatctgttgcccgatgtgctcggtgattttgatgggccaaatgcaactgcttctgctggccaatcgttgtccaaatggttgcacactccgaccaccgacgggaagccgaagcgattgcgttgcgatgatttcaacgggcaaggaaacgccgaatgggtccacaatttcaaggaaggtgctccttcttttctcctattttgtcattcatttgcatctttttcggcaactaaattttcaacaattaatgcgatttgcttttaa

SEQ ID NO: 52062 - DNA, 207 bp, Heterodera glycines
atgccaaatcttaaggacaacacttatttcgtgccccggaatcgctacgtcgtctacgccgagaggatttggctcgactacgacgcctcgcaaatcccgcccgaatggcaccgctggttgcaccacatttgcgacaaaccgccgactgttgagccgccgccggagcgcaagaaatggatgttggaacatgagccgaacaattcgatt

SEQ ID NO: 52063 - DNA, 642 bp, Heterodera glycines
atgaagcgttgcattccgtgtggcggcgacttgagcagctttggaagacgatgccggacgctgaacaaatgcgccaacagctggagcatcatttcgtctcaaattggttatggacaccggcagactcgacgaattgaagctggtgagttgatggaaggggctttaaaatcttatccaactaattaagagggaggaggaacaacggtagcaagcggaggaagacaaaacgaaatgaagaaagtgatcaagaagctgacgtcgatgtcgttgactgatcgaggattaatggtttttattttcattacaagcggtagataaattttttaaaaatttgtaaacaatttttaaatcattttggtcacttttccttttatttattcattaaaatcatcgaaatacatcaatagcatgcactgggaatcgaacctgggacccccccctttggtgaccttctcacagaccacttcgccacacatacaaatcttttttggtacagcagctcagtttccggacgccgtgtacagttatggcaaaaagtatagactcaaaaatttctttttcgaaaaatacgattttctaaaaaaacgaatggaggagaaaaaagttttgtttacaccaaaagaaacgtcatttagtacacta

SEQ ID NO: 52064 - DNA, 385 bp, Heterodera glycines
ttaattgcgttggtctgtctcatcggtgtgctgatgttttttgcgcattctctcagagatgagccgttgcccactggtgctgtaaaaacgccaacagcaccagacgagaacactgttgatgcatattacaaatcgcatgctgtagcagaaagcagcgacatggacaataattttgcataacgtttttctttgctttcgaattttttgatattttattccctattttcaattagctattacattgttctcctgttttacagtataaaaaatgcatattatttgctagggaattgatttttatttgctaaaaacactcaaagcacaaaagtaacgcaatttgcataaaaatgtgtgttaaatattcgggacaaattgcagcacaata

SEQ ID NO: 52065 - DNA, 647 bp, Heterodera glycines
atgccgattactaggcgtgtactgtgcgcagtttgcggaaagaaaattggcggaaattttactacaagacaggcataccaatgtcggggtaagtaatacatgtacatagaagtgagtttttggaaaaacggactgaaacaggatttggttctcattgatcgttcattgagcttttagaaggaaatcctgattggattattgaaaacgggccagcagatcccccccttctcctgtctgagttcaaaaaaatatttttttgtgttatttaatgagtgccgtctcgcacagattgccgaatggcatgccataagagttgtcatctgtcgacaaattgggcctgtaccaacagcagcatttttagcatgaatatgtatgtgagaaaatcgtcactccttttcaacatttaaaaattttcaattttttttacagcgaagaagttgattggcccgaattcttgagacacaatcaagttggacaacatttttaaaatttcaatggagaaaaatttatagctgaaggaattcatctcatccgttggcttatgatgaagaaaatggaaccaaacattacatatacaaaattgttaaattcttgttcaattctttgtccatcctcataagaaattcccattgtcagacttaaataaa

SEQ ID NO: 52066 - DNA, 1420 bp, Heterodera glycines
cttcatttgcggcgattgttggttggatttgttcgattttctgccgccctctcagcttggcctcgaaattgcgctgatcagtcgccgatttgactgcttcgttgaggaacatttcaaaacgcgcaaatggacattggcgaacgaaattaaaattagaggagtaattgggcagaatggtgcaattgaaatgggaattgtcaattccgatggaaaagcattgccaatcccacaaattccgttgccgaacaaagtcatcggatttggaagcatttttatccagtaaaaaaatgaatttttgtaatgatttgtgccaatcacaatttcatttaattttcagcttcatcgaccaaaatgtgctcacttttcttcgccgttttcaccgttttttctccgtttgtgcaacaaaattgtacattctcactgagaatgttcgcatttcggagtttgttatgcgcaacatttggccactgttcaagaacaccattcatgtgatgtgtttgaaccccatcgcttttcgtcaaatgcgtcaattggccccgtcaatgctaaacgattgtccatcacttcgcgttgtttttttcgatggtggcattttgcccgaatttccgcccgacgacagcgccaatgcgtcggatggccaagcggtggccaaatggctgttcacgcctcgtcccgacttaacgaagatactcggcattgagaatttaactgtggaccaattgttgacaacagtggaacaaatcaaagcggtgattatttgattactcaaatttaattcattttttaaaatatttttttgtcttctttttaggctttttcctctgcttcttctcctgtcaatttcagcatttctgttgactttccgtcgtcctctccgattgattctgttgagccatttcaattgaccaacgaattcaccggggagcaattggtactgttacaagaaaatgcatatggttttgtgctcatccgttgtccaattgtgcccgatgataagaaacggcagaagttcaagaaggaattgggcgaccgatggaaccaaatgaaaattgccttcacagaccaattagttgacaacgggtgattaacaattttaacaaatccaatgtttatttttgtttttgtcttcagtcttctcggtggttcctcacctgggccgaatggtcagcagaaacagcaaaaaatgaaatgtatgattatttgaagtgatgttggaacttgccatttaaatgtaatgtagtcgtacataatgtatttgactttgctcacaaattcataaaatgagtttgttttaccaatattttgaaaaaaacgcataggaaacggcccccatcagttaaattggcctttttgactccctaaagaccagaaaattttccaaaaaatgattttttagcaaaattttcatgaaaaatattga

SEQ ID NO: 52067 - DNA, 1017 bp, Heterodera glycines
atggcaattccccagcacaaggacctcctcttcggaggaaaaacggtcatattcagcggtgactttaaacagtcactgccggtcgtgcctcacgaaggcctaactgcacaagttacggcctgctttcaaaccaatccactgtttggtcagtttaccacaatgaaattgaccatcaaccagaggttgggccaagggcagcaagcgtacttgcaaatgtgccgccaaatcggcctcggagagaccggagaacacttctggattcctccgcagttcctcgtaaagagcagggaagagttgatagactttgtctatccaaacttccaacaactccttggcaatgacaaagagctgctcaatcgtttgattctcgctccgcacattgacacgtgtgatgagatcaacgaaatcatgatggcgaatgtgcctggtcaagtgcgcgaatatttgtcctcggataagccgcttgacgagcgtccactggacatcgatgaaatcgagtccgaagtggcagcgttgaaccggcgcacagactctgggatgcctccccaccgtctgcgactcaaagtcggaagcgtcgttgttctccttatcaacaaaagtgataaagaaggactgatcaacggcacgcgcatcgttcttgaagaacttggtgacgatcgcctggtcggtcgagtaatcaacagcaacgctgttggtggccaagttaagttcttcattgaaagaacacgtaatgtgtatgaagacaaaacgcctggcggcttaaaatatgagcgtttgcagttccccataaaacctgcattcgccatgaccattctcaaaggtcaaggccaaacaatcaacacggtcggaattgaccttgaaagggatgtattttcccatggtcaattatacactgccttttcaagggcaacggacggtaacaacgtccgagtgtacgctcccagaagggagaccgatgcacaaggtcaaaccaaagtgttgaacattgtggccaaaaacatgctcaaattgcaataa

SEQ ID NO: 52068 - DNA, 1826 bp, Heterodera glycines
atgttagtgcctgtggatgaagaaccggacattctcgttggaatggcagacttctggaagttttttaacggcgtccaaagagtgtctccgcaactgttcaaagttcaaactttaatcggttccactgtctgcgggcgagatgaaattccgtcccgtccaactgccgatcatccactgtccgtcatgcccgtaaccgtccatgtttctgccaatgaagacgagatgaccaattcggctgtcaagtgaattcagaaaaatgagtccatctctgatctcgactcgctacgacaattctgggatcttcaaaacattggcatcagagatgaccctctcgaaaacgatgacgatacggcacaacaaatcttcgaccagacgactacgcgcctggcaaacggaagatacagcgtgggatggccatggaagaattttccgccggacctgccctcaaattttgccatggcccatcgccgattgtcttcaattctcaaccgtcttcaacattttcccgaactgcttgccaagtacgaagccgcaatacaagaacagcttcgactggggctcatcgaaccagccgttcgtacccgaggactcgagcatttcctgcctcatcattgtgttgtcacacacaaaggaatactcatgcgctttcgcctggctgggattgcgctatggggtgacttgaaaaaggccttcaattcactcagcctgctggaatgcgaccgagaattctgcaaagtgctctgggttaacgacgtccgtaaaccaccgttgccggataacgtggtcatctaccgatggtcaagggtgccattcggtgtcattgcctcgccctttttgctggcagccaccatccagaagcacctgaagcaggacgggtccccattggccattgaaatggctgaaaatgcctacgtcgacaacctgctcatgcaatgcacttcaccctcagaagcgctgaacaagtacatgagcagcaagactctgttccgcgcctgtcaaatgaacattcgcgaattcatctgcaactcagacgaagtcatgtgccgaattccgaaggaagaccaactcgtgaaagaagtgcccaaagtgctcggccttcactgggagttgaggccggacaagctttacatcgactttccgcccatgacaccgaaagtcgctgccttactcgtcgaactgttctccagcagctcgcctctgtttttgaccctctcggactggtgtgcccggcacttcatgttgccaaaatgtttttccaatcactttgggaaaccaagcttgactgggatgattctcttccgactgagaaagtgcaagaatggaacacgattgccacgacttggaaccagcaaaaggtccgtgtcccgcgcagagtcatcccgttggaagtgacctctcatcaactacatgcctttgttgacgcaagcaaagatgcctatggagcgtgcatcttcattcgggcacaacatgaagtcgcaatcacggcccatctcatctttgccaagagccgagtgaaaccaaagggatcaaatctcactattccgcgcatggagctcatgggaatgctgattggcattcggatgcttcaatttgccgaaaaacagctcggacttgccattcgccacaaattcatttggtgtgactccaaaccagtccttggttgggtgtcatcttctgagcagcaacctcgttttgtggagaatcgcctaaaagaaatccgtgctgtcgaccaagttcgctttctctacatatcgacggagcaaaacccagccgatgtcgcctcacgcggatgtactgtgcttgaactcacctcccatccactctga

SEQ ID NO: 52069 - DNA, 1610 bp, Heterodera glycines
atgtttcaaatagctgctaacatcttccgttatgagaggaatagaaccgaaagactttttttgtatctccaaatcgtcaccgggaaatgggcccgtagaaaatgctttagtggaaaaaagtaaattctcggaaaataagtaaatttttcaatttttttacaatatgtgtaagtcaaaaattttagaatattttgaaaacaaagattagctaaattttattattttaatttttgaacctttcaaaaaattgaattgacaaattcagaacgaggtcatatcagagctgggcttttcaacgtgtgcacaatttgtgttccattttctctctcaagtcatttccgatgatttttcagctaaactgtgcattttattggattcctcaacaaaaaaaaataccggagagtaatgagaaaaaaaggaaaattacaaaattttttgtgtggatagagagagcgaaaaggaatcagggctgggcgtgactggatttaaattttttgaatctaatcattagcagggatccagtttttagggttttatctattttttcctcagctccagtggcctgaaacacacgcaaaacaagttttttttggtggttattcagctacttttcgtgtttttagtatctattttctaggttttttagagccaaaaacctaaaaaaaattgaaaaaaaactcttttgatatttttgaaaaattattaacaaaaatgatttatatagttatttcattattgataagaattttaaaaaagctaggtgaggaaaaaataggagcaaaaaacgacaaaaacgcaactattttctaagcgaaaaactcaaattatgatgttaccttaataatactacaaattaacaagaataagtggtttttaatccagaagaaatcatgaaattcgggtagtcctttaaatgaagtagaaaaaatcgttaaaaaaaattatcttgcatgaaatcgtcgaaaaacaatccaaaaacacaattacagattaaaattacgaaaaatcccaaaatccttaacccataatcagtcatgaccgggtccaaaaaggccgaaatttccataatccgtaattacgcccagcattggttcatataggccttttgtaattttcgtttcttttcctacaaatttcgtctgatgaaagcgaaacgaaaattttaaatttaaaacattatattcaaattcattaatggtttttttcaattttcattttggcagtcttcttcgtaaatatttttttattaaatctcagcctatttaactgcaaaaaattctataatttattatatttatgagtcttgcccattacattttagacttgtaccgtctttgtgaattctatgaggtggacgatgaatggacacgaaaactctgggttaaatgaagagcttctcaatttgccttggaaattttccataaatacgataaaacgaactccaatcagtcgaatgtttagatttcattttagttagtagacgacgaaaagtgaaaacattaacttgaacaagggtaggagccgagagagggggaggggggacgatccccgccaacccggggaacagggacagcggagatcggaaaaatccttaacaaaaatgcaataaa

SEQ ID NO: 52070 - DNA, 408 bp, Heterodera glycines
atggccattattcgcgacatgcttctggatgatatcgaactcttccagcgttcctcaatgtaagccaatggagggactgaccgcaggtcccggtcccggcactggtcagtaacggtccaagttttcctgaaagtacagctccggcctattttttaaattttgatagaaaatttttggtattggagaaaaataagaaatttttgtcaatttttgggtttttttaaaactagcaaataaatttgaaaatttaaggttaaaaaccaaatataatttttgaaaaaaagtttagaaggccaataaatatcaatgatgaagatttttaaaatatttaatatttttcaaaatttattaggaaatttaatttctttaaattaactattttcttttcaggtaagctttgttaataaa

SEQ ID NO: 52071 - DNA, 732 bp, Heterodera glycines
atgatgttcaacagagaactaaggacaaaactcgatttggtccagccggttttcaacccaaagaaaagggaagaaaaggaggaaaagcaaaaagttgtggacaactacagagaccgagtcaaaaggaacttcgatcgaagcacttggaaaaggtcattcgacattggcctgaaaatcttcgctaggaatttccgcgacggaacaaagtggatggaaggcgaaattgtgcgccaaatctcaccatcacttttccttgtcagaaccaaaagaggaatttggaaaaggcacttagatcagcttaaatccaacgaaacggacagcgaaagtgccgataccgattcaaattcgtcaatggcagagcaagctgagatggacacggacgttgaaaatcagccggacattgatgcgcaagatgaaccgcaaaatgtgctgacgaatgatcaagaggagctcagacgatcgagcagacagcgtaagccgagaaccatcttcgatccaagtcgatgaaccgattgaattggtggggaggagatgtcatgtctgagaacttatttgatgggactcaaatggacttttttcatatttgccctcttaatccacaactgctctgtctatttaaatgctgtctttccctcttattcccgcagtcttcccagtcattcttcatttattattttgttctccctcatcaactttgacctccgcatatatttgtttatttcttcactgcaa

SEQ ID NO: 52072 - DNA, 1060 bp, Heterodera glycines
atgtatagtggctttgtgtggcagcaacggtactgtgccggtgccgaatgggtgctcaaggtggacgatgacattgcggtccatctccgacggatggtcgaatggacggagaaaaaatttcaaaaaatagccacagaacatccgttgatttatttcggagtcccggctgatagaggcctatctcgggacaagaacagcaaatggtagttgaaaattatataatgtaaaatgccgtttaaaaaatataagtaacatgtcaacagtaacacattcagtgcagaataattatatgtggaagcgaaaagttttaaaaaataaagtgttcccacaaaaaacccaaaaattaaattcaaaaataaatttactatgtcaaaaaattgattatttaaaaacaatttttaaaattttatttccaatcctaaatcacataaaataaaaatgaaataatttatttaaaaattgggcagcgaaacaatgtattttttatttgtttattaaaataatattttgtatgatgtcatgaaaattatgtaaaaaagtaacatttattcttttatggatattttatgttttacgaaatttttccgcttttttcttaatttgtgatattttgggcttcaaatgttgcattaattagatgacatacaattagcagcagagcagaaaaagcttcctaaattattttatggccatgggttcttttttaggtacgtcccttatggaatgtttacgggagaacattttccaccgtttttgtacggtggctgctatttgacaactccaagcaccatcaaagccgtcttggaacaagctcacaaaaccgacagcttttatttggaggacgtgctgtacacgggcattttggccgagttggccaatgtcaccgtatcggaccaattgagccatttttatgggaatggattgcaggtaattaataattagggatgtcaattttatgtaaatacggaaatcctcaaaaaaagccaaaatttcgacaaatttcattttttatatatattttgagaattttcgaaaattttttagaaattttttgtgaaaa

SEQ ID NO: 52073 - DNA, 272 bp, Heterodera glycines
aaagtggaagataaagtggaagcggaacagaaagtggaagaggaacagaaagtggaagataaagtggaagcggaacagaaagtggaagaggaacagaaagtggaagaggaacagaaagtggaagataaagtggaagcggaacagaaagtggaagaggaacagaaagtggaagaggaacagaaagtggaagagcgacaactcgaaaattatttattttagaattatgacatttaacaaaaaatcttataaaaaatcacaatcatataaataaa

SEQ ID NO: 52074 - DNA, 2749 bp, Heterodera glycines
atgcgcatcagtgccatccatgaagcaattcgggacgacgatcagatgacgctgaagcagctggtggacgattgggacacggccacgggacgggaccaacacgggcggacaccgctgcacatcgccgtgggcatgagggagcgggggcgggagagggctttcggacaatccgtcattggacaatcggtcatgggacaatccgtcattggacaatcggtcatgggacaatgcgtcagtagagactatccgtcagcgacaattattaaaatcttgcgattgcgattattcaatttaatttttaaaaaattggatttcaatttaaattaattttgacattatttatataaaagcttaccttataaatacagattgtccactgacgaattgtccgggagccaggggaagcgcgacgagagtctcgactcggtccctacgattcgagaatttttcgggaatttttttatcttggtctcgggttttcggggcaaatttacattgtctcaattcttggtaaaattcatttcctgcacctttctaaggagggggaggcggtgccgttatggggaaaatgccgtggagacggcgcatggactacgaggactctgattttgatgaaatgccctccaaataatccaaaaatcaaaaacatatgaaatattaaatcccataaaataaaaaaaagaaaagaaaaaacaattaaattttaaaattttaattttttcaatttaaaatattctgccggatcctgtaatattgactccgaaaatggttaattttcataattttgttaatgatacgtgctgtgccaatgaataaattggcatgggatgagcgattaaattaacacacaaagaaaatcacttttcaatttcaattaaggtgttgcacggacgggcacgtgcggcgcgttatttgctgctgatgttcccgcgttgtgtcaatttgacggacaaggcaattaaattaattggaaatagccaaattaattaaggatgaaagaatttttatactagaataaaaaaataaattgttattaaattgctaattaataaaattattctaatcaaataaaatttttattgcatatatttcattattctaggataaaattcaactttcttaatatgtattaatccaatcatatttatattcatattaatttagatttaaattttaattttaatttaatactttaaagcaattatctttgactctttaaatatttaattaacttattactcatcttaatgctcccgactttttttttacaatggcattttctgccggttgctatggcaaaatgcaatcattcaaattcatatgaagaattgagctgttcttccattttttctcatctacatatttacacaaaatcaagagccattttaattaattaaattaaattttatttttattaaattttaattattttaggcctcccgttctccgcttcattacgccaggcattcattcattttttcaaattttctttatttttcgtgtccagttgtcttacggacgatcagcaacgtgcgcaaatgacgcgcattttgtgccgtgccggcgctgagtcggcggcgacggcgacaaaacggcacaatgaaaacgccgcaggggtaaaaaaatggctttcctaaaattggggcacactgaaattgcttaattaccacacacacacacacattaataatggattatgaatttctcattccattctctcccatcagagaatcggatcctgcttttctgaggcccttctaacaaattcccgatctcgaaccaatgtcgagcatcttgaaaatccgagatttcaattcatccgattcaatgttcaaaatgtaattcgcttaaagtctcaaaataaattttctggcggttggaatttcaaaatttggtggcttttttcggcaccaaggctggacgaatcaaacgaaaaaaagcctaaactttcgaacccaaaacgccctgcctgattggcactctcgggctcccagttttttcctaatttaaaaatgatatcacttatatatcatataggacgaacatgcaacgaaaaaggtaaaaaaaaattttttcaattaatttaatcccaaaaatgtgtccccccccccccccccattagcactaatggcttttggtcagaggcgttaaatcccccccccccccccaaagtgctaatgcctaaagcattcataaattatcggaaaaggaggcaatttttgaagagagtttattaagaaaatcgagagggaaaaatgaaaataaaaaaaaatcctttttaaatttgtcatacaatttaaatgcagctattaattaaggtttttgaacattcttcagttttacaaattcacaaaattatttaaaaatatcatttcggaaaaaataacaatatttaaattaatattgaatttttatttcctgaattttatgatttgactggagcaattataaaagcaaaaaaaaaattaaaaaattaattttataattaaaaaaaaaataaatttagcgtcacactgaagaagccgatgacatgttggtgttgaacgaacttcatcgacgcgacggactgatcggagaagaagcggaggaggaagaggatgaagacgatggaggaggaggagacgttgatcagtctgcggatgagatcgaatttgggcatgttgcggcacggagattagcggcgaaagcgaaaaacgcggcaatgatcaaagggtgggtgtgggctattcggctgatcgatatttattga

SEQ ID NO: 52075 - DNA, 384 bp, Heterodera glycines
atggaaacagttgaggaagacagtgaaaaagagagggcggaagagaagagactggaggaagagaagccagaggaaaaaggaagtgatggcaatgaagaaacagagagtgaagggaagggaaagaaaaggggagacgaagagagtcaactgacagacgacacagcagagaaagagaaggaacttgtgagtctaaccatagaggaaaagacagttgaaataagcgaaagtgaagttgtaaattgtgatgagagagagggaaaagaaaagagtgtgccaccggttgaaacagaggcagcagggagaagcacacaaagacagagagtgcagggcagcacaacagcagacgaagaagcaacaatagcagcgttttttgatttcaagtaa

SEQ ID NO: 52076 - DNA, 1041 bp, Heterodera glycines
atggtcaaattgaaggtcatcttaaatgaacccgtgtctcaacacgaacaaggtaagagaattgagaaacctggttctaaacaccaccaacgcatattttggaaccaaaaattgtctcaacaattttttatagttctaattctgtccatgataagtgcaacaatttcaaatccaatgctttgtcatcatagggcacagaaaaattatgatgtcagaatagatagagacacaacccaatgcaaactaattgccaatttgtttgacgaaccccaacgggaattggaagttgacatctatcaacccaattcagaaccgttcacgtttaaggcacatcggtgtctaaaggtcaaacaaagtcaaaaattttggaccaatttactaaacgataagttcagtgacccggttagtgtttccaccctcccaacgacaattgaagattgtcaagaaatgatcaattatgaaaagtgtgaattcggacctctcagtggtcagtcaaatgaacaatttcatacaaaccaagaattgcatatagactattcctggtggaaattcggaaaagacaaatccgaggtaaataactgttatcatgcgattataaccttactaggaaaaccgggatccgagagtttgggctcacccacagaggaagtgagcaaatgcaaattttcaaagggttcatgtcgattaggagataatgcgattctaatttggaacctcgattccactgagcatcaaagagcgtgtctttacaataaagtaaccacagaaaatgggaaattcaccaagagaatgtggatatcaaaaaattcacagttcgctctatcattccaagaaaatgctaagagtgtggaatcatgcggtcacacgcttaaattaagcgatcaaggttttgcagtcccctcgtggcaatttaggataattacgggtaagacaacccataggatcaaaagagaacaatggtggccaagggaaaaacctttagaccagaacgagaaagctcaacagcagctgcacaattgacggcaagagctatttaccaaa

SEQ ID NO: 52077 - DNA, 477 bp, Heterodera glycines
ttaagtgactgagatcttgctttgattggcattttgcaaatacccacaaatcagattcaccatttttgaaatattcctttcgtttctttattttggtaaatagctcttgccgtcaattgtgcagctgctgttgagctttctcgttctggtctaaaggtttttcccttggccaccattgttctcttttgatcctatgggttgtcttacccgtaattatcctaaattgccacgaggggactgcaaaaccttgatcgcttaatttaagcgtgtgaccgcatgattccacactcttagcattttcttggaatgatagagcgaactgtgaattttttgatatccacattctcttggtgaatttcccattttctgtggttactttattgtaaagacacgctctttgatgctcagtggaatcgaggttccaaattagaatcgcattatctcctaatcgacatgaaccctttgaaaatttgcatt

SEQ ID NO: 52078 - DNA, 375 bp, Heterodera glycines
atggccgtcggggcattgggcggtggtcgagccgaaggaagagcaaaaggaagtcggaagaaggcagaggaggaggggaagaaggagcaggcgaaggaaaagaaaggaggaggaagaggaagagagggaagaggagtagcgacagaagagaacggaggaggaagaagaagagagagaagaggaaaaggagcagcgacggaagagcacgagggagagagaaaggaggagaggagggacgggaagagggaggagggggagggaaatgcttctgcttctaatggacagactcatttatttctggctgaaagaattaagcagaagcagcagaacaaaactcagaaacggcagcagaagaagcaaaatgaaaaatgctga

SEQ ID NO: 52079 - DNA, 959 bp, Heterodera glycines
atgacgcggatggacgacgggggcgacgcgtatttgagctgcggaagcgaaaaggtagggtaggaattgaactgtaacagtacgcctggctgatctgaaaatatgggtgatcacagaaacaaaacgaaattaaatcatcgaataatcttttggttttctcttttaaatcgatttaatctaatttatttttaaataatttcttaattgtccccttttagtacaccgccggtgtccgcgtggtcgaaggtgcattgtccgtcggtgaccaccaccagcagacagctgaatggtggcaacttttgtgctgccaaagtgactctgttcgcgttcgagcggaggactgtgtggagacgaagttcatcaacgactttcggcgttcctcctcgttcagttcgggcgctcaagtgatccgcagatggcaggcgatgttcgaaaacgggtggcgaaaagcaaaattaattaattaatgaattaatcactcatttgggaatccgctttttctgaagggaccgtcggtggtggcttcaaatttgcccggtggacgtggcgttgcccctcaaaaaacataaaattcgctcggatggggcggaaatgcgcgcgcgcagagaaattccgttggaatggcgacggactcgctttccgaccacgtccattcaggtgaccgttttggcattggcactatgccaccaattcggctcgccatgcattttgttttgatcatttagcatttccatcactacactttcgctgacgaaaatatggcggcggactttcgccgacggcgtgcagaaattgcaaatgcaaaagtgaattcatatgcggtgccaacagttaacgtggaagaaaatggaaaacggcaaattatgacaacaacaattgggaaaaagtcggaaaatacgactacggcacgacggaacagcacatcaacggaacatcaaccacaaaaagttaacggatag

SEQ ID NO: 52080 - DNA, 701 bp, Heterodera glycines
atgacgtttttctgcgctgttgcagagcgaaaagagttccaaaaagttgtgaaagccgatgtgtgggttgaaaataaaattttatttttttttcaatccgatttagaattttgatggattaaacaagaaagttttgactggaatgtttttgggaagagataaatgtccgacggaaaatggtagaaataatctgtaaaatgaaaattaattcaaatgatagaaaattttattctaaaaaaaaaaaattaatttttaaaaggatgatttttttattacattattatcatagggtttataaattgtatgattttgcattttttttcggagcataagctatgaagaaaggggttcaaaaatggggaccggtaaattggacaccaagcggaaaactggacaccgccggaattttggacaccaaaggaaaattggacaccggaaaactggacaccatcctaaaataaacccaggaattgagttgaaaaataaatttgggtagggtaaatggattaataattaaggcacttagaagtagatcaggcattcaacatgcaagatgattgatcaatgtgccaaaaaaatgcaagaaaaagggcaatgattggtcaatgtgctaaaattgcataaaatatgggaatcctatccaaaaaaacttttttctttatggatgttatggttgttttcttttgctgaagttttatgta

SEQ ID NO: 52081 - DNA, 1808 bp, Heterodera glycines
caaacggaggagagaatgtgtcgttgtccgactcggaatgtggcggcggcacggaattcaatggcatggcgggcggaagcagcgacagaatgccaaatggaggcgccaaaatgagccaatcgatgcatcgactgacatcactgtccgattatgacaagcggaagaggaaaaagcatgaactgctcgaggaagtaaggttttcctcgagtcgagactcgagaaaaaagaaacattgaataaactaattatatttctttatttttatttaatttcaatctctgatttctgagaatccatataaccacatctcgagcattattattttaatcgcatataattagtcaacaaattggcacatttagaattctttacaatttttttcaggctatgaaggcccgtactccgtttgcgctgtggaatgggcctacagtggtggcatggctcgagctttgggtcggaatgccaagttggtacaccgaggcgtgcaggtgcatttgacagagtttagagaacaaaagtaatgtaaatgactatttaattttagggccaatgtcaaaaggtaaaactccttttttaattttgacaaatcttattaattaccatttaattatgtccacaacagtggttcgataatgtctgcactttctgaccaagagattcaacgcgaaatcggtgtatcaaatccgctgcatcggtgggtggtcataaaattatctcacgggagcgtaaccgggggggggggggggggggggtgcgcaaggtatgttttccctatgttttcccacatcatccattccctcccccgacaaaaaatgtaacttttttcatatttcagtttaaaattgcgcttggccatccaggaaatggtaattgtattttttttttgtaactattgcctaattcgttccaattttcaaaaaaggttgctttaacctcgccctcgtccccgcaaattctgcgctttggcatggcattcggcgaaatgaaccacgaatgggttggcaacgaatggttgccttcacttggtcttggcaaataccgtaccgagttcatggagtgtctggtgagggtcgcgtttgtatgggactcagaagcccaaatcggacccggtcatgtaaaattagggtactcaaatcccccggggacgacatctttttcaatcgtttttttgttgttgttttttactatcaatttttccgtttcaaggttgatgcgcgaatgttggaacatttgagcaaaagagatctcagcaaaatgaaaatgatcgacagttttcaccggtgggaaaagaatttgaatgaaaaagtcaaaaaatattatcctcggcttttcattattttgattggcttattttgatggttctttcaaggacaagcttacactacggcattgtgtgcctgaagaaattgaattatgatcggaagcaattggaagaacggcgaaacgcatcggaaaacgtcaacagaggtgaaaaagagggaattcaatgaaatgcaattaataattggcgatttgcaattagatctaatggtctggtcaaatgagcgggtcattaaatggctggaagagattggccttggcgcatttgttgtaaatgccgtcgactcgggcgtccatggcgcactaatggtagcaaagggaaaattatccggatttcatgaaactttaaggccctcgacggaacatttgatgtgcccgcaatggcacacattttacaaattccggacagtgacagcgcacgacggacattggaggaggagttccagaaactggtggccaattgccggggcagaggcgagccgcgagat

SEQ ID NO: 52082 - DNA, 908 bp, Heterodera glycines
atggaacccgccttgaaaaggactttcaaaaaaggcatcgattacccaacgcacttcgactggcgcgagaggggcgtcgttacgccggtgaaagcgcaaggtaaaaaaggagcagaaagaaattgggatgaacagctgccaattcgcaaaaaatatgccccgaaggtttgtgcggctcgtgctgggcatttgcgtcggtggcaaccacagaatcggcctacgcaattgcgcacggggagttgcgcagtttgtctgagcaggagttgctcgactgcaacttggcgaacaacgcatgcaaagggggcaacgtggacaaagcgttcaggtcgggttggacaaacaatactctttggaaaagcaaaaaagcacaggttcatccacgacatcggattggaaacggaggatgaatatccgtacttggcacaccgacagaatgtgtgcatgatgcacgaggggaaccgaaacttgaccaaaattgatgtggccgtgttcatcaaccccgacgagcagtcgatgatcgactggcttattaatttcggaccgataaacgtgggtctgtgtgaattagcaatgtcagttcaaaaagcaattccaattatccccttcaggaatttcggttcctcccgacatgaaaccgtacaaatcgggcatttaccatccgtccgatttcgactgccaatttaaagttcgtcactctgatgaaacttttagttttattttcatatttattaggtggttggcctccattcgatgcttgtagtgggctatggagaaaatatttatggagacaaatattggatagtaaagaacagctggggacaaaaatgggggcaggagcacggatatctgaactttgccagaggggtcaatgcgtgcggaattgaggacgaaccaatcggactgatggc

SEQ ID NO: 52083 - DNA, 177 bp, Heterodera glycines
atgagtcctttaagaacttatgtcgttcggccaaatggggcagatccattgtttgtgccaacttcatggaatcatcacgattcaatcattgcaaatttggcacgtactaacaatgcacaagaagcctttcatttggctttgagaaggcaatttgctaaagaacatccccctatcacg

SEQ ID NO: 52084 - DNA, 344 bp, Heterodera glycines
atggatttgattgagccgcttttcccaattcttttcactctcgaaaagaatgaatttttgctagaatccaaagacttcaattattcacattttttttcaatgattgaagacataaccggacggagccatgttaaggaaatttgcttttacagtaagaaattttggaataattaaatttaaataagtaatttagctaaagatggtggggatagaaaaattggacgatcacgaaaagcaatggctatagtgcttatgtatggtttgatgaatggaaaaagtcttgagttatttttatgttcataagttgtatttgtagaagctgttgttgggccttcagcaagcca

SEQ ID NO: 52085 - DNA, 658 bp, Heterodera glycines
atggtaggaataattttaattttataaaacaatttggaaattaatcaaaacatcaaatctctctataaaaggggaactcagcaggaagcagaggtcattattttatatgttaataaattaaacaataaattaaaaattatacattttatttatttgattaaaggttcacaattctcggcggtacgacaattgcggaccggcaattgcggaccggacaattgcggacgacaattgcggacgacaattgcggacgacaattgcggaccgtacaattgcggacgacaattgcggacgacaattgcggacgacaattgcggaccgtacaattgcggacgacaattgcggacgacaattgcggaccgtacttttgcggacgacaattgcggacgacaattgcggacgacaattgcggaccgtacaattgcggacgacaattgcggacgacaattgcggacgacaattgcggaccgtacaattgcggacgacaattgcggacgacaattgcggaccgtacttttgcggaccatacttttgccaaaaaattaactggaagggtgggcctcgtcagtacgatcccttccgtattacaaatttgaaatcctaagtgtgtttcggcccttccgtagacacaccaaataagaaagctcacagcaataaa

SEQ ID NO: 52086 - DNA, 1785 bp, Heterodera glycines
  unsure (1)..(1785): unsure at all n locations
gctgcacgtggcacgggtgcaaaaggtgttaccccaacgacannncatgctgctccncagtgggaagactgcgggaccaatgcgcgaacgggatgccaagcggatggaatttctgagggggaaggtcaaccggatggacgtctactgggaatgcgaaatccatcggatgctggagaggagcaaagaaatgcgcaaagcttttgaggactacgtcgatgatgggccgctggtgatccgcgacgcgtttatgggagggcgaaccggaccactgaagctgctgcgcaaggctggaccgggagagaaaatctcctattatgacttcacatcgctctacccgtacataaattgagcacagttaaatttgtaacaacttttaacattttttccttcacagttttaccacctgctaccccattggcactcccaaagtgcatgtgttgaaccaggaagcggagtggcgcagtgcagcggacaacccctaccctttggcattgctcaaagtgtgggttgagcctccccgacgcgtcgacgtccccgttctacctgtgaaagttggagagcggctttgcttccccctgtgcatcacttgcgccaaagagcacccgacaggaggagtggacaacgactaccactgcgagcattccgacagacagcgggggtgggtgagcacgtgcacctccattgagctcaacgaggcgttggacgagggctacctcgtcacaaaggtcttccgtgtcctcgagtatgagcaaagtgacgacaagctcttccgcccgtacatcgctgagtttatggccaaaagatccaggccagtgggtttgacaacagtatcagaggcgatgcggagaaggaacaacagtttgtgcgggagtgcgcagagcagttcgacatcaccatcgacccaaccaaaatggcggtcaacaaagggaagcggtccctggccaagctctgcttgaacaacttatgtgagtactgtcgtccattattattatatttaaaaaaaaatagggggacgattttcgcttcgcaactttggactcgctcaaacactcatcactgacgacccagcaactttggcggagtacctggacaacaaatccatcgaagtgacatcaatcgacgagttggacgagcagcacatactcatcacctatctgcagaagaaggactgggtggatgagcactcatgctcaaacattggtgagacacacacactcacaataaattgttaaagtacttcagtcatttcactatggaccacctcagcagcgcgcctcgttctgctcaaggcaatgcagaaggtggtcagatcaccgggctcggatctgttgtacactggtaagtcaaactacaaaaaattttttgtgcacaaacatttattttagacactgacagcctcatcctcgtccacccggaggagcggtgcccactgaaaactggcccccatttgggccagttcaccgacgaataccccgaccacgacattgtggaattttgcagtggcggggcaaaacaagtgaattttcggctcattttgcggtaattaatgaacattaacactctagtacggcctgtgtctgcgacgaaagggcgcggaggcgggagcccaattggaacatgtactaaaagtgcgcgggctgacgctaaattatgatgtgatcaacaaccaggggatgcgctatgagaacttcaaagaggaggtggtccggtacgcgacaagtggtgaatacgagccgataatcatcacataccccaacttccttcgtccaaacatcagggagggag

SEQ ID NO: 52087 - DNA, 407 bp, Heterodera glycines
atggttctggtctttcgcgagctattccgtattgggttcaacccggagatgcttcgacgggtactcaattaagaatttttttgtctaaaaatattttaaaaatctcagggcaacaaaatgtatgagatgaaggtacgcaagcagaagaggcgcaacccaaacatcgtcttccgtgactctttcaatttgatgccgtgcgcgctggcggcgctcatcccctcctacggtctggacgtcgaggacaagcccttcttcccccatttggccaaccgacccgagaactacggccgtgagattcacccgacgcccgaagactacttggctagtggaatgatgcccagcaaaaggcagaaatttgatgtgtggtacgccgagcatcgccacgagcctttcaaattggatgaggc

SEQ ID NO: 52088 - DNA, 1022 bp, Heterodera glycines
cggaggtatttgagatgacaaattcaacagcatcggccacaatcgaaaaattgcgttatttatttacgcgccatggcatcccagaaacaattgtttctgacactggcacgcaattttccagttcggaatttgccaaattcgttgcggccaacggcatcacacacttattttcggccccatataatccaatgtcaaatggacaagtggagagaattgtcgacacatttaagagagcattcagaaaattaaaaggggaagggaagccaaacaaggagatcatcgacacttttctgatcacctaccggacgaccccaaacgattcacttccggacttgaagtgccccgctgaactgctgctcggtcgaaggccaaggacaacaattgatctgcttcggccaccaccacactaaccatttgaaattgatttggagatggaaaggcaattcaacaagaaatttggcaccaaaaatcgaagatttattttgaatgagaaagtcttcgctcgccatcgctcctcgcaacattggaagacaggagtgatcagcggcacatctggagtgatttttgaagtcaaatttcccgacggatcattcggccgttttcacgccaatcaattgcgcaacagaaaaacagccgacaattttgatcagtccttggccatattaaatgaggcatttaagttgccattgcctccggccctgcccaatcaaccacccgacgcagaaaatgccaatttagggcccaatcaattggaaaacgaggtggcagaacccattcaggacaatttggctgctccaattgaggacgtcccaattcaacgacgctatcctcaacgccaacgtcgtaaaccgaaccgcttttcacccgggccatgaactgatcagcctaaaaggggaggtgttcgggcaggcacattttgcccccgatttatttatttcccttcttcatttgcatcactgtttttgcagtgtctgctctcttcgtgctagagacagacacacgcatgcctattgattgacctt

SEQ ID NO: 52089 - DNA, 953 bp, Heterodera glycines
atggcactgatttcgccccgttttgatgcgctggtggacaaacattttgatggcaaaacggaattgacactttggaaatggatactaattcacaagggcaaaggaccaaaatcagaactgtctgtatggatggatggcaaatttgtggattttccgttgccggaccgtccgctgcccatcaaaattcgctttaagaagcttcagataaagcaattttatacttttgtatatattaaagcattttttatatttcttcagttacattgaccattccgtcattgaatttctctattccaacaagcaaatttgggacagaattagcaccaatttggaattgtcaaaatattgtcaccagtcaatttgggatgtttttgaccatcaaatttggccaatttttgctaccaacattcgccattttggcttttgtggcgctgatttggacaaattgcgtcgccgcatttcatcaacaattctcgctgatcttgttcaattgaattcgatcgattctggttatctgttccccgatggaattgctgacgatgggccaaatgcaactgctggccaagcgttggccaaatggttgcacactccaacaaaaaatggccaaccgaagcgattgtatcgcaatggttatgtgggtccactgaaactggaatgggtcaacaacttcaaagaggtgtgccgccatatttttgttaaattgtttttgttttaccaattttgtttagacatttcgccgtgccaccacttctgtcagttacaatattcaactttatttttttatggaaccaacgtcaattgaacaatttgaattggtgaacgaaatgacgaatgagaagctgacattgaaatatagcgaagaatacaatgatggatcattgtataattggctgttaaaacggtgcccaattggggagacggagacggcgccagttaagtggaaagaccgctaa

SEQ ID NO: 52090 - DNA, 72 bp, Heterodera glycines
atggacgactgccaaacatcagcgactgctcacgtgggcaaatgggacggggaagaaagcggtggcctgagg

SEQ ID NO: 52091 - DNA, 983 bp, Heterodera glycines
ataaatcaatgaagagcgacagatcatcatcgcagcaggagcaaatgcgaaagcgtatgcgtcaaaggaagcagcagtacaacaatgaaaatcaaattggtaaattaaaattgttaaaaacaattgttgaatttctttttaaattttctttgtgcttcttaagacgagaacataacgccccgaaagatgggacctttatgctccgatttcccttcgccttcaaccgcaccaccgcttaaacgacacattgtgcttcataattgtggtcggaaggtgcaaagtgctggtcgaacgacgagacatggggatggagaagctgctggcaacgaaccgagctcgtggctaaatcggaaattctacattgtggtgaacagtaagtgtagcgaatttttcattactctacttggaatttaaaaaatcaaaaaaaggcccatcagaatgaggttttatgcctaataaatttagacgggaaacccatcgaagtgtactgcactgatctgatccaccgggtgaagcagtgcccgcagcgacagaggctgggcgtggaggatgggcaacgatttctgcgagttgtggacaggtggcgggaggagtggaatcacggcgtgcagatgccgttaggcaccggcactgacacctttttggccgagcccaccaatctgtttcccggattggccaggacgaaaaactttcaactgtacaacacatgcattcctttttaagatttaatatgatgtttattcagtccatcgaaattggtcgccatggacacatccgtaaacaaccggtacatcgacgaaaaacactttcactttgccgcgaaaccgcccaccctctattacaacttggacgaggaggatattttatggctgaagaagcgaccaaccgcagttggtgctgacaaatgtaaagggaggacttcctccattgctccgcggacattcgttgatgcgatgaactgtttcgaactgctcacttacaag

SEQ ID NO: 52092 - DNA, 1047 bp, Heterodera glycines
atgcaaggattttcggatcccgctgatgcagaacaagatcccgcgggattaatcccgcaaatcccacattttccaaaaaatgcgttattgcggactaggatcctgaaaaatccggcgcggggatccgtcccgggcctggctctaccaagcaccgaccgcttttcgacggtcactgtccgtgccattgttgaggtcgcctccatgtgccatcgccgcagctgccgctaccgtcgatgttttgccaccgcttccgtttccgcttcccgcaacattgttgctgtcgttatagttgttcttggtgttgttattgttgttgctcttccgctggtgcggttgcggcggaggataacgctcccgaccgcttccgtctccgcttgctccaccgcttccgcttccgctgctgttgtcgcgcctccaaatgcgctgcgcaatccgcgtgtgcaggcccgtgttttgttgtgttgctgaattaccgcgctaataagtgtaaaaagagttgtatggcaaatttggctggtgccaaaattggcggctaaatttatgcggggaaaatttaattaaaatattttatgagtttttgaataatttttttttatattttgcaattaaaattggattgattataaaatggggaaaatgtttgtaaaagttcgctaaaaccgtgactttttcatggttcataagttgtaatcccccaattttatggtcgtcagggagacatcatcggcaaaatttttggaaaaataaattgaaattttttttttgccaattaaccaaccaattaatgatttcttaattatgtttaaaaaaattcactctttttaactaagtgcaacaatgttttaattaattatatatattattttttattcaaataaatttacaaaatttatatgtgcgtgcattaattcttctgcacatatgaattagcctgatgagggaatgttggagaaataattaatttttgtcatttgtcattgccaaaaattataaattattaatttgcagacaatattttatttttattacttttaatattgtaataaa

SEQ ID NO: 52093 - DNA, 442 bp, Heterodera glycines
aaagatctataaaaaatttaaaaatgagaattcatcgcgagattttctggaaataagcttaatagggcctagttaagctgtaaaaaaaatttggggcgatttgaaagagaatagaaagaaccaggttcgatgaagttttggtaagccaaaaaaaaatccaaacatttaaaaatctataaaaaatttaaaaatgagaattcatgcgagattttctggaaataagcttaatagggcctagttaagctgtaaaaaaaatttggggcgatttgaatgagaatagaaagagccaggttcgatgaagttttggtaagccaaaaaaaaatccaaacatttaaaaatttataaaaaatttaaaaatgagaattcatgcgagattttctggaaataagcttaatatggcctagttaagctgtaaaaaaaatttggggcgatttgaatgaga

SEQ ID NO: 52094 - DNA, 601 bp, Heterodera glycines
atggaaattcaaaataacatcgacgtttccgggcttgtcgctctcatcaaatttcacgatttaaacactgtggtaattggcgcatttaaaatttaatttgaaagcaaaagcattttgggctggcgcaattgcctcgctgatctgcgcgacaacagttgctgtgttctttagctcatctcatttcttaaaactaaacaaagtgcaatttctgtccgtgtgttaattattaaattaatttattatttttaattgctacgacaacattcagttgcttgcccttctgtccgttgccgacttgtgcagttgcctgggcattttggctttgggactgatgcgcaaagcgctctatgaacgaattgtggagacgagccaagtgccattggaagtgaagggccatcattatcttttaaaataatccatgtctcgaatttgaaattccgggattggtaaacaaattaaaattacaagggaaagaaaatagcttttttttattttggcattttttccagaaaaacgattgtttggcttttaaatcccgacaacgaacagtcccataaatccataaatattttcaaaatattactcatcaattattcacata

SEQ ID NO: 52095 - DNA, 626 bp, Heterodera glycines
atgctgctcatttcgctgttctccacgctgaccgtaaccgtgcccaatgtgcttttcctcagcaacattttgttctgcaaatggatgcattccgacctgaccgacccgtccaattggatgatcacggcaaaatgtgccgcaaatttctttgtgtttctgctgtttaaagaggtgagaaaatgtgtaaaatttttcaataaataaattcgttctgtaccgtaaaccccggtcattcattcccctgggtgtacggtaaccaatgtgtggtagtcattcatgccttttgtaggaattccgtgtccgaatctacgaaattcttggctgtataagccgagacccgagcaatgaaagacagtacgaagtgtcggcattgggcatagccatgacgagcagacggaggaaaatatcagtggcagtggtggagcagcagaggaacgaccagcaacaggtcacaattggaggcacaaatcaaatacatttggaaaccaaatgaatttgtggctaaaattttaatttccgcccttccaccgccggtgggcgactttctttctttttttttgcttggcacggcacagggaaattttttgatgtacttttgttaaatttagccatttttactttttcca

SEQ ID NO: 52096 - DNA, 1497 bp, Heterodera glycines
atgaccacgagggaattcgcaaaacggcaaaagttcgcaatggaggagaataaaaggaaaattagaggatttggcaaggccatcgacacggcaatttttggtgggtcagtcggctaaaatcaatggccttgctaattggtgtttttgtgctccaagtttgaacataagaagaaacattagagaacgaaattttaaaaaatgcggggacgggggttaacgatgggccggggacggggcaccgtttcaaaaattcccgtccccaatatttccctcaaaaatacggggggtggaagcccagcgggggtcacgtcctcagtccggactctcgagattacacatgattattttagcaaattgtgccgaaatttttatgcaggaaaactttgtaatggcattaaatttagaaactgccgacaacgaaagtgatgacaacaaggcatatttatgtgcaattataggggaattaacggtaaaaagtctaaaattaatatgaaattaattaattgtttttagggactctaatcgacgacttttgtaaaaccaataaaagtgcacaagatgaacttttacaccgaattctacaagaaattggagttgctgctcaaagaccatttcgatgattagggtcgcataatgtgatgacaaaacgcagtgtttgagtgaaaaaatcagtcgggcgcttcccgccgaattcctcttggagtgcatttgctctccaatggtaccggcaatgcaactcccacaaacaaatgtcccgattcccgtcaacaaaaatggaccagaacagaagaaggcaaacgaacactttcccaaaacgcagaactccgttgaagaagaaatcctcctcgacaagttaaacagccaattgcaatccttcaaaaaacaattccccagctattcaagaaatagtcctgcccagacctccaacaacttcctcaaatactccaaacattcttactaaaattctccccaaaattttctcctcccataaaaaacaaaatttccctttgaccgcttcttcaactcaaattcaactatcttctatacaactacccattcgatctcatttcctatttcaaaatgtcaattgacttcagcactattacttattcgtagcgcgacatttgcgccgcccaaaaaaattttttttttaattggcaacaatttattaacgctaatatttgataaaaccctaatagaagttagcaaatgactaatcacaaagataaacgtcctgaaaaatgaagaagagtatcaacaaaacagactgcgaccattcgaaattgacgtgacacgcgggcttgatgatcgtccacgtccaaaaaaatatgttgaaaacgatgaagcaataagaagactagttgttgcctacgatgccaaagaagataaaaatgacgaggatttgatcagccacattcatgcccttcaataccgaatcggaatgaagggattcgaagaatggaattagtgttaactattagcaataggattaataaa

SEQ ID NO: 52097 - DNA, 262 bp, Heterodera glycines
aaaccggtttttgtaccggtttaaaactcgaaaagttgagtgaaaaggggggctcctgaccttttaaaacgcccaaattcggacaaatttggtatcattcgaaagcttttgatgagctaagtctaaaaaacaaggtataaactcgaaccaatgccatctaagcactgggacaactgagtcccagagaaaatggacacttcagtaccaaaataaataaccatttaaaagcaaaaatttcgcaaaagggagcatgcgaagacgg

SEQ ID NO: 52098 - DNA, 1423 bp, Heterodera glycines
atgagtaagcgaactgttgatcaacaacgccagcaacagaacatgcagaaaaagcacaacgaattggaggtgattcccaattaaaagggtcacctaaaatgaaagtcatatttataatctaatttaaaaataatttaatgacacattgtccgacttttattcctcttttttacttaaaaagtttccgcttttttacagcagtttcgttcaaagttagatcagattgaaaacgaattgatggaagtgagtgatcagctgaaggatcaattggcgcgaaatgatcaatttcgaaaagggaaagggtaaagcaaaaagaaaaagcaaaaccacaattttatttaaagcaatttatataaataaatatccaattggtgtcaataaatgcgaacaggaaaaaagaaaatcttgcaatttatgtaaaaaaacaataaataaatttgtgaattttgaacaaattttcccattttaactcattttttattttattttcatttttcccttacagggaaattgaaaaaatgccaattgaaagggaaggcgaaaatagactaattaaggtgaataaattttaaaaaagtgaatataatatttaaaacaaaaaaaatttaggagagaatttttgtaaatgccgccaaaatggagcaaaatcatgcgcaattacggcagaaccaaaaagaagtcaattacgaatttgctgagattatcaaatttttcgacatttggctaagggagagccaaacgcatttcggtgccgtaaaaataaattaaatctttaatttaatttggattttttaagcttcttccccatttactccgacaacggaaaatcattcccttcggcggcaacaaaatttaaaagtgagaaaaaactaagccaaatgaccaatcctttttttattgttcagttcgaattctccctttttttccttttaggcgtccatttgggccatcgatttgttcgaacttcgtcagtttcgcaacggcaattctttggcccaatgcatggaatgcgggaaaaagttagtgccgttaactcatttgtatttgggatttcaatgcatttttaagctgaattaaaaagtggatcaaaatttggtgccttataaatttgatggacaattcgttttccatgagaatggccaattccatttattaattaatttattttttaaggtttatgaccacggaagaggcggcgatgggttggcacattgtgcagggacacccgcaatacgcagcccaattgctgcagaaacagctcgaaagggacgcgcagcaaaggcaggggacaaacggcacggaaacgacggcacagaaaaggaaacgaaaagcgacggaagagcaggaaaagccgacgaaactgttcagagatctgtgggaaagcagcaaagacgaggaagaaacggagcaaatgaattcataa

SEQ ID NO: 52099 - DNA, 54 bp, Heterodera glycines
aattcgattgtgattgatttcaagttttttgtgaaagaattgttaccgattgtt

SEQ ID NO: 52100 - DNA, 328 bp, Heterodera glycines
atgatcataagaattgcagcaattctgccgattatttttgtttatggcatggaacgtaagagaacatcaaaaaattgattaataggttattaaaaattttcaaaaaataattaaggtaatttagggtacccggacacaacaaataaaagagacaatttagcaatgaagaaaaagcagcaggggaatttgagctatttatattcaattggagaagacgaaaaagtgttaattgattattaattaattaactatttaattttaaaattaatcttttaaatgaatccgcagaaaactttggacgaagaaatgtatgaagctgatttgaaca

SEQ ID NO: 52101 - DNA, 123 bp, Heterodera glycines
atgacgcttaaacaatttgtaccaacagaacaccgaacggttggtgtaacaatttgcgcttcccccactacggcagttcgttcagtccgctcagacatttgttgccgcccgtttatgacgacg

SEQ ID NO: 52102 - DNA, 1243 bp, Heterodera glycines
  unsure (1)..(1243): unsure at all n locations
atgtcatcccaattccatcacttcttcttcatcactttactttatctgctgatctcactgttgtgccaaccatattcaggtgggaatggcatcggatcggttgcgataaatatttaaaattttcgctctttcctctcataaaaacccttggtgccaccggcgcagatggtgccattcgaaatattaggcatttcatttctctaaaaattttttcaagtccatgccgagcctccgcttcgtgtcaccgacggcgccgatgtgccggcacagtcgcctattgcttcccctccgggcgctgaggacggcggcgcccaaccatcacttagcaacagcaacaataacgacaatgatgtactgcttgaaccgtatgggccctcggcattcccggccggtgatcagcaacagcaacaacagcagcagccgaacggcccgaagaagaagaagcagaagcagttcccacaactgatcggatgggttgatcggcccggcgaacgcatcggcgagcaatgcgatccgaggatgaagccggcatgcaccgtgccaaactcggagtgtgtgggcggcgtgtgcgagtgcttggccatgtgagtttttgatggtggtggatgtactgtttgctgtctgtacaaggccataaagtcgacacgaaattacgattacaaaacttaatttatctcattcaaattttatgctaattttcccccgttgttaggtattaccccgacacaccctaccgatgcgcaccaattgacacaggtgaaaactgacgactaattaattaagcaataaaattttattttcttaattttcacaaaacccgaatcttttaagcctatgttttctttttctcatcaatttttttgttggcatttttaaaaaatttttaattgtctttcttgatttaaaggattttttggcatgtttaaaattttactttcacagatttaaaattttaaatttttgtggcattttttanattttatctttccagattcaaaaaagttttttcgtaatttttcctanattttcttgcaaaattagattttttgcaaaaattacagagggttcgctcggccgactgtgccgtcgtggcgtggactgtcggggcaacggcgagttctgccacacggnccagcgcaagtgcgactgttgtgcgaactttgcggctgtagactggcgatgcttgccggggcatgcgccaggcggaatgtaagtgccaaaatttaaatttaaaaaaaaaaaa

SEQ ID NO: 52103 - DNA, 524 bp, Heterodera glycines
atgggtctgaacaacaaatacagcaaatggttcgaattagaagtagtttatgattgtattaaaaaacatttaatgaggtaggaaaaattaataacaaaaattaatagtgaggtaattaggggagtgattaaacaaagtcaaacgcattggacagaaactgcgtttttttaaagatggaaaatgataaaatgtaattggacgacaatttattcttaattaattgcataattaatagagccaaggaaaaaagcggggtaatgagtttttcgataattttttaaaaattacatgggatctggaaactaacccaaaaattaatttggtgttattttccgagtcgacttaagattttgtcaaaattccatgcttaaatgaatctaagaatttccagaaaatacattaaaatttcgtcgtttataattgttaaaatcccaaaaaatttttaattagccttaatcatgtccagaaggtgagcttccgaatcctaattgttattttttcaaaattccaggctctattaatta

SEQ ID NO: 52104 - DNA, 886 bp, Heterodera glycines
aaaaccatttgtaatgaatgcgaataattcaggaactgttggacatgattctgcttgcttttggcatgactggggaaatgatttattccgtggccggcttactcggcctcaccggaagtgcccggacggaggagcgaaattgggagcagatgacgctgattcttcttactgtaagcgattcttttgttgagcatactgtatctaattgtaattgtatccatctgtaataattgtgccaaaaatgttttttaggttcatgtcacgcgaattttacaagtaaatttgaaactcaagtttaaatataatttaatggatctaaaggttgggctccaaagctgccttatttatattgcggtaattttgcattttctgatcagtgacaaaagcattcaaaaaattatttttttagggaaaacttcgcattgggaatgaccctattttgagggaacggcagccgggtaaaaataaaataaattaaaattaagtttaattaaaataaataaataaaataggaaaacaggcgatcacttttcttctgttggccaacatttcaatgtttctgatgaatttgctggaggcggaaaaggcgggcgttagcgatacggtggtcaatttttatgggaagagaaattggtaagacggttagtcggtaattgatcgattaaaaacattttcagggtgtttttggtacggtcattctccccactgaccattttctaccgtttccacagctcagtttgtatgtgaaggaaaagccaaataaatttcagagaattttgaatatttgaaaggtctggcagaaatatggaagagtacgtattcgtggaaagagtgaacaaaaccaatcggaagaaaagaacaacacatttttgtaacagttcagagc

SEQ ID NO: 52105 - DNA, 1139 bp, Heterodera glycines; identical to SEQ ID NO: 21495

SEQ ID NO: 52106 - DNA, 1108 bp, Heterodera glycines
atgaaattggaagggaatggcacacgcggaaatggcaaaatgggaaattgtactgaagcggaggcgaacaaatgggaaaaaggggtgagcaaaaagagggacaaattcacgagtttagggggccattcaagagttgaaactgcacgacgacccggcagaagcggcgaaccaatgcaatgagaattgggtattggaaaagaaaatggcacaagaaatgggaaaatgccaaagaaaagtgccaaaaatgatttttagtggaaaacgcgtaggagagactatcagaagaacggggcagcccaaacactggtcatttgtcggattgatgtgcttatgtggtgctttctgtgcttaattaaattttgaaaagcaaaaacgaaagaaaatatttttgcaaaattaaatttcaaattgcaaaaacatttttgattttttgaaaagcatataatttgaaattaagagaaatgcgaaaaaaaagcagtgtttggtcatttgatgtgtattagttctgttcgagaattaatcatgagtcttgagcagcttttttggtattgtgtgttctgttaaaataatcattttgaagatgctcttccaattgattgaccagtccagattgattgattggtatattcttttaccaatcgattgatcgggccaatcgattgtttgatcggtttccagttttaaacgatcaattaattggtcgcttattgctcgtccgaatttgtcagtcgttctgtcggcttttgttgcgtgttctgtttttccacaatgttcagctgctgcagcttcggctttaccaaatgttttgccttttcaggacaccgaaagtgacgccgccggcgacggcagtggcattggcccgccctttgaggacggcgaccgaccggcggtgccatccgacgcagaaagagcaccgcttctgtccacaactccgaccacaatagcgtacacgacagtgccaccaccggcaaaaacacaaaatgtgctagtgacgcaaatgcgccctaaggcgtggccgccgtccgaagccgacgggcggtgggatggcggcgctcagctgacaccgggacccaaaggggaaaagggcgatccgggagtgcccgggaca

SEQ ID NO: 52107 - DNA, 328 bp, Heterodera glycines
atggaaccaaattcgcataatttgttggctaaagccgaacgattattaattgttatatttgtgatcaggtaatcatttttcaatttcgctagcacaatgttaatcaaatgttttccaatgcttttaggcgtaaatcttatggaactttgaaacccaaattcgaattcaaatagaacaatttcatcaaaaattgagtactaaagggaagataaattaaaaattacttcgtttatttatgtgttaaaatttttaattaaaattgattgtttacccctggcattcaaaaaatgaattttattatgtatttattattacgtgttatttatta

SEQ ID NO: 52108 - DNA, 84 bp, Heterodera glycines
atgaattggatcaaacaacaaacaattccaatacccggtacccgaccgggtaggtccgggtacccgggtaccaaaagtgcactg

SEQ ID NO: 52109 - DNA, 219 bp, Heterodera glycines
aaaatgtgcaaatcagaatgtacatcaaattggttaactattaaaaaataataagatttggaataagtaaaattgtaaaaaatgagcgaatgttaattaatcctaacttatgccaagtggcgagggatccctcaggtttagtttttagaatcttaatttttaaaaaagcacatttttctatttttgggttggggcccaaacgaccccggggcccaaaaa

SEQ ID NO: 52110 - DNA, 1174 bp, Heterodera glycines
atgttgctgccacagttgagaagttgtcaagtaatttcgtccatttccgaatttgtttatttaatccttttaatagtatttgcgagccaaggacgaattgatgtggattctgctccaattggttgcctacgcccgttctcgcgagaagaatttggtccaacagcagcagcaacaaaatggccaaagcggggcacaaatgctctccgtcgttgggttgggcgcacagaaccgggaattggttttggacatttttaacgtaatttggttacaaattggcaagaattgggttttccactccaattgcttatcaggttttgtacaccgacaagaacatgaattgggctaccacctgttccacggagaaccctctgaatatggtttttcttcatttattggccattgacttgactgactttttgttaattttatgtccgattttttgctcctgccgccatttggatcaatttggtgcatcctgtcgctttgcccattgcgtccacttcggaagaaagtcagcctcagccaccggagaaactgaaaccactcattgatttcatcggtttaaactgaacattatttatcgtcaaattatttttattttttacagaaaaacagttggatgcaaacaaaccgctggacaaaacgttggcccttctggcggtcattgccaattcgtacagcaacaatcgcgaggtgttcgaggaacacgtcagctccgcggtgtttcggattcttggccagagcattgttcatcagcagcaagtgcttatttatacaaaggctcttttacttttcattcaattgttctttagcctcatcaacccgaaaagtgttgggttttgcccggcggacggcgaactgaacagaatttgcgtgcattagacctgacttttctggactcacttactttccatgccaaattgcaaatttacaagtcaacatttcgtctctacagccaattattctataaagatgcgacacctaattttgcattgataaggtggtcaaatgttactccattttgtttgtctttttataaagtttttttcagattgccaaccccggcactcgtggaaagtttggcacgacttttgttgagcacggaattggtcagtttttcggttctttcaactattaccaaattctgctattaaccatgtcagatcgaccttaa

SEQ ID NO: 52111 - DNA, 161 bp, Heterodera glycines
  unsure (1)..(161): unsure at all n locations
atgttccgatcgcccgcacttttcgcgatgtttcttctgctgctgattgtttttcagctgtttggggttgaaattgtgcaggggtcgaagcgaagcaaaggccgcgcacggacaanagaaagcgaaggcatttcgaatcgggggaaagatcggcaaagaaa

SEQ ID NO: 52112 - DNA, 1693 bp, Heterodera glycines
  unsure (1)..(1693): unsure at all n locations
gccatataatatgatttccgggttcaacaaaatntaatgcatttntaattaaattaaatatttttaagtcaaaaaaacaatacaaaagaaattgtttttctgttttaattaaaaaaattaaattgaatttatttactgtaaaaattcattttactttttacctacccaattaaattatgataatattaatggaataattgggtttgattaaaacccaaacattttaaatcttttttgtacatccatattttctatataaattcataatttataaattttaattaaatttatacccatttttattgttaaaaatacgcactctcgacatttaatattttccaaccatccacaacattatcggataatttcctccacaaaacctgatattctcttttagtgttactattttctatattttaaaaaacgaaccgcaacaattattatttttccccaaaacttttttaatttttgttaaccacaaaactatttctgttttttgtatttttccgaaaaactatttctgttttggtttgtgttttccggaaacaatttcttttaatattttgatcattcttaagtagtgatctgatcaacttgtgcaatgcattagtttataaattcatgatttacaagaattatgttgtcatagataatgtgagtaattcattttaattttgctttttaaagatataaaatatatttttatattttttatttgttcttgatattaattgttaggtatgcctgatcaaaatctaagctctttagactaaggctagtaggtgaaacacaaaaaattttgcgtcctatatattttgtgatatgatttgtatataaagcatttttttatcaatttgcccaataaactatatgtaataatttcgtttagttgtgggtaaattttccgattaaagaaaaaaggtatgccgaaattggcatagcttagagcaagaagcactatttaattatcaccttcagtcattatttcaattttgggaattacgaaaatttattggaaaaagcattatatattttttttgacaattaggccacaaatgtcggtctccgcaaatgtcggtccgcaaatgtcggctaaccgaaagcgcattaactccaacgattttcagcatccacgaccacagtgctgcgcaatgcttcgtcaaagttttggatgggcaacttttggagacgcgatttgcatggccaaagaaggaaaaagaagagaaagaggaagaaaaggaagaagagaaggaagaagaagaggaagaagagaaggaagaagaagagggaccgatgagggcgacagggacggcgctgttcaaaacgaacggagtcagctacatcagtggttggttgaagagataaagcaggcaaaattgaacaaaaaagaataaatcacaaaggaaacggatgaaattcagacaaaaccggaaaaacggataaattcagacaaaatcggaatccatcggatggaaaatccctcgcacgtcgacccgacggtgacccttcacctgtacattcccccgtacagccaatgctattcatttgaccaagtgatggtccccattattttttacaatttaattttaattcctttttttcatggaagcgaacggggcgaaaacagcaaaatacagtaagctttcattcaaagtacggtcgaaaggtggactacggtagtgggaacagaaaa

SEQ ID NO: 52113 - DNA, 867 bp, Heterodera glycines
atgaatttgttgtgtttaatatttattacaattttctttatttttgtaattgactccgacaaaattcgaccaaattttgatgaaatatttggcaacggatgggacaaaaaagaaagtgagcaaacagtgaaaattgaacaaaatgaacgaaatgagaactcacaatcagcagcagttgatcaaatgggtgaagaaatgggaaatgaccgaaatgatcaaatgaaaaatgatcacaaaaagagagaaataattttgaaatttgaagcaattaaagaaaagttgaagcaaaaaggaaaatacaaaaggaaagattatggcaaaattgagagaaaaattgcaaaattattaggcacaaatcgcaaaaaaatatacaaatggaaaaaagaaatgaatttaaataaaaagatggaaaagagtttttatgaggacaaaaagaaagaattcattgaacgatttgatgaatttaaagatttatatgcccatggcaaacagaaagaattcgtgaaggaattgggcatttctaaacaaacatttcgaaagtggaaaaaagaattggcaccaaaatacaataaaagtaagtgcattttttcgatttttactttaatttttatattaaagcaccaccgaaatattccaatgaggacaaattgatgaagatgaagcaatattatgaaataaaagaagcaaacccaaaagtgactgacaaaataattgccaagaaatttggaattggatatgcaacgatgagaaaatggaaaaaaagaatgctctcatccatttgatcagtgattttatttgattctgatctataaaaatattttgtagggcatctaaaactcgccagttttttagcattagaaaaataaa

SEQ ID NO: 52114 - DNA, 1064 bp, Heterodera glycines
atgaacgaacggaccaatgaaacgttgacattggataaagaagaaaacgatgatggatgtatcgtttgggtgttgaagcgttgccaaattggggggacggttctgtgggaggacaaaaatttggataatttgaacaatgtcgactttttgctttttgaatttgggtgagtggcaacagcacattttctttgtttaaaataattaacattatttcacttaatttaggccattgtctccaccaaaggcgggccaaatgaacgcaaaaagtcgtctgaaaatgaataccgggccaaacgggagaaaaaagttgatgaaatatgtattgggaaatgaccgatgaatggaaactgatctgataattgctcttatttttaatggtcaaatgttgaggcaaaaaaggcaatgatgagcaaaaggaaaaggacaaattgcatttaaaaataataattataataatattattagagcccggacgggaccgggccccgcggggatttaaaaagttttgttatgtgacggaaaaaatttatgattgaaattcatcacattccatttccttcccttcataagcatcttaaattcataaagtgatcacaaattaaagggaaatgaattatttatatgtttaaaaaaatttccacatactcaaacaaactttgatttacaacgcttcttttacgtctgattttgctttttcaacaatgttgactttgcattgtgaaaggaattattttgaaattgaagcatcattaatttatttgacgtgtttaatcttaacttttatccaaaaatctaaaattaaatttttttatgacttttcaattccgagacctttgcatttatttttaataatgacttgaaatgaacataccacattgacattatgaatatatttattcgacgcctcatcggtcttaaaaacaaaacccaatttttaaaaaaaaattacgaaatagaaaaatgaaattcaatttcgcaaattacgaaatttgatacaatttcgtattttttatggtccggcgtgaaaatttttatagatttttacattcatatcaaaattttaa

SEQ ID NO: 52115 - DNA, 293 bp, Heterodera glycines
atgcagccaaccgatctacccgcatgtctgaagcagccggcgagagtgatggtgcgcggtggaatccatcctcaaatccgttcagatgaaaacgaagtctatcacctctacaattcaaatctcatgaagaaagttggatacatttcgatgttctaccatgtacgaattggggattgtgtgtggctcagtatagacttggtattgtattattaaaacataagctctctcaattttattaccgatttatgcgtcattacagtaatgtttattattttattttgtctcctaataaa

SEQ ID NO: 52116 - DNA, 63 bp, Heterodera glycines
atggctaaggatttgtgccgatacagcaaaaagtcgttgctgatgcacccggaagagattgag

SEQ ID NO: 52117 - DNA, 961 bp, Heterodera glycines
atgcgtttcggtcacggcacacgcccaccaccgctcgcatcgtccgccgccgccaccgctgagacctccgcggggccatggggcgccgctgacggacgagttcagcgacatggactccgaaagtgttcagagtggacggcgcgggagcggcggagaacggcgccaacggacgacggcggtgcggcatggcggcgccaacggtcgccactcgcagcagcagctgcagcagaggccaccgttgccgctgaagcgggaaaacaccgactcgacggtttcctcggcacagcgaggaagaacggggtcactgtgatcagcagaggaaaaacggaaggggacaagcaaaactgtgatcagtcagaagcagaccaccaagcctgcccagatttgtgattggaaatctcatcactccccggcttagaagcaagcaatcaaaatccaattggatcctcctctaatcagcgagcgggccgggctaagcccagccgacccacctgatcagggaatgatctccggtagtcagggctaaacccacttaaccttgatcctcagactgggccaagcccgcctgatcagggaaaagcagtgatcagcgtgggtcaatcctatggagaattggacactaaaacagaaaacaatttactctggattatacaatataatagcgactttgtgcccaattttccaggggacaaaacccatccattttgtgattggaaatcatttccgatcagtgatcactagtcagtcttcggcttatcctcttttcccaaaagatgggatttgtctgtctttcacctcaaaactctttctcaattgctctttttttatggattttccaacattttctgcccaatttgccattttcacaattcattttccggtgttttttttgtttatatacactcaaatctttacacaaatacactcacaaaatttattaccatttttttattgaaataaa

SEQ ID NO: 52118 - DNA, 671 bp, Heterodera glycines
atgggccaggacatggacggtgagcaaagcccaagcagtgaatgaattaatgaatgaatgccgcccttggctagccaattcaggcatttttggggggaatgcttccgctttcacggggatttgtgccgcgggcacggggggacgaaaaaatacaataaaatttttttctcttaaaatttgtgtgtaaatttttccgtcatttaggtctgttcccctatttgctgctcgcacttggccttgcactgctcgccttcttcatcattctgtacgccattctgaacgcgcttttgcagcgaaaggacgcgcaacagaacggagagggggaggaagaggatgaggaagaacgacgacggaagagacggaacagaaacagacggaggcggaggcgcgagagagtgcggcagaagcacaggacggccagagacacggaggaagacgaagagtggatgggcacagaggaggacgacgagggaatggagagcgaagcggactcatgggacgcggaagaaccgcgcgcggagcggagggagcggcgcgaccaggcgcgcaacagggctttcactgggctagaggaggacgaggtacagacgggttgccaactaatggcatacacaaacatggcacttgcgccttcatgtgccgatgtcgtgcctgaacttcgagactcttga

SEQ ID NO: 52119 - DNA, 617 bp, Heterodera glycines
atggaaacgccgagccgagtgtccgccgctttggtcaatatgtgcacacaaatagcaaaagctaaaggtgagcgatgaagcaatcactaaacaaaataggggaaaattaatggtaaattcgttttaatttagaaaataaaaatggggacgaacattccgaattgattcgccaatggactcgccatttgttgaatttcctcaaggagagcgacctgtttaggcaagcactgaagacatatgacgtcgaaatcgctctaatggtcgcctcaatcgaccaatcttgttagttttatgaaatgtttttgtttaattatttttttaaattcaggatccaaaggaataccttccgtcccccccccccgcccccggggggttgtgacaatgagttgatcagtcgcgtggtggtggcgggggcgacaactcactcaccaaaccgaccgaccgaccgactcttccattattccccattgatttggtgatcagcgcggggaaaacgaatcggggagggggagaaattggtgagaaaaacggcagagaaatgataataagagagaaatgtcgaggaaatgcggggaaatgaagcggggaatggtcgaaaaattttcaaaaaatataaa

SEQ ID NO: 52120 - DNA, 603 bp, Heterodera glycines
atgttcaaacaaatgaaccttttcgttttattttttattttttcatcatattcttttggcactgtggagggatcggcttttacggatttttttactgatttgggcaataaggcttgggtgagttaaagcgtttattcctttgcattttttttgtttctaaattaaaaaaaatatacatttaaggaaggattgaaagaagcaggagaagcaatcttggatgggataaatgaagcaacgaaggcgctggttatcccagggtgggaatgtgggccaaatgatccaaaatacctcgatggaccgtcacacgtacattaattcttcgaacatttattcatacatacaactttttaagcttgcaacgcaaacaatggttatgttcacaacctgtgtcttcaaaatgagttaatctatttgaaaattcacaaaaaaaaacaattgaatttagctgaaatcaatcaaatgttgcaagaccacgacaagtatgtttgaaaaagataggaaaaattaagctaaattttattgaaaatcaatgaaaaataattgaataacaactcattatttaatgttttttttgccccaaaacataaacccgaattaaaatta

SEQ ID NO: 52121 - DNA, 991 bp, Heterodera glycines
atgaaaatcacaactattccggttcttaagttgaaccttaataatcagtattgttctgacatgaaaggtaaattaaaaataccttctgattttgctatgaaacccagaacttttccggttattaagtttgaaccttaataatcagaattattctgacatgaaaggtaaatcaaaagtacattctgattttgcagtgaaacccagaacttttccggttcttaagttgaaccttaataatcagaattattctgacatgaaaggtaaacccaaattattttgtaatgaaaaccagaattattccggttgttattttgcacctcaatgtcggaatattctgaggcatcagaataagcctttgattcccgaagattgcaacggtcggttcgaactgcgcgggtgggcagggctcagttgagtcacaaatgatgggtatattttaaaaaatgcccaaattattttgaaaattaggttgggaccggtaattttaaaaaagccggacatagaaatgccgaaaaccaaaaaagtcggcattggcattccgatttttaaacataccctcaatttgttgtcgataatcaatgttgtagcgaagaattccaaacagactctggtcctgtcgatggcaagtcaagttcggaggaatgggcatataaacgcacttaatcgtctgtccaattggcaccatacagtcgggctcggcggcacaaagcaaggccatgcaattttaaattattttatttatttcaattattattgatttaaaatctttattggtctgggatttaaaatacgagaattcttataaaaaaaaagaagcatttattatgcttaagactgggtattttcacttgtcaccctctacccccccccccccagattctttaatcatcttttatggtaatttgaaggctgaaattttggtggactctattttaaccaagctcaaatgtcaaaagtgaaaatacattgttgatcactaaagatactcaaa

SEQ ID NO: 52122 - DNA, 429 bp, Heterodera glycines
atgtattccggcggtgggagacgttcgtcaatggtgcacaaagacggaaataatggcgacgacttcggcggtgggagacgtttgttcatgtcgaacaaaggcggaagttgtggcgaagacgacgcgcgactgtgcgctatcatcggtcggtcgcatgtgctcggcacggagcccaacgcgaaaacagcggcactgacggaggttagcagaaatgggagggaaatgccgaaaaatgttcaataaaacaaattttttttacagagcaatgcctttgacattgagacgacaaaaactccgcacaaatttccgaatgtgcaggcggatgggtcgggcgtgttcccagcggactttacttgccgatttatgctggacgtaggggcattggcccaacttttggtgagcaaattcttgcaattgactttcacataa

SEQ ID NO: 52123 - DNA, 647 bp, Heterodera glycines
atgagtgagctgatatttctctatttctttttcttccccgctttctccgtctttgtccatctctctctctcccttctttttcatcttttctctacctcctgcagcaaccaatacataaaaaggatactgtagaatgagatatcgatttttatacgcctttcacactttcacttccgccgattttaaggagtgtatttcgcgtatctacacatgtgtttgcgtgtattaaaactagtggacaaaacagaaagttgaagaacagttgtataaaagtgtacatgaatgtattgttatctaattagcaatttaattatattattaaaacgtataaagcacaacccatttgttttacattggccgaaaattttgatatttgtctttttaaaggcttttatatcgacagcctaaaaatgtattccggcgatgggagacgtttgttcatggcgaacaaagacggaaataatggcgacgacgacatgcgactgtgcgcttttgtcggtctgtcgcatgtgctcggcgcggaagccaacgcaaaagcagcggcagtgactgaggtcagcagaaatgtgacgaaagtggggacgggaaatcgtgggatttttcagggaattaagaaaaccccaaccgcaatttggcatttttactga

SEQ ID NO: 52124 - DNA, 2181 bp, Heterodera glycines
tgccaatgaaaggtctttcgtcatcgtccaatgcgttgaaaatggtccaccgggttcaccactgactccaaaaagttccaacaacggacactgccgaagcgggctggcggtgcccaattgctggacattgccgagttgccacagccgaacaaacgccggcggaccaccgtaactgcagcaacaacagcagtgccatcatcatcaacggcaccggcgggggcaccacaaacgacacaattggcaacaatggcggatgggggggaccaaccaaagcaacaaaacctacgggtatttttttttgtctcgtttggtttgaagaaattgttttacgatcgtgttcatatgtatttgtgtttagtaatttccgaaaggaaaatatataaagaaaagaatattcaatgtcgtggggagggttcgaacctgggaccccccttccaaaaaaaatttcattgaccgcaaaatccgattttgtcatgtgccgcaaacgttcgaagtgcaaatgccggactgcatttgttgatctgtaaatgtctgatttccaattcgggttataccaccatccgtagagagctagatctcgtggtctagaagatcatttaaaagaaatttaaaaaaaaaattattttttaaatagtaagtaaactactttaagtttttgtagggcaaaaaaaaatttttttttttagtgtttcatatccattcaagtttaaacaattttgtttaagaattttatacaaataaattttaaatttttttatagaagggttcgctgaccaacaacaaccagagacactcgtcattgaacaacaacaaattgggcgcaactgtggctaaatcgccacagaaaacggcacgacaacagcgcaaacatgaggcagaagaatgcaacaacatcaacgacaaagagggagacgaaaacaaaacaatgccggagggcgcaaatgacggtttctttttgggcttttgatatttgtttgcgcatgcctgtaacaaacaaaaaaagaagaaaatttgtgaaatggcaacccggttatttatttttttcttttcgggtccaaatcattttttccatgcacttcgagagagttaaacattgtttgttttcgtcaaaaaatatcattctattttgtggctatttttgaaaaaatagaattcagtcgtttggcggtggcgtacctttttttcaaagttttggttcttttttataatacagtatatgacattcatacctctgttttcatttcagcttctgctattctggttccaattactggcacttttggtggtgccaatgttggcttggttaatgacggtgacaatgttggtggtgcacttcctcctcatccatcggctgcacaactctgcttgatcaataacaacaacaccaccaacaacatttccgaacagtacagcaatgccattgtcaatcagcaacagcaccagcaacaaacggttccaattcgaccgatgggtggggaattttaatgaatttgtgtgaactcaattgatcagtagggacttgaacagttgattaattaaaaaataaaataaaatgttactacatagtaatggattcgaacttggatctaaaaaacaaaaaaaattttgagccccacgattttttttacaattggcgccgattctcctccccaaccagaaattttttttaaagtttcagtcttacaattctggcagtttaattgttcgaactaattaagctaaaccatatttcttacaattaatatcattttgtcccctctttcagttggctcgcatccatttccaaccaacccaagcagcacaatgatggcctcctcctcctcagcgtcgtcaacgagcagcgcatgtttcaacaatttgtttgcggagataagcactgaacaacagcaattacaacaacaacaacaaatgcccagaatggagacgaatttcaatgtaacggttttttttaatttattttaatttttgaccgtcaggaatatgaccaagaaaaaaaaaacacaaaattatatttatagttttttggcagggttcgaatagaataaattaattgaccaccatgaattctttctgcttttaagaatgaagcgctgaaacagttcaacggcttgttgaaagatgccaacaaattgagcccgctcagctataacatgatcgtctcatttttgaacggcaacaaaa

SEQ ID NO: 52125 - DNA, 1261 bp, Heterodera glycines
atgcaccaggatatagcaatttggacaaaagcatgtgttaattgtcagctcagaaataatccaacaccggcttatagagccgaaatgtcaattactccggctaatacactctttgctaaagttggattagatttagctgggccctttccgttaacgataagaggcaataaatatttattaaacattgtatgttggtttacgaaatacgtgatatcagtcccattacctgatgccaaagctaggacgattgctcgggcatttctgactaattgttatttaaaatttggagggtgtaccgaattggtaacggatcaagcaacctcatttacgagtgagttctttcgagaactgtgcagcttgctttacattggacaaaaatgcgcgacacctcattggtcccaaggaaacgctataactgaatgaactttcagaacttttcacaatattttggctatgatgaatttattgaaatggcaaatttttgttataacacctcagttcacacatcaacaaaagaatcaccatttttcctcatttttgggagggatccaatatttagtgttgaccaaattctattcccgacaattagagacccagtagctttggatgattcatggaatttaagcaaaaattggtcaccactttaaggactgcctggaaatgtgccgcagaagcgaacgaagaagcacaattacggatgaaactacagtacgacagatttgtgcgcccgtcaaaaatcatggtaggcgacagagtccttttacgtaattatgccggaaagcctggcacttcaaagaagctgaatttgccatggaaaggtattttccgtgtcgtaagtttggacgggattcacgccataatcatttcctgtctatccccccaggcaaacccacgaaaagtccacattaaccaattaaaactttgttttgaattgccaggacctgcctgtaccaagccaactcttacagaagatgaacaccaagcccctgacagagcggaagctgaggagctcaccaacatgcccgggtattatcatcggcctcaggcaaatgcgaccgaacaaaaagaaacctccgaaaaagcccaatcagaagtggacgacactaaccaagaaacaatggacaacaacaaaaatgaagaaacaacagagaaatcaaggcgtttaagagattgaacaacaatacaacgaccgaagcgcttctcagattgaaaaatatgttaatttaattttttttttaaatgtagaaaatccattagtgga

SEQ ID NO: 52126 - DNA, 1291 bp, Heterodera glycines
atggaggaaatgggccacggaaaaatgccaaacgcaggcgaagaagacacagtggacgaggacagtttgggggagaagggcgaagtcagcagggatctgttcggaggtatttatcattttaaaaatgcatttccgttttggggctatttaattttttttatgacggtgtacgaaattgcaaaaatagtaggaaatatttcaaatatcaaaacatgaccctttgagaattaaataaatcattaaaactcgaaattttgaaaaaagcctcgacctggacctggattttttgaagtttattttaaaaagcaaataaatgtttgaaaaaatcaattaattgcttaaaaatctaaaaatatttaatttacaataattatgtgtttttaatttatttaatcatttttgataactcaaataatacattggttacctgataataaattctaaatttttttccaaaatccagcctttttcatgtttaacctggacctggattttttcatatttgatagtccgaattttggtccctgtttatttggattttttcaaactatctttaaatttaggttccgacgagccacgacatccccggcctccgcacataaaataccgcgttggtcaggtggtccggcatcggattcacaactatcgcggagtgatcatcgcgtgggatgagaaggcgaaggcgcccgagtggtggataaagaaagtgcacggcgatgtgccggtagacgagcccaactacacacttctcatcgacactcggggtaaagcagaagaatatgcaatattgaaactacgcattttggtgccattctttcagaaaggtataaaagtttcgtcttttcgcgaaaaaaatattttgagaaaattctgttttgcctaaaaagtcgtcctgaaattccctgaaacataagcatttccattttcatgaattcactttgaattttaaggaattttttttgactggcatttcgtttgtgaaattcgcctcatttgttttttcttttcattaagaatttgggttcatttttccatggtttgattgtccttctttttcagaccgtctgatcccacaaattgcctatgttgtcgagcgcaacattgtgctgctctccagcggtgccattgtccacccgttggtcaaacattacttcgagtccttcgacggcacttgttacaaatcgaggccatggtaacaattaaaattaaattttttattggtattattttattaatttttaatatacacattttttatttcaggcacaaaaaagtgtacccgaacgactga

SEQ ID NO: 52127 - DNA, 1150 bp, Heterodera glycines
atgatcgacttcatgcggcacaaaaaggacagcacaacaacaccgacaccaacaacaacagcgaaaatggaggacggcggcggcagcaggggaagggtactgtagaattgggatgggcttttgtaacagttacatatactgtaagtagctgtctgcaaaatacagtatgggtggccgactctgcaagagcaatttcacacatttcttcctgctggttttataaaaagaatatactgtagctaattggcatacagtaagcggtgggccttttggcaaaagtcgctactggatgtgcgccagtgggaatccagaataataatctgtcagtaaaacaatcagtcggttatggacaatctgtcagtggacaatccgtcaacaaagtatggacgagatgtacttggatgaaacgtcagtctactgacgaattgtccgtcactgatgaattgtccgtcactgatagatattgtcttccgaagattatccactgacggattgtccggataccgtcagtggttggaccgcaatccgggagtttttgcgccagaattacacattccggcatttatggcttgtaaaatggcatttttaggcgaaagcaaaacattcaactggctcctccggtggtggaccatcagtgccggcgccaaacaatcggaagaaaacgccaaatcaacaacagcaaaaaggaaacaacgaattgggaggagaaggaagagaaaatggggggaaaagagaggaaaagggaggagaaaaaggagcagcagcggaagcagaggaaaaggaaaagaaagttgcagttgaacatcatcaaaaacaacaacaacaaaagcaagaagttcaagcagtacagcagcaacaacaaaagcaagaagttcaagcagtacagcagcaacaacaaaagcaagaagttcaagcagtacagcagcaacaacaaaagcaaattttggtgggaatggagatgaagatggataacagcaaaaatggagaaacaagggaagaggtggaaaaggaaggaaatagcattggggaaggaggagagacggaagagaaagagaggaaaaggaaaaattctaagcaaggagggggagaaagaggagagaatgaagcagaaaagaagagagaggaacaacagcaaattgacactttttaa

SEQ ID NO: 52128 - DNA, 974 bp, Heterodera glycines
atgaagagcaatgatcaggaggaagaggaagagaaggaggaggaagaggatgatggagaagaagcacaagatgaagcagaagaggaagaagctgttgtagttgttggcgaactgatcaccacaaggaaaaggtgaagagtttcgtttcaaaaaagtttcaaatttttatgtcttaaaattggtaattatccccctacatttcgggagaaaattgttgagggagagggtcgaaaaatagaaaatttcgccgtagggtgggtggggggggctgaaaaatcggcaattggtacctagttttttatttgacattagataacccataaaatccaaaaatcctggaaaaattgctgaagatagaccctaaaaaagagtcgggaatttgggatgacgggataaataaagactaacgccgtccggtgacctaaaatgccgctcttggtccggaaatttggccaataagttgttaaatccataaccgatcaatcatttgtgatcagattaaggcgcaaatttcagaccaatttataatcgtaaagcactcacaaatcgttacgactacaagcatcgatcactgcttgatgcggccgactttttgttggaaaaagtggcataaaaaagccattaaaaattaataatttgcccattttagcatgactttgatgccgcattgaaacactatgaacaaattttggccacaaacgaacatagcccaaggcattttaaatggaaaaataaataaataaatatttaaacattaatttagagcactttttggccgtggacgtctccaccaattgaaggccgaatttggagctgaacatgatgatgattcggagaaatttattaaaatgtaaaattaataaaattatttaaatttaaaattttttccagggcattgcccgattacaattcagtgctggaaaatgaagacacacctgatgaactattcaagtgatttgtgattatgtacaaaa

SEQ ID NO: 52129 - DNA, 845 bp, Heterodera glycines
atgaacaaaatgattgattatttgaaaatgaagaaagcaaatccgtctttgagtgataaagaaattgccggattattgaaaatctcagtaacaaccctaaaaaatggaaatataaacttttataaatttttctattagtctttgtgatgaattgatgtttttcatgcttaactaaaatccaatttatttttcgctcttcatctgttaaagagttttcattaagactgatctgaccgcaatcgagacaatgatcgagatcagtctcagaaccctggactattggcattggtatactcttttttttgtctgcaatttcattttcataattgttatttatgtgcgaaaaatttgggtcttgaaaaatttaattaatttgtaaacttaaaaaaaaattcaatttttctcaaatttctctcttttttaatgatataattaatttaaaaataatatatgtaattataaaatacttaaaaattaaaatcacacaattttatcaaatttttatattaaaatgttcattatttttctattttttgggctgatttcctcacttttttgccccaccggcgctgggtgaggcgtggcgtccgccagccggccgaatgccgccgactggaaacactcgcattggctgtgccacccacccaccacattcattcttgtggcattcatccattgtgcccattccagaagggcataaatgatacggtgctgggacgttagtcaaaaaccatcaaatgaataatttttgacagaaaattattcataatttcgtctaaaatggatcaaattttataatattgatatttttcgatagccctatgtgttttctattatcctgcaaa

SEQ ID NO: 52130 - DNA, 1341 bp, Heterodera glycines
ttgtgaaaggtgagtcaatccctcccgaaatttaaggaagcgtcaattttgggcacgtatttcttgccaattgacgaatccatcgacaattcgtacattcagcgtgagaatatttttgtgggatattaccaatgggtaatgaatgatggcatgtcaagtcgaattagtggtcaaatcaaatggttaaaggtgccaattgtgctggcagcacaagcgttgctcttttaccttccttcgttcatttggaagtcgtgcaatttcagcaccggtaatgaatccgttgcgaattcgcccatttgtccgtccctttcggttgcccgccttaggcattaacgtgaaaagtgtgctgaacagtgcggcactcgtcaaaaagaagttcgacaagggcacgcgaagtgcccaagtggaaagagcagccaaccatttgacggtccgtccgttcggtgccaattaatggcgaattaatcggtgaccgtttcaggaggcattggacatgcaaagggaactgaagacatgtgagtcgatgctgctgtgcaagtgctgtaccgcttctgttcagctgccaccgttttgtcccgccttggaaaacgcaacggcgttttccttgtctgtctgatatttgttcaccaaattgttgtacgtcgccaacgtgttcctgcaatttgtcattctgaatgccttccttggccctcagtacactttctggggcattggaattctctctgacatttggaacggaagagaatggagcgagtaaaaaccgaaagctttgcgattcgcaaacgcaaacaaataaaaaggtccggccatttccctcgcgtcacaatgtgcgatttcaatgtgcgcgtcctcggcaacattcaccggtggactgtccaatgcgtgctgatgataaacatgttcaacgagaagatcttcctcttcttctggtgggtctgccgttgttcggcactctttcgtccttccgtttaggttttggttcatttttgtcggccttctctctctgctcagccttttttactgggcattcgccactttggtccccgcttttcagaaggcctatgtgtgcaaatacctccgttgcgtgggcattattgcccattttaccactcaccgagaacagcgcttaatcgactctttttttcgagactttttgcgcactgacggagtctttctgctacggatgattcaggcatcaactcaaaatttgcatttcgtccactgataacaatccatgaatttgaaacacagacaaacggaggcgatttgttagtcggagagatcgttgccgcactgttcagtcgttaccaaacaaaaattgaacggcacagcgacccaacg

SEQ ID NO: 52131 - DNA, 203 bp, Heterodera glycines
ccctaccggccaattccctaccggccgattccctaccgccaatcccctactaaggcatttgggccatttccataccaaaagtgttgaatattgataaacattgagattaaaacacacaagaaaatttattcactgctttttagaaagctcgtcaagagctttcggatgataacaaatttatcaagattcgatcgttttaaaaa

SEQ ID NO: 52132 - DNA, 523 bp, Heterodera glycines
atgtccgcgcacctttatccgaatatcctcacaggtaaagcttcaattcgcagatgccaaaccaatttttgaccgtcggatgttgcggagtgttcaacgcctggcacagcacatcagaacaagtgcgcaaagtgttcacaaaattggagtctttgttgctgtacatgcacagcaaattgagcaacaattggcgcatgcattggaattccgggctcatttcgatgccacaaagcaactgaaaagagaagcgaaatacgaacgaccaaacggcgacgacttctctttccggcacgcggaggctgtctccgctggagcgcgagatggcacgctttgggagcggaatgcgcgtgccgatggtggacgcgcgtttgcgaagcacaaaactgaagatgaacggacccgagttgtcggaggcaatggaagtgccgccggagaaagtggacagacgaagacccccggaggaagaacgttgagacatgcgcgaactggcacgagaactccacccgcacatggaggactctga

SEQ ID NO: 52133 - DNA, 1853 bp, Heterodera glycines; identical to SEQ ID NO: 21522

SEQ ID NO: 52134 - DNA, 713 bp, Heterodera glycines
atgaaagtgggcgaaattctccgcttggccaccaacggagacaacagtgatcccgccacacgaacctcaaatatcaatgccctttgtgtgcatctgcaaaaagtgctcaaattccatcaccgactttatcaggtggacaaatattttcaaatggaataattttagttttgaattttaaaataaaatttattttttaaaaatccattaatttggcttacggctaataatttgggagaggctaattttttaaatttaatttagaatttatttaacgggttttttatttttggaatattggttaataccaaacattggcacaattaaaaaatattccgaaaacaaaaaaaaccgccaaaaaataaacgctttattaaaaatacagttattttccccatttttcagaaacacatttcgccccacagtttcttccgtttgttgaacatgaaatactccgcctattatgtgactgttgtttacctcttcaccaagtgcctgttctttgtcaatgttgctgtccaattgaacgtgttaaatcggttggttttaatttggccatccatttttatttatttttaaatttttatggctcagtttcatttccatattcccaaccatgccgttgagggtcctcccgccctacttatcctatttttttcaaaattattgaatttttttatgttttgcccaaatttattgtccgtcatccatttaaa

SEQ ID NO: 52135 - DNA, 510 bp, Heterodera glycines
atgctggacgaaggcacttcatataaaagaatcagaacccgttttaaaaagctgaaaagcgacgaagaaatttcaaggtttttcggccttcccatccaattttataagcctttaataggatcagacactacatccagaaagggggcaccaaatatgaaaagttcgaaaaaatcgaacaacacgtgctggcagtttttgcagaggcaagaagcagacatgaagcaattcatgaccaggacctggtcaccattgccctcttaaaggcacgagaaattgattttgaatttaaggtatagccccccccccccctcaaggatgagactaccgtaacattactttaggcctccgcaaaatgggttctgaatttcaaaaagagaaacagaatagtttcgaggcgcgtgaccaaaattgtaccagctacttatgcagctgatgaagaagtgctcaataagcgtgcctcggaatgttcccttgtaaatttaatttaagaaatttgttggaaaaaataaa

SEQ ID NO: 52136 - DNA, 372 bp, Heterodera glycines
atgatgccattggcagtcgatgcatttgtggggggagatttaaatgtgaaaccacaattggaactggtgtaaaacagcagctggacagaacccatcatcactccctaatgagctcagcaatggaagcgatcaaaacagttaaccgggacttattcacatggggcaaagggaatggattaaaagtcgagctaatttttgattttttttttaattttatagttatttttttagattattttggtaaatgagaaggattgcgaccttgatcaattgttatggactgatacgagaaaaaatttggatgggttaagtgcaacattaaagtgttgtggaaggtttcggtgcaactcggctcggtaattgaaaattata

SEQ ID NO: 52137 - DNA, 820 bp, Heterodera glycines
atttacatgtccttacattccatcctattgtttagaaaaatttaaaagttttcattgatccaatcggattaaagcatttggtcaaggaaatggaaaaatttatgctagaaagaaaagccacccaaaagaaaagtgatgatgatagtgcacaaacagactaatgatctaaaaactcttcacttcgtttcctcactctgatcaccattttgacttgtgatcagtcttttttcatctccgatcactttgctttgtcattgcgtgtaccggttttcgacttctgtttcctccattttgatcagttcgttctgtccgcctttgtcagttttggtcactccatctttttcctttttgtccaatgatttctgtacatctttcatcagtttgatcactttcagtttggcctcctcacatgggtccgttgctaccatttgtttttgagttttgtattccattaacaaaacgccaatatatctttcaagtttcagagaatttccttggtcgaattggcgcaataaaatttctttcaatgttacaaagtcttttttcaaagaataatccggttcattagtaacttttttctcgtgatcctttccaacattgcaaattgttgaccaattttcaggttttaaaatttttcaaaatttaataataaatcttagctttaaaaaaaagattttattataattttcaattaccgagccgagttgcaccgaaaccttccacaacactttaatgttgcacttaacccatccaaattttttctcgtatcagtccataacaattgatcaaggtcgcaatccttctcatttaccaaaataat

SEQ ID NO: 52138 - DNA, 1196 bp, Heterodera glycines
atggtagcaacggacccatgtgaggaggccaaactgaaagtgatcaaactgatgaaagatgtacagaaatcattggacaaaaaggaaaaagatggagtgaccaaaactgacaaaggcggacagaacgaactgatcaaaatggaggaaacagaagtcgaaaaccggtacacgcaatgacaaagcaaagtgatcggagatgaaaaaagactgatcacaagtcaaaatggtgatcagagtgaggaaacgaagtgaagagtttttagatcattagtctgtttgtgcactatcatcatcacttttcttttgggtggcttttctttctagcataaatttttccatttccttgaccaaatgctttaatccgattggatcaatgaaaacttttaaatttttctaaacaataggatggaatgtaaggacatgtaaatgcgccgtaaatggtttagatcatgtggttgtttatgtaaaggaatgtttaattaagtgtcatttaggcattttgtcaaaagtttatcctttacaaaattcgacaaatttatatagaccgtttcgcccacccgtataaaaaccggtacaaattttttccttataaaaaatgcctttaaatttaaatcttattataaaattaattgtttgtcatcactatttttatcacttttttgccatttttcgtcattttttaattaattaacaattttggggtttgcgcaattaaaatccgcgctaaagttattaaccaaacatttttcttgatccggtatattgaaaaaataattgtttcccatgggttgaatcgtttgccggaactttctagaaataactaattttttttattttaaaagatcgctaaaagtgtaaataatgtatataatggccaaatatttatgaaatatttaaaaaaatcttccactaataattaaatctaatatgcaaaaaaaaaaaaatttctttgatttttcttacaaaattttctgagaaaagcggtgaataagcataaaattccataaaaagacgtaactagcttacattaagcttagagtttttaattgattttaatattttttttggaaaaacatcaacttttgaggtacatttttcattttttaatgcatactcgaaaattgaaaaagatttttgtcaatgaagacaaacaattttattattgttatatagtagagttgctcggtaatcggtaa

SEQ ID NO: 52139 - DNA, 1615 bp, Heterodera glycines
atggccgaatcccaagtttatgcgccggcattgctccaagaaatgaatctttacgccgaaaatgcgcatgacgacggtttcacagcgaaaaaggtggaaatggccaaggaatttttttaccaacttttgatcgaaacgaaaatgccggacattgaagaatcaattcgcaacgcattctgtgtgttgtaccatttttttgaatgtatggtgttggaaaaacaattaatagtcaaagtgatgatggcacattgtgagcgggaagtaaatgtgaaaatggcaattgcaatgcaaagggatcggatgagggggaggacgatgcaatttgtagtgaacagcttggccagcccggaactgttgatggtgcagaggatcagacggacccaaggtagtgggtgggaggggaatggcccacagcggacagtagcgaattgtacccgagttatgccggtttttaaagggatatttgttagttggacctaattaagggccctatgacgaggtatattaaggagtgggccctaattaagtggcatttgcgagtttggcgcccctgttatgagggatatttatgagttgggcaagaggtatttcgggtctttgttctccttatgttccgagtgaataaatattttgaaggtggaagaacacggatttggaaattgttgtataactacgaccaaaagattgagcaaaatgaaaaagaaatggccaatttgtgggaaactttggaactttctgatgatattattatcggtaaataaataaaaacataaatttaagcttaaagcattttttggttttgaataaaatttgtactattgtttttttttttttttttgcttacgccaatcatttttctacggggtgacggaaagcaaaattttccattcgattcaaaaattcagaattaagttaccacttaaatgactaaagcagactaaaaaattacctaaatttcgcagcccactaaccattatttaactattttaaagtttattcaaaatgattatggaaaagcaaaaattattgaaaaaatttttaaatgaaatattttctgataatttaaatgcattttaagattatgaggacaaccagcagctgatttcccattatgagaatgttctgctgaacgacgacaggaacgaatttatccgaatggaaggcaaaatgaaagccgaaatttgcttatttatcagttggattaacggtcaatttttgctcacaaaatcattttcggcaaaagttttggaaaatgtgcaaatttatttaccattaagcgtaaaaatgttggatagtttttacgaccgattgtttgatcatcagcaaattgaagaattagaacaggacgagcaggagttggtggatctgatcatggcgatcagaagtcaaatagagcaaattgtggtgggccatcagccgatgaaaagcgaaacggaactgatcaaagagtggcgaagacggaactttgccggagtgaagcgcagcaaaaagccgcaacaaattgcgaaggcaaagcattgtgccgaatatggggcatggatgaggcaaatgcatggccaaacactgatcaaactgatcaaaacggacgagcaatttgcgcagaaactgaaaaacg

SEQ ID NO: 52140 - DNA, 1410 bp, Heterodera glycines
atgccaaaaactgaaaaggacgacggattgggtcggcacgaaatgtgcgaagaacgaaaagccattggccgagtggcgtcggcaaacagtgcgtcggagggggaatatgcggacgcggtggacgacgaccccgacttttttaagtacgacaaacggagaaataaccgaagggaaaggggccgaatcggacaaatttgaattcagccgaaaagcgaaagcccaccttttagggcggggaaaaagaggagaatgctgaaaaagttggctaattttcttaaaaaatttactatataaattcttagtttttccctgcggcgcctttcggcaccgccggacccaaaaatccaacaaaatattaaattccaaaattagcatggcgaatctactcagaatagaggtagagtctacaaaattccctggcggtgccataagctttattttttttaacaaaatggcgcaaaaccgaaaaaattggttattttttgacaaaatctgttaataaatttcattttaattttcaaaatttttcccagcggcgcttaacgacgccccaacgtatgatgctcatattggaagcaataaaacttgtgttaatttaatctaataaattgaaatacttggattttccgcggtaattgcccaatgtaccccctttttgaaaaaaccctaaaattgtctgtgaaattttcagggttttccagggtcactgatcaaaaacgagtatacatttcgctcaacttatcatcctgggccccaaattgaacctaaaaggggaaagcctagctgaacactttaaaatttggtcattttacttccaatcaatcgatcgtcggttttccccaattccgcttcttaatgccatcatccgatccgatcaattttcaaattttcatagccaaactctcaaaacccttttcagcacttttattttatcacagaatgagcagcaaaacgaatgggactaaagtgtgttctgcggttgcggactcaaaatttgtgagattatttttgattacgaatttggcacttcccccccccccgccatatttttattacgaatcttctctcctttcccctcccactttcaatcatcatttttttcatttacctataccccttttatctaaagttttttaattttcgcaatttctcaattcctcccttttttctagagtagagcgggaccgggaattttgtgcaaaaccgggacttgccgggacctgagaagtcgggaccgggacctcgatttttgttcgggaccgggaaccgggaccaaccgggaatttttaaaaattcaaaaaattaaaaaaaaatcaaattttaatttatttcaagtgaaaatattaaataattaaatttttattttggtttttattttataaaatccaaaagttaaagctatttaaatta

SEQ ID NO: 52141 - DNA, 801 bp, Heterodera glycines
atggacaagaaaataaacaaaatatacaccgacccggccaatccgggcgggtatgcgggtgcgagtgccctgtacgcggcggtgaagaagaagcacccgaagttgaagcgtaccgagtttgaagactttttgaagaggaacaccacctacacgctgttcaagccaaagagggagaagttccgacgcctacgcactgtgcctacgggtttcatgaccggtaagttgtactggggcttatttcgcacaattcagggttcagatgttcaggcggacttggcagatttccaggcactttcgcgcaagaacagcggctaccggtacctgctgttggcggtggatgttctatcgaggcgaatgttcggcgcgcccgtaaagagtaagcgcccagtggacatgaaaagggcttttgaagagctatttgagcaaatgccaagggtgccagacacaatgtacaccgatcgagggctggagtttgtggcaaaaccgttgaaggagttttacgcggagaagggcattcaaaagtttgagaccagttcaaagaaaaaggccgccgtggcggagcgtgccatccgcaccctaaagactcggctgtacaaatatttttccgccaacaatacgtcggtgtgggtggatgtactgccaaagtttttgagtgccatcaacaactcggtgtcccgcgcgaccggacttagaccccaacgaaatcagcgacaccaatgcgagggaggtctgggaagaggggtgtacggcgaagggctcgcacaattggaacagacaccaaaaatcaaagcaggggaaacg

SEQ ID NO: 52142 - DNA, 552 bp, Heterodera glycines
cttttgtggatgaaattgtcggcactgcgttgctcctcttttttgtcaatgcgctgatcgatccgcgaaatcaagtgccaaaatgggtgcatccgatcggctttgggctggcaatctttctgatcacttcctcctttggcatggtgcgtttgactttggcacgatcattctctcactcatccattggcattttccgcttgacagaatgtcggctctccgatcaatccggcacgtgactttggtcctcggctctttcttctatttgccggctacggatgggaagctattgcgtccgttgttgtttatcccttattaaataatgccaaatgcttcctttctccatttttttttggcattttcaggtggcactcttattacttttggattcccatcattgccccatttgttggcgctctgatcggcacttggctttaccaatgtatgattggccttcatgtgccggacgatgaagctgcacagtcggtgccaacaaaaacaggcgaaaagtcaaatgattttgagtttgatccgctgaatgggccctctgactga

SEQ ID NO: 52143 - DNA, 1223 bp, Heterodera glycines
atgatgccgacgagggtattcaccgaccaccgcgctttgataccgatgtttaaaagtaaaaaagagactgggaatagccgcgtggataaatggctaatggaaatgaatgctaaatttctgttacaagttgagtaccatccggggaagaaaaatgttattgccgacgttttgtcgcgttcccaggcattaaaatgtccagaagcaccgaaggaatcggacaaaatcgtcgctttccaaatccgacaaaatgaggatggtcaaaaacagcacggaatcgagaaccatcgcgaatgggcgaccaaaacgagagaaagcgaactcggctttttgtacgaatttttgacagaaaaaacgctgccaattgagcctaaagatcgccaaaaactcatgtctatccttaacaatttcactgttttggacgacctcctctataagtgtgaaaaagatggtaaaagtcgtcttttcgtcccgtccgtataccgcgaaaaactgatcaacgagcgacactcaggaatttgttcaggccatatgagcgggaagaaaatttttctccaattggctgagaaatatttttggcctaacatgtattccgactgtgttagagcagctcttcgatgccgaatttgtgctcacacccgaaatccgaggtctaacgagccaccaatgaaaattgttgcaacatccgaaccatttgaattggtttgcctcgacattttgtctatcggacccgcgcattcgtcatgcaaatacatattagtcgcggttgaccacttttcaaaatacctggtagcaacaccaatcccaaacaaaaacgcagacacaattgcacgcgaatttgtaaaaaattttgtcttaatttttgggacaccaaagaagattcacagtgatcgcggaaaagagtttgtgaatgaaactcttaacgaaattaccaaaattctgcaaatggaaaagaccctcacttcgggatatgacccacaagcgaacggcgtaactgaaagagtgaatcagacgattttgggaatgctaaaacggtcaactgcgtcaaattgggagtgggatgaccgtcttccatttgttgtgttttcatacaatacaactccgtcagaaacgaccaacatttccccataccatcttttgtttggaaaaccggcaaattttccttcaaacatttccttaccagttaatccgttgtacacaattgatgtgaatggatacattcaaag

SEQ ID NO: 52144 - DNA, 2148 bp, Heterodera glycines
cctctctcttcctctgtttctctctccctcttctcctctcttaaggtctctctcgccctcgctctctctctctctttttctctttctctctctcgtactccgcactctcaggccgctttcccttcccttacactctctctgacttattccctttctgtggctcagaatcgcacattttggccaatgctcaggagcaaattcagcacttggaattttcgctgggcaccggcggtaaaggaatggagagggaattggccagccatcggttggacgacaatgtcgccacggaactgaaacttgtgctggccgccggcctctacccgcagttcggcgtcgtggacccgaccaacaatttccgagtgcgacgagtagcgaatggttacccaatagggcgtacggcccattggaacagtttctgctcatcaaaatgcaaaaaaatttgcccttccggtttccctaattccatgaatctgtctattgtattgatggctttttccaatccctgaaatttagggagtaccccccccccatttctcacttttcccattctttaggagggtcacgaccaattcgcgcacacgccctccaagccgttcggggggctgcacccgaacagtgcgcttggccaacggcccgaagtgctgcgatcggacgatttggactcggagggccattccgcgcagcaccaactcatctactttggccttctgttggagacgacgaagccgtacttgtgcaattcgtgccgcatccccgcctcctttttgttggtcatcgccagaaatgtgcgaccgttttcccgttgtttataaaatgccatgctttttcgggattttctctcctaatcaaaaagaggaaagggggagggacggcgtttgggtccttcgttatgcttttcttccaatttcgtctgatcaatgcttttcttgctcatctgtcagatcacttgcgtctctccgtctgtgctctgttgcgacggttttgtcgagtttcactttgtgaaggcgcgccattgcgacgattcgctggcattcgcctgtcgcgtgcgttcgctgtttctgcagtcgcttgagcataaattgcgcagcgacgactacggcgactgtcgcgagttggagcggctgatcatcaaattcgcacgcctccaacatcccttcaggcattgttttagatcaacaaagacagagagatggagagagagcgagggaaaaatatataaagcaagagaatggtgagagagcgagggacagagagagagaggagagatagagagagagtaacaaaaatatttctcacccttttaacacagtatccgaagacgaatagacccacccaggagcatggagtacggtgtgttcaccgccgatggaatgccgcacccgctctccgcctccgttgtgccgaccgccgatggccatggcattttggacgctgtggcggaagacgaagaagtaaacaattggaattgcttggacgcaacggagggagaatgctaattataatccaatttaaaaaggacagcggaattggacgaacaattggacaggcgaaaggcggaggaggaggagcagcagcgggcgaagggacgcgagtatttttgcgacatttgcggacggacactttggtttgcggacaatgtgcaggcgatcaaacacaaaaagggacaccagcaaaaggaggaggagaagccgaagcaggacgaagacggagaaagaacagatggatgaccaatagacacaccgtttcaaaaaacgagagatgaaccaataaatagggagtgcacagaaaaaaaaacattcttattttggcgtactatttctttgtctctgataatagagaaaaatcgaattaacaccgatagagaaaaaaattctgcatcgatttctatgtttgatttctttagaagcttctcctcatcaagagctttcgaatgataccaagtttatacactttggttgtcaaaaaacattcaaaaataatttccgaaaatcgtacttttttcattttttggacaaaagtaaataaaaagtattcatgttgaacaacggactcgaacctccaccctttgtccctttactatcttacaaaaccacctccacacatgcaaatctttttggaactggaaggccaaaattgaaacggtgtgta

SEQ ID NO: 52145 - DNA, 1020 bp, Heterodera glycines
atgacacatgtgtttttcgatcccgagtcggtcgattggtcatcttttttcacttcacaacatgggaggggacagaaacaatactttgtcggaagcaagtatcaacggggattcggtttactcggtaatgtggcacgtttcttgacccatattgcgaggaatattgcctcgagtgcaggacaggaggggctcgccgctgggcagagagttctgagtgacatcgcccagggtcgtaatttaagggatgccgtcagggaacattcaagacaggggtttactaaccttaccgataagttacaacaatgtggtaaaggaaaaaggtctctgatcactaataagaaccggaaacaagtatatgatcagttaagtttgatctaaaggtataaatggaataaataatacaaaaagttaaaaatgacaactctcaagaaagtcgacacggcgagtgaggacggtctcgaggggggcctttcccttttcgacatccctccgacgaacgttgcaattaataaatccagtattcgggaattgctgccactttcagcaataaatcaatctggaccgtatatctttagacttttttcagataatcagttttgtgacctcaataaaacttttctctatttgtcaacatcaatagagagaaaagacaaaagcaattggattccaattaccacggacagtgaagctgatcaacacgtcggtgtcattcaaaattttgggcacagctttgtcaaaacattaaaggtgtcaatttccggtgtcgaatcttatgattccggtatttactatgcggttagggcatatatgatgactgaattgggattttcagaagatgtcaaaaagggtctatgtgaagcgtcctgctattacgtcgatgatgtcgaccagaatgattatacaaacagtggctttaaaaacagagcgtcacgttttgctgatggtgcaaaatgtgaaacaatgatgaaacttaattttgatctcgcccgtcagcccaatctattgcttaataactcggat

SEQ ID NO: 52146 - DNA, 809 bp, Heterodera glycines
aaaagcagagaacatacacgattcacaagcccatcaggaaaaaattcccgagactaaagacggtaccgagcggcttccataccgattggcagtgcgatttgtgcatatttgaccagttgaaaaagcataacgacggttacaaatatctgttggtatgcatcgacgtgctgagtcgaatgatcttcagtgcaccggccaagtcaaagaagagtgaggacatgattgaggcttttgatcgggtgttcgaaaagtcgaaaattatcccgatgaaaatatatagcgacagcggactcgagtttcaggctggaaaaatgaaaaaatattttgaggaaaaatttattatcaaaaatgtgatgtatagtcctgaccttcacgccggagtcgttgaaagggcaaatcggacaataaaggagcgcttgtacagatattttacaaagatggacactctacgatgggtcgatgtaatagacaaaataataataaacattaacaacagtgtgaataggacattgggggccaagccagtatccgtaacttttgaaaatgcccggccgctctgggaaaaattatataaggcgaaggaatttaaaatttcgaaaaagaacaaatttaaaattggcgatatcgttcgaattaccaaggaaaaaggaaaatttgcaaaggggtatctcccaaactttaccgaagaattatttaaaatcgttattgttaatccaacgacacccgattcatacaggatcgaagatttggaaggaaatttaataaaaggcatattttataaccaggaattagtgaaaacagatggatga

SEQ ID NO: 52147 - DNA, 1260 bp, Heterodera glycines
atgggcgttcgctcttgccgttttaatgtcccgaccatagagactctgggttacaaaaattacgcttacgttccaattatgggagcccctggtaaagagtagatcgaggaaagtattctgcatattaagcattaaatcgtcaagtattaacaaaagggggttttcctgttctttaatcttattcatgtccggaatcccgttaaaagtctcaacgccctccccgattaatcctaaaatactatcattcatctcaccataacaataaagaattttttcagccgatggttcaattagattcttatgatgttttaaaaaccgtaatagccaacgggtcttaccactcccagtagcccccgagagaattagagtgaacggacgtgaaacatttttaatgcatcttatttatttgactatttatattttcatagggaacatgtttcgcacatttggggcataaccagaaattatcaaaaaatgatgtaccgaaatgcaaaagactgtgttttttacatctgttacacatctcgtaatgacaggggcagtaatgacaacacttaattttatgtggacagttcatttttcaatttaattttatttttggttgctatttatagaaggggtatataaagggagtgaaaggaccatttgattggtacattgtatcaaaaatgcaaaaaccgataatcgtaaatataattgctctcgctaatgagtactccgggattatttctctaaaatttttctttaacaaaaacgacaattattgggtattttatttatatcactttttagccctttctttcttctatcgaatgcattttgtttcagaaaaaaatatttgtctttttaacaaagacattgttgttaaatataggtgccaaagtggggaaaagcacattttttgacccccatgttacaattggtcaaaattggcacttcaagtttaaaatgtgtaaaaccgaacggactaattacgaactgttaatttgaaatagtgaaagtaaattttgttcatgattaagcatatcttcaaaatatttttttatatctaaaattaagagaaacgttctgatgagtccaaattttgcattgcatttaaaacaaaaatttttataaatattttttcccgaaattgtccgcaaatgtctggacgcgggcggaggagaagaaaaaaaaacatttttatactaaaatattagcgtagcaattaacgacggcttctgacagcaacaaaacaacaaagcagatcctgtgatttta

SEQ ID NO: 52148 - DNA, 3937 bp, Heterodera glycines
atgacacatgtgtttttcgatcccgagtcggtcgattggtcatcttttatcactccccaacatggaagaggacagaaacaatattttgtcggaagcaagtatcaacggggattcgggttccttggtaatgtggcacgtttcttgacccctattgcgaggaatattgcctcgagtgcaggacatgaggggctcgccgctgggcagagagttctgagtgacatcgcccatggtcgtgatttaagggatgccgtcagggaacattcaagacaggggttgactaaccttaccgacaagttacaacaatgtgggaaaggaaaaaggtctctgatcactaataagaaccggaaacaagtatatgatcagttaagtttcatctaaaggtataaatggaataaataatacaaaaaagttaaaaatgacaactctcaagaaaatcgacacggcgagtgaggacggtctcgaggggggcctttcacttttcgacatccctccgacgaacgttgcaattaataaatccagtattcgggaattgctgccactttcagcaataaatcaatctggaccgtatatctttagacatttttcagataatcagttttgtgatctcaataaaacttttctttatttgtcaacttcaattgagagaaaagacaaaagcaattggattccgattaccacggacagtgaagctgatcaacacgtcggtgtcattcaaaattttgggcacagctttgtcaaaacattaaaggtgtcaatttccggtgtcgaatcttatgattccggtatttactatgcggttagggcatatatgatgactgaattgggattttcagaagatgtcaaaaagggtctatgtgaagcgtcctgctaaaacgtcgatgatgtcgactttttcagaatgattatacatacagtggttttagtatttgtctaatcgtgaagtaatagcttataaaaagtttctaaatacattaagctttcgaatgatatcaaaaatgttggatttggatgacatagaaaaaagttatagaaacttatagtggaaaaacatgctggcgcccaatttttaaaatttagcctcattgtcctatcaaaaaaccacaaaatgaggctaaagcctcagatctggcacctctggttttgtaccagtagcaggggctaggacagagataggaccaaaaaaattgatgcgaagaacggtagagattgctgtttattaaaatcacaggatctgctttgttgttttgttgctgtcagaagccgtcgttaattgctacgctaatattttagtataaaaatgtttttttttcttctcctccgcccgcgtccagacatttgcggacaatttcgggaaaaaatatttataaaaatttttgttttaaatgcaatgcaaaatttggactcatcagaacgtttctcttaattttagatataaaaaaatattttgaagatatgcttaatcatgaacaaaatttactttcactatttcaaattaacagttcgtaattagtccgttcggttttacacattttaaacttgaagtgccaattttgaccaattgtaacatgggggtcaaaaaatgtgcttttccccactttggcacctatatttaacaacaatgtctttgttaaaaagacaaatatttttttctgaaacaaaatgcattcgatagaagaaagaaagggctaaaaagtgatataaataaaatacccaataattgtcgtttttgttaaagaaaaattttagagaaataatcccggagtactcatttttatcaatttggaggtccatattcaaaaatcaatagctgcacgaaatcccgatttccaatatcagattcctgtaatttttgtgccatggaatttcggttttcctttccgaaaattttttaaggaacagcatctcactttggccagttaaattaattctttaaagtgtaaaaataaaatatgatacctttaaaagccaaaaataaatttttatttagttttgcagtcgccattccatgttttgagatttttttaaaaattttttaagaatatatttttttccccgaaattgtccgcaaatgtccgtccgcaaatgtctgtcacatttctggtaattttgttgctgcaaatgtcttcaagaatttctaaaatgaattagaaaatttgatatatgtagggctgggatttttaggtttttacctatttttttgcggcttaattatgacgagataagcccaaaaatagcattttcttcgaaaatttttgatttagagcgacttataaaaacctaaaaacacctaaaacgagggtttcgagtgaatagcacctattttggcatttttcgagttttagcacctattttggcctttttccagaaatttcatagcaaaaatgcaataaaaacgaaaaatgcaccccaagaatcgatctaaaaaatttcaaaaaacataaatatacttggtttttccaatttttaatacctattttcgcacctattttggcctttttgggggtttttagcacctattttgcacttttttagcacctattttagtacctttttaggattttagccagggttcgcagatgaaaattttttcatttaaaaaaattcataattttgtggattttcgaaaaaattgtaattttctggctaaatttgggtgagatttccgtttgatactctattaaaaaccaaaattcaaattaaataattgacaaacattatgccaatttatcaaaatttaaaagattctgaggattttccccaaaagcctcaaaaatcctcaaaatttctcaaaaagccacaaaaatcctcaaatcctcattttccaaaaaaatcctcattgacctatcaaaaagccacaaaatgaggataaatcctcagatctgcgaaccctgtttttagcacctaaaaatcccagccctagatatatgtaaaagatacacataataattaaaacagaaaaaagttttgaataaaacacattttacgtctctacactttttgttgtcgctcgatttgcttattgtttaggaaagaattttcaaaacaattatctatttattctgattgtgtcaccaattacctaattgtaaaacggcaaagcgtcctaattgcagcaaaaaatgaatagacggtaaggaaattttgataaatttcaaaattttccattttttcctaatttttccatgtttttaagttggatgtgcggcgacatttggatgaatattctgcccttctttgactatgctaaactcggcctcaaaatagcattgctttctgacttttacgatgttttggtggacatgcattttgatggcaaaaaggaagttacgctttggcgatgtatcaaaattggcaaggacgaaggaccaaagcacaaactgtctgtacagcagatcgatggcacatttgtggaatttccgataccagaccatccgtttcccaacaaaattcgttttcgtttccttctgattgagtaatttttaactttgtgtattttaaggcttgtgtattttaataaatttcttcaggtacattgaccattccgtcattacatttctccgttcgaacaagcaaatttgggacagaattggcaccaaattggagttcaatatgaagaatatatacaattcatcatgtttttgccattgaaatttggccaatttttgctaccaacattcgccacttgtgctttgaggatggcgatcatttgaacaaattgcgttatcacacttcgccgacacttctcaccgatcttgatcaattgaattcaatcgattctggttatctattccccgatgaaaatgctccgaattcaactgctggtcaagcgttggccaaatggttgcgaactccgacaaaaaatggtcaaccgaaggaattgcgttgctcgcattttgcttttatgaaaataaacaattggttccacaatcacaagcag

SEQ ID NO: 52149 - DNA, 640 bp, Heterodera glycines
tttttggttgctatttatagaaggggtatataaagggagtgaaaggaccatttgattggtacattgtatcaaaaatgcaaaaaccgataatcgtaaatataattgctctcgctaatctcggtaccggaattaaactaaactctctgacgatcaccgaatgcgaatttaagtataaccctagaaaattcaatgccgcggttatcaaatgtataagccccatcaaagccacggcattattatgggaatccgggaaaatgatatgtttggggacgaaaagtctgatagactgtgaaaatgctattaaaaaatttatagaaataattaagggctcggggtgtccggggcttcttacaccggacacacggttgaaaatattgtttcgacctttaaattcggacgtgaaattgaactgaacgagtttcgaaaaaatcgtcgtgcattttatgaaccagaaatattttgcggtttaaatttcaagcggggtaaaagcatgacagcgttaattttctggaccggtaaagtcgtaattacgggaactaaaaacaattctgaaatagaggaaatgtatcatcatattctcccctatttgaaaatggctcaaaagaagttagggagacgataaaaatttttcatttattgg

SEQ ID NO: 52150 - DNA, 3991 bp, Heterodera glycines
atgagcaatcgatcaaacaatgaacctagcccaccgaagcgccgaagaatgccaaacatcctcaaaagtggaagcaacaacaacaacaacaacaacaatggcaaaagacgcaattttcggcactatgtacgcgcgctgaacaccgacgtagcgttcaacaaaaaattcagactaatgaatgctaaaagtacattcatgatccagactctaccatcaaatcctgagtcgcttttgcgagtcatttttggacattgcatacaatcgtcattagatgaagctcagagacgtggaattgaaccgagtcgacttggggcaacaattacttcacagttattggaccctgacatttggattccgatccgtcagataactccaaacacagtggacacaattttgaatcgcttcttagatgtggcacaatcaaagtcgcgggaaggttcactgtggggtgcacccttcagtgtaatagtaaccactctggacactgtcaatctaccgcagcgggacacaattactggtcgcggatccgaacaccgaacgctaaaaggagcgcatcacatcataaaagagaaaaatctgctgaggattcgtaataataataattcctattgcctattctacgcgttggagatcagcagaatctatcactgcatggtgatgccaaaacaaactttcagtaattatattaacaaaatgcattcacaacaacaacaagacgctgagcgcctaatgctcgatgcaggaattccactaaaccaagaaaggtatgacgccgaagtgtgggtaccacgtgtagtggaccattggaacgcagtatacccggagctaaaatttaaagtattcatcttcggcacaacgggtcagtacagacctaaatataaatatggaccagaagaattcctgacaccaatatcgctctattacaacaacgatcattttgatggcatccgttgtggagttggaacagcaatttttggtcgcgactactactgctttgcatgcgaattgccctttaaaaatgcggacactcacaaaagttcatgcattctgaattgtaaggaatgtggtcgaattggtgcggggcggccatgcagggatgatggatttaagtgtgagtgcgtgggatgtgacaaaacattcatgaacgttgactgttaccatcatcacttgtcgagcaacttttgccacaaatcgcataaatgtaaaaaatgtggggtgatatggaacgtgagaaataacaaagggaagggacgagctgggcatgtgtgcgacgagcgcttttgcagaacatgtggtgcctttcataaccgtgaacgtggatgctttattcggcaactcaaaccgcggcgccctaaaacttatcgattggtagtatacgattgtgagacaacgcagaattgtcatgtaatcggtgcgccagaggctcagcaacggcgggtacacatagtgaactttgtgtccgcattcgttacttgtacaaaatgcattcaaattggcgcatggcgcaactccctgctgaatgtagttccctcgtgtgaaatatgtggcccatatcgcaccctaactttctctcatcgacccttcacaggaacagaagtggattttcaacatgtatgcgatgatcctatgtcggcgttcactgactggttgctcttaggatcgcataacaacagaaacaacaacaccatcaataacaacaatgaaagcaacagtaaaataaaaccacacattaaatatcctattaatgtattcgcacattttggtggtcggttcgacaatgtgattctgttccgacaatttttcaacaggggactgtgtccgaaaatgatcagacggggtaataaactttatgagatgaaggtgctgcgcgctaaagacaatccggagattaaagtgcgcgacagttggaacctaatgcctgttccgttaggagcgcttcccggtgcatttggactcagagtgcaggacaaagaatttttccctcatttggccaatgtggaagacaactatgacagagtgctgccctcgctaccgcctcgggaacagtacctatatggaggaatgattccggagcgacagcgacgattcgatgagtggtacgcagcgcaccagcacgaacctttcaatttgtgcgagcaattggcatcatactgtgtaaatgacagtcgcatacttattgaggcgctagtcgccttcagaaccgaatttttgatggtcacgaacccggatgaacaacaccgtctgacggaggatgaaggagaggtagaggaggaggaagaggaagacgctggaggaattgagcttggagatgacggaaacggagggatcgacatcacttgggacgcgctgaccattgcgagcgcatcaatgaaacacttccgcctcaatcatttacggagtgatcagctcgcaatcgtcccagagagcggatatgacacggcaaacaatcagagcttgctcgcgctcaaattcatggaatggtacgcagaggagaatgggctgcaaattcagaccgcccattcctcgggcggagagcaccgcattggccgctatacagtggacggttatatacatgagacggatagcgtaattgaggtgaacgggtgctgctggcatgcgcatgaccaccaacgacaccgatttaaagctgacactgtaatgccgagcggaaagacagctgctagaattcgggaggacgatgcgcgaagaatggctttcattcgctcacaaattcgtggaactgttagtatattctgggaatgtgatattgaggaacggctaagacgggaacccgacatgcggcaggcgttctcttcctatcgaaacagcggacctattaatctaagggattgctatcatggtggtcgagttggtccgcaacgccttcactatcaggtcccggaagggtggcgtatgcgatactttgacgtccgttcactttatccgtacactaatgccataacggaatacccgactggtcacccccgctgtgtggacatcatggagggtgcgaaccgcgcagtggactggcgacatccagaacagattccggttcgcggtattctaaaggtatttgtggtaccaccacgacaagtggatgtgccagttctaccggttaaatttgatcagcgtttgctgttcccactttgcggaacatgcgcacgccttcatccagagggaggcgtctccgcttcttatcgatgcacgcacagcgatgagcagcgcggttgggtttctacggttacatcgatcgaactggcagaggcattacgcaatgggtaccgctgcaccgcctattatcgatccatagaatggacacaggaacaatggagtgagcgtgtttttcgcggttacgttgcagaatttatgacaatgaaaacacatgctagcgggtttccggaagaggtgggaaatggggaggaggaacgcgaaaaattcatcacagagtgtgaggagcgctttggtatggtcattgacccggcgcgcatgcaacacaataaggcgaagcggactatagccaagctatgcaacaattccctttggggacggttctcactacgtaacggtctatcaaagactgtggttactgattcgccatcagaactacgtgcgtacctcgacaatcctcagctggaagttagctctgtggacccattaaatgaacagtgtgtgctgattacatacaccgctaaaaaggaatggaccgatgagcacgattgctccaacattgttctctccttatggacaacatcggcagcacgcctccatcttctaaaattgatgcaacgagttgtgcgtgcagaaaacacagagctgatatacacagacacggacagtgtctgttttgcccatcgggaagaggacgggtgtccgctggatattggaccccaccttggagacttgtcagatgaatggccggataatgagctgctcgaattcgtgtcaggggggtgtaaacaatatgcactgagaatgcgccaccgtcaaactg

SEQ ID NO: 52151 - DNA, 1454 bp, Heterodera glycines
atgccggacccggtgcaaaatgggatggccaacagacagcagcaatacagtaagagttttgggaaattttcaaaacttacagtaagaaaattgggaaatttattttgccaaaaattttcatgctcaacttttttttttgaatgttttaaaactctcttctattcatttttgttttattcactatttaaattatatgccaaaacattttcacaattttatgtgattttgctgagttttgagtcatttcagatgcataggaaattatattgaattaaataaaaaatatttttgtttttatttatttgtttattttataatttttcagagtctaagcccattcggtcggcgcgtggaggtcttgcatcggtgcaacaaagttttgacaaaagtgcatcgccaaatggtcgacaacaaactgggccattgggagcaattcagttagcggtaagtaaaaagattatggcacaaaattggtagttttttataatgtcatcgcttaaggtgcataaatttcgggctaagtgggcgggggaggatttttggataattgggttcgggctaactgatttttttattccaatttgttaatagatttacaccgaagagcaccaattttatgggttcatagagtatcttactttaaaaattaacgaaatttgaggcctgatattgcttgaatgaaaagcagaagaaggaaataagcctcgcagacgctttaaaatttgtaaaataatttgcatctaaaatatttgtttggtttgaagttagtcttcgcttaaattttgcttaattaaaacaaattgggttttgtttaagccccataaacaacggcgccttccgccggtgccgtccgctgcgccgcaacagcaagcagtgattgtgccgcaacaacaacagcataacaacaataacagcaacatcatgcatatcatcatccacgagtacagctcggccgactgtgtgcttcgtccgggcgaccgtgtggtggtggtggacaacggtgacccggactggaagcatggcttcaaggtggggaattgtcgggtgctggtccaatcgaagggccccgtttttggataaatttcattcaaacatttttttagaaaaaacaggagagttaaaagcagaaaataccaattgcttccactcctctcgtaaaaaataattgtcaatttttggaaatattcattaagataaaccaaattattaaaattaattaaaattctaacaaacaaaatccactaaaataattgaaactttttatagaaatgaatgttatttaattaaagaaattaagtaagaatttttttaaatttcagtttaatgattgtctggagcatttgctgacattcccgagcagttgtgtggctgcctatcacatggaggaacagccgatgaaactgttgcaaagctgcaatttggtggagcaaaaaattcgtctctacagggaccag

SEQ ID NO: 52152 - DNA, 1996 bp, Heterodera glycines
atggctgatgactctaacaacaactacttctttgttgtattgcctagcaatgttactgattacgtggacaacaccacgtcaaaatatcgtgtgcacctaccgaaaccagttcaattccgtggctcatgggtctgtggactgtactcaatacagtaccctcactcatgggcttctacaatcggaactgtggaggatcaatggattgacattcattacattgatggaagattgctacgtcttcatctaccaaaatcatcacaacagaacacagaaggactacagcgccatttgaacggtacactaacgaccgctctaagccgcaaaagcactgaagatggtcaaactccttccattaaacggtccaaaagaagcgtggatcaaggaaaacagcaatcacgcgaagagacggaaaaagaaagcaaaactggtactatggagataaatgatgaaggcgaaagagtaccacaagataaccgtggagtagagtataaagattgggaagctgaccaaatgcaagcggattacaccaattgcacctgaggaagaacagaatcaagagagtagcagtaaggacctacataaagatgacgattcatctaatgatgaaggtgaaagagtgcatcaagacaataatgcggtagagtgccgtaagataggaaggctgaccaagtgtaagcgcataaagccgattgttacggaaaacgataataaaaatgatggcaaagatggagaagcagtcatagatacaaaaacatcagcatctgatacaacattgaaaaattcagaaataacacccccatcaaacccctcagcacaacgacaacaacaacacgatgaacctcgagcccaagctcttacacgtggcgaacagctggggcagcgattaagaaaaactgaaaatgaagttcaatctcaacaaaaatcaccagtaaacgaatcattggaagctcagactcagttcagtgatgctaaggaccaatcgaaaacgcacgcagatgtgttaaaagaccgtctttctacaatacacggagatgtaagcatacaagccccactgcaaaaatcctcctcaaacgatggtcaaacatcaatagaacccacaataaggccaaaggagcaaagtgacagagaaccacagtccgcaaggacgcatggagagcagcttcgttcacgtgtggaagtggtacaagatgaaagaatgcaaaacgaaaggcagctgcatgaagcgaagacccacggggatttgctacgtgaggaattaaagaagatacgtcaggaaggcgagaaaagagaacaagagctaagtgtgaccaaaacgaaaggggatacgctgagggctcagatagaaaaaatacgcgaggaaagcgggcaaaaggacaagcaactaaaggtagagaagacacacggggatgcattggccaagttattggaagaaagtcgaaaaaaaatggaagagacggagaaacgattgacagaggcgaggacacatggaaaagtgctgaccgatagaataaaagaaatacaaaatgagcgtacagcgctgtccgctcctgctgacgtccactttaactataggactgacattgatcgtttccatctgatgatctccgacccggaaatcgactatttgagcatgagctcacagattgcctatgtgctagggtttccgaacaaggaacgcgtggtgcagggcgagaccgcgaaatatggggtggacctacgtgggggttttactagctttgccgtttatgccacgggacttacacgcagtgtgattttggggaattcgctaagctcgctcctccgcattgtatctaccgagggcgagtatggacaggtggtggagcgtatttatgataatccgatgttcatccctgtacacccaagagagatcaacgaacttcaagtcgaattacgtatgatgaatggacaactggttcaattcgattatggtaccgtacttgtgacgcttgtatttaaaaaagtgatcaacttttga

SEQ ID NO: 52153 - DNA, 2865 bp, Heterodera glycines
atgtcaggcgagggatctgacttcaacccagcttttttcacggtggaggaaaatgctcaataccaaaccattctcgagcgtttgcgttcttttgaagctgcagtttgcagccaatttcgaaagcttgaaagttctctgaatggaagtgaacgagccacaaaggaccaattgagccgtctcgagtcatcgctacaaaatttggacgagaatgaagagatggatgaattcgagactaaggagaaaattttcaaattggaagagaaactggaggagacacataacaaatttgaagttcttaaagctaatgtgtctgaaaacttaaaggaatgttttgagaaaattgatactcaggtaaaggaatcgaaatgtttagttgacttgataaatgagaaaattgagtcggtggagaaggaaatgaaattttcgattgacgttgtggaaaccagagtggaattccttgagctcgaaaaaatgggcgattcgtcacttgatgaatattggcaggacaacgggcaccatgacctacaaaaacaatttgcgcagggcaataattcgtcagaaaatggagagaaaagagatgcagacaatggaagggagagtcatgaaattggaaatgatgaaaataaggacgaaaataatgaggggcaggaaaaggaaaaaacactaatgggcgaaacggaggacttggaagtaatgatggctgaccctttcttaatgaatgtaattcccccgggtgtatatgacggaaacccaagttcgtctttttctcgatggtccgaaagattcatggaccttctttcgctttatccccagctcacggaagagcaaaaacttagccgtttacggataagtctttcaggacaggcaaggggggaaatggagggtatgagcccagccccaaccacgctccaggatgcatttaattttttaaaaaataaattcgagaatgaaaatacgaaatcaatcgctcgccaaacactgtcaatttgtaagcaggcgccaggggaaaaagtctatgaattcgctaatcggttaagcgaagcacttcgaaccgcaatggcgggagaaaacgagggaacgattaaaaagagacttttggaggaatttatggagcgtttgacccctgacctacaatttgaggtaaaggcaggccgaccctcaaattactcaaacgcctacgaaatggcacagcattttgaattgctgttggcatcgagaaaacagagccaagtctctgttgcagaactctcttcaagggttgaggcattaactattcagacgcaaaggaacataggaaaaagagccgacgagaggcgtgtctgttattactgcaatcgcccagggcacattgtgagggattgccgagtaaggaaagaaggaagacaaagtggaaaccgacaaagttattataggggggacagggcggctgagggaacatggagaagagattatagaaatgaaccaagcgaaagcaacagatggggtaggcaaaaccatcgcgacgaaaattgggaaaggcctaattggagaaacgatcgctcaccggaaaggcctaattggagatacggtcgctcaccggaaaggcctaattggagatacgatcgctcaccaaccccggatcagagaaagccgtggacaggcagaaattaccaaagaaaaccacatcgaagtccatcaagtgatggagatgaatccaatcgctcccattccccagggaagcgggtgcatttcaagaggggaaaagttgcagctgtccgagtagccagtccactatttttggccataattgccttccttgctctatttggaagcaacggagcatccgaagtgaaggcaaagcccatgatatgcctcccggatgctcccaccagtatttggtcattgcctgtcgaccctatctgccctaattgggttccaacgcaggtccccgttccttttgcattaaatatatatcgaccaaacactgtacaatacaaaaccgaagctacagcctgcagctgcattttaacgcgcatttcaaggaggagaggattttttggtggaacatatgaagaaataagtgcctttcattcggtagtgcctacggcaatttgcaggaaaatggcagttgataaggactctccagcaggcgaattatacgttaatgacgaaacgctaatggcaacaaataattccctagaaattgggtggggaaaatggccatcaaatttgttttggagaacggaagaaatcgataattattatgtgtataagacaattgtttttacacgtcatggaatggagggattgaatacaccaatcggagagtgctctaattgcttttataaatcaggcgaatgtcaatgcgtaaaaattagtctgatttggacccccgacaagacccaactttgctcttttgtttggttgtcaaaatggtctggtgaatatgcaagtctaatatggacgacggaaagtggtgattttgcattgagttttgaaaacacctcgtctcatagtcagcccgggtgctatgccgagtcgggccaactaattgtgtcggaccaagcgtttgccgtacctgtttcggacttccaagaaatggtcgagaaagccaaaggaagcggcaccaggaaaacgagagaaacaaccgaaattggtcctgtttatagttctcagcttgctgcacagcttacagccttaagcacaaaaatggccataacgactcagcggctatttacggagacaattcgtaaaatttgcacgagcatgcaaataatggcagaccaagctttaaccttgtctatagcaaacccatcgttattagcgaggtttttcctgggaaatccttttttatcggctcgattgatcacggaaaaactaatggag

SEQ ID NO: 52154 - DNA, 1212 bp, Heterodera glycines
atggcattgctttccgaccgtttcgatgttttggtggacgcgcatttcgacagaaaaagcgaattgacaatttggagaagtgtcgtaattcgcaaggacaaaggaccaaaagcgaaactgtctgtacagatcgatggcagttttgtggattttccgttgtcggaccattcgctgccaaacaaaatccgttttcgtttcctttggattgagtaaatcaaacttatacggaaaccaattaatatggttggtcgtcgtcttcattgttcccccttttcagctacattgaccattccgtgatcaaatttctccgttccaacaagccaatttgggacagaaatggcaccaaattgaaagtgtttgtgtatgcatttgatacggatgtccaaccgatttgggatgtttttatccgtgaaatttggccaatttttgcgacaaacattcgtcatttgggctttgacgatggcgatcatttggacaatttgcgtcgtcgcacatcgccaacaattctcactgatcttgatcaattgaattcaatcgattctggtgctctattctccgatggaattgctgacgatggacccaatgcaactgctggccaagctttggtcaaatggcttcacactccgacaaaaaatggacaaccgaagcgattacatcgcaataatttgttgggtccactgaatctcgaatgggtcaacaacttcaaagaggtggcccgccatatttttttattaatctctttgtttggatcaatggcaactcgtacaaaaaaaaaatttttctaagaattttcaactaaaacttagaatttttagataaaaaaatctaaattggattttctagcctagaaaaactttaaaaaaattctctaagtttttttactaattctttcagctgattttttagtttcttaaatgttgaatccccttttgacaaaatcatttatttaatttaatgatcaattttcacttatttattttgtacaacttttcttctctctcttcaccgatttcctctcccatcctaaccaatcgttacactttactgtaaacccaagccaagccaatttgtgtccatcccagctcactctcgactccaccccttttctcttttgctatttaaactgaattcattccttgcattattacccttttttttactcactttgactcattcccattttacttgcatttctcacttttgctaaataaa

SEQ ID NO: 52155 - DNA, 442 bp, Heterodera glycines
ttttttcttgttgcgacccagttttttatacatatatatatgtacatatggcaagtatataatgaatgataataccgatcacagtgtacaataatgagcaaatgtgatcatacattccgtgtgtcgtcaatgccaagtatacaatgaaagacgacttgataccgatcacaataatatacaattatgagcaaatgtgattagacagatgctaggctcgcgaatatgtgtctccgtttgttcatcatctcgcgggtgattcttcgctcatcctcctcactgtttctctgctggtttctcaatttgcgtcttttctcgatccgagttgcgtcttccgatctcccagtcatatggatgctcctcgatgttgttttgggcaagatatccacgcagcagcagctcgatcatctcatagcagggccggtcctccagctgcagggcatcc

SEQ ID NO: 52156 - DNA, 1681 bp, Heterodera glycines
aggagaaggagtgggattggaatgaaaattgccaaaaggcattttcaaaattgaaaaaaattttggcatccgatttgctgctgacgatcgttgtcgcggcagatgcctctgattatggcatcggtgcagtaatctcgcacaaatttgcggacggatcaatcaaggccatcgcccatgcttcaaaatctctttcaccagcggagaaaaattactcccagattgaaaaggaagcgttggcactgatttttgcagttaaaaagtttcataaaatgatctatggaagacattttacgttacaaactgaccacaaacccttgctaagtatttttggcagtaaaaagggagtcaaacaatgcagcgcaaatcggctgctcagatggtcattaattttattggcctatgatttttcaatagaatacgtccgaaccaatgattttggaaacgccgacgcactctcacgactcatcgcaaaaggaatagaatgcgaagaggagaaagtgatcgccgctttggacgttgaatctgatctgacatccattttcaatttgaatttggagaagttgcctatcaaatttgccgatttggcaacagcatcgaaaattgacggatcaattcagaaggcaatcaaattcatcagatcaaattggccaaacaatgatttgctgaagcaggaatcggagactgtccaactgttcagccgaagaaaagacgaattgtctattcttaaagattgcctaatgtatggcgacagaattgtgataccaaaattctgccaaaagaaaatcatggagcagctgcacaaaggccatccaggaatcaagcggatgaagcagttgtccggacaatatgtctattggccgaagttggacgccgaaattgaagaatcgtccaaaactgccagccgtgccaagctgctgccaaagctcctgtaaagactgatctgcactcgtggccaaaggcagaacatccatggcaacggatccatgtcgactatgccggccccttttacggtaaagaatttttaatcgttgtcgacgcattttcaaagtacccggaggtctttgaaatgccaacaaaatcaacagctgccactgtcgataaattgcgttacctttttactcgacacggaattcctgaaattttggtgtcagataatggtacgcagtttgccagcaacgattttgccaaattcacagcggcaaacggaatttcgcatttattttcagcaccatataatccaatgtctaatggacaagtggagcgttttgtggacacctttaaaagggcttttcgaaaattaaaaggggagggagtcccaggaaaggacgtcattgaaacatttttggtcacttatcggaccacaccaaatgattcgctcccgaacatcaaatccccggcggaaatgctccttggtcgcaaaccgcgcaccactttggatttgctgaagccgccgctttcgcaaccctcggaaagagacgcggaaatggaacgacacttcaatcgacgttttggcacgagacaacgaatttttcagatgaaagacaccgtttacgcgcgccaccgcctctcccagaattggagggcaggaataatttgtgattgcaaaggcgtaatttatactgtgaaattctcggacggatcaatcaatcgctatcatgcgaaccaactccgagaacgccga

SEQ ID NO: 52157 - DNA, 1681 bp, Heterodera glycines; identical to SEQ ID NO: 21541

SEQ ID NO: 52158 - DNA, 606 bp, Heterodera glycines
atggacgatcgacaacgaaacaggcgaagggctttcgcgcacttggatgaatggctgcgtttggatcaatggaagtcgaaggagaaggagcacaaaacggcgcgtgcgctcacactgggagctctcccgaacggagtgattggcctcaccgaagaatggttcatggacaaacttcggctgctcgtctcctactggacaacggcatgctgcatttacgtcacattcatttttgggcgcgatgtcctgatacccttggtatgggtctacttaatggggcccgtcatcgttaccatccgcaatttggtgacgggaaatcagtggacgcagcggaacagagctactcgaggcacacggcgagcaccggcaatttcaaggattgaggcaattgagctggtatcgcctccaatgccccaggaaatgagagcgaatgaaacggcaagttcgcaacaagaggaccccgagccgtcaccgctggtgatggaactgaaacgacaaatggtcgcgttccgctcaaaacgacgttttcaaagccgtgggaatgtcgcgactgaacgtcagccacgaatgtccgttgagcggacaaatgaggagaacggggaggaatga

SEQ ID NO: 52159 - DNA, 1612 bp, Heterodera glycines
atggataccgctggaaaggtaaacgaaaaataaaaatacttccataataatgcgagtattaattaaacaataattttgtttattaattaaaaccaaattgaccgccgccgttttccatcggactcccggccctatttaaaaaaattattgttattgatgcaagacatatgcataagcagtccgatcgatagtaaatatttaaattattgtttttattatttcagaaaatgttttgctcattataatatcttaatttttccgaagtacataaaacaataaaacatattttgtccattataagcagaaaaacccctaaacttttattagcaaccataaaaaggagatgtttcctactaattagagtatgcagaagccatgaaataataattaaatttaaatatttactatcattttttagtttctttcgccacaagcattaattcattaatatttcattaatcacagacaatcaaatgccgagcagcggtcgcttgggagccgaaaaagccattggttatcgaacaaatcgaagtggcgccgccaaaagagggcgaagttcggattaaggcaagcgaagaagcgattgaattggattggattatacgtaaaatgttaagataatgttcacggccatctgtcacaccgatgtttttgtactgaaaaaagccacaaattcacttttcctcaatttattaattaattaagcaagtcagtggcattaatccaaacgtcaaatttccaacgattgtcggccacgagggtgccggcgtggtcgaatcggttgggccgggcgttgaaagtgttcgggccggcgatcatgtcattccaatgccgttgtgccagtgccggaagtgcgaggagtgcgctgacccgaggacaaatctttgccaaaaatttttatatttgtaaaaatagtattttttaaattaattaatttaattgtcatattcgggttggaactctgttgtcagtcattgtcagcagatgcattagttatcagtagggctgggaattttatttaaatacatatttttttcctggcttctccatgctcttaggaaaaacacttaattttttgtgtttgcgaacaaaaaccgggacttttatttaaatattttggggtttttctcatatttttatacattttggactttttcttacatatttcgcaattttgttcgtacatattttatttgtttttttacatattttgggaatttttgagaatttagagaaatttcccgtgaaaattaaaaattttttttttgaaaatgtacacataaaaaattgttttttttttcaaaaaatagatatcaaaattaatttttaaaatagcaagaggtgattctaagcttatttaggttattttcttttttttttttgcttatttcaccccctacgaaattttttttttccaaaaaataaccattttaaaattttatttacatattttggtacatatttctgggtttttgtacatatttcatacatattttagcaatttttatacatattttatttaaatatttatcgatttttcttacataaaattcccagccctagttatcagtaggtcctcaacagaaaatgccactttgagtcgacgaataaa

SEQ ID NO: 52160 - DNA, 927 bp, Heterodera glycines
atgctggacaaattggccattgtgcgggccggcaccggcggcatggaaatgttggcacacacagaaatgccagtgaataagccacggcacaaaatgggccgaactctctacgaggcatggtaagacaggaaaaaaggcataaaaatattttatttaaacaatttaaaataattgtttttttttaatttgtcgattttaaaatatttttaattatttaaatttttgtttaaatgtttttggatttaaaaaaacgttgtttaaaattcaaataggaaattgtttggtgacccaaatgccgtgcttttgttcgtcaatcagcccgacctgttcccgttctgccattttgaacaattgcaattcactacttttgaggtaaaaattataatttgtttattttaattgttttttatttattttttaattaatttaaaggttgaaaaattggcgaaacgtgacggaaacgttgttcaagtgatccgaatgactttcaaggagtgcgcggaacggtaagaaaaaaatattaattatttaatgaacgttaaatagaagaatattaaattaatcaatgaaaatccaattaaaaaaacgaattacataatgagctactaattcagaaaagaaaaaaaagaattaaaaaaaccttataaaaattaaataataataaattaattaattaaaatactatctaataaaattgaataaattgttttaaaatttaaattactattaaattaataattccgtaatttaaaaaaatgaaatatatttccatgaataatttgcagttgccatcttgacgagagcgacttttcgctgtatgtggacggaaagcgagttgcgctggtgcacatggcgtacggatatattggggaacattatccaaccgaagtcaattaaaattttaatttttaaaaaatagtgctcaaa

SEQ ID NO: 52161 - DNA, 276 bp, Heterodera glycines
atggccgttttgataaaaaaaatgtaatacattttgaaaatacttatttttagggacaaaatcttcgtattggaggctattcgtcccagtgaaaatcatggtcccggtcctttggatgcaaaattgatgattttatattcactgaatgatctctcaaataacaaactcaaaatgctcatcccctggcttttatgactactgtttgttgtgtcctttagttcttttaaagaattaaaaatgcttaatgaaattaatttatttatgttttctaaaaga

SEQ ID NO: 52162 - DNA, 1015 bp, Heterodera glycines
atgatcattgatccaccaaatggcaacagttcctctccattatggagctcatcgacaaatgaaactaatgaacattctttccaaaatgattttgaaaaacattcggagtcacaagaaaatgatcaaattgagaaaaataataatgggatattcggaagtatattagcaataataaattgacaaaaataattactttaaataaattcaggcgaaaaaataagaaaaaatggaaagaaaaaaggtaaaaaagcattatacatatttttaaaaaatgatcaacattcgcataaaaataattgaaaacgtttagaaacaattcgatgggttgtgcatttgaccaaaaattggctcgacagtaaaaattcacttaaaaaggtgcaaaatttgttggcaataatttttgtgtgcatcgaattgaccgtttccccgattccaattataggtaattacttaattacattaaaaagtcaatcaaattaatttttaggtcgtgccatcggcgagcaaaaaacactgccaaactgcttaatgagtcccacagtgatggcacactttgcactgtctcttctcacaattccgccgttttacaccaaatttggcccagttttaaaggcacaaaaaaagccgggaaaatatttaactgctgtaaaatttgtggaagaaatttttaaaataattctgaaaaatgaaggagaaattggcgaaatggacgaaaagatgcgaaatttgcaattttattcacttttctacgaatttttatgcgcctttttcaaagggaataaaaaaacaatcgccgattttccgtccgaaaaacatatgaagtcgtgggaaagagcgaagcaatttgtgcaaatttatgagcaaatgttcaaacatcagctggaaaaaattgaaacgatcggattggggggaacaatggcggaacttggaaagatcaaaaggggagataaagtgattgaagagggaccgaaatgagaagcaaatcactcatttgatagtgaattatgaaaataaa

SEQ ID NO: 52163 - DNA, 811 bp, Heterodera glycines
atgattattatcccatcgattgtgccccttggggattcaaaatatatggcggagcaccaacaaacaaagaatgtaagttcagctagttgtttaaagattaataaaattgaattaaattcagttttcctgttcatatttggattacgttttccgaaaggcgcaaagggaaaatcaaaggcttttccaaaacaacaagccacatttggtcatcaaattttcaaaattgcgaagcaaagctcgaaaggccacaaagtttagccatttaaagtgcggcctcaaagaatcgtttgtaaatggaaaattagccgacattcgccaggaaatgctttgccaatcatatacggtaaaagaaaatcattaagattaacattaaaaaaaataaatcatagcgatttggtcactgtcgaaaccgcacggactgtgttaaggagcacgacgttgaccttttactcgatttggaggacaaacgagcacaattgaaaagagaaaaggagcgaaaacgaaggagcaaaaaagaaacagaaaagcaaaaggaagagagtgacggagaagagaatcaaagagaaagggaagagcatgaaaatgagaggggaaaggagggcggaacaaaacggaaatgggaagtgtctaaggtaaaaggaaataaatggaaatttcacaacatcatctcttcccttccctccccccgaaggaaagtgagccgttttttgccgtatcggacgaccgcattggaaaaacgacgaagaaatcaaaagaaaattacaaaaatggagaaggaattgggcactctttcgtggatacactgaccaaa

SEQ ID NO: 52164 - DNA, 499 bp, Heterodera glycines
tggttcagtacggcgacttcttccaattggcaggtgttgtgactttggcatggcactccgcttccgttcttctgacatccctaacaaaatgatcagttgccgacattcccggattggtgcaaggcgcacatcgcaacgagggactcggcttcagtttcctccggcacattgtgcgctgcgaatgtgtgctcttcgtccttgactttacacaaggaaatctgagggaacagtacgaattgttacagcatgaaatgactttgtacgacgacgaactaagcaaaaaagaagcggcgattgtcataaacaaaacggacttattggacggagaaatggcatcattttcccttttttgaaaaataaagttgtttgcttaaaggttaagtcagcgatcgtttcgatgtttccggagcaaagtgtgtttttcgtttcgggaaggcatcgtttgggaatcgaaccactgctaatgtttttgcgggaaaaacacgagcggttcttgaaa

SEQ ID NO: 52165 - DNA, 181 bp, Heterodera glycines
aagggggtaaacatcccccgtggcccttcttttgtttgatgggcacaaatttttgtccaaatcggagttgttgatgaatggaaaggccgtcttttgttgttggccggtcgtttttggaccaacaatttttgagtaaattagtgaagtgaaaaaatgtgaaaattttggcgaaaatggttgg

SEQ ID NO: 52166 - DNA, 1089 bp, Heterodera glycines
taaggcacttctgctgcattgcatcgcgaactgagaaatttgagtttccgtaacccgggctatcgttgcacattgcccgaaccttcacgcgctaagcgaactgtcgtcatttctgcgcaacaaccaaaaacatctgccgaaccttcggccgatcgacggagcatgagaaaacgtacggccaagaaggacgggtcaaattctgatggtaataataaaatgtataaaaaaattttaaccaaaaaagtgaaattttaaacattcaaaacttgtaatttggttcagttaaaaagtagaactcttttgaggctggtaaaatgctctaaaaaccccaatattccgtttgactattccttattgaacctcaactttgcggccgcccaggttcttatcttttttgtgcccccttacaaaatgtttttttaaaaattttttctatggtaaatttaggcgctgaaaacgaatctgacatttatttaaagttaacatccactttacgtaagttacttgaaatttgacgtgaccagtgttatgattacacaatctttttaaaatgtattttttagtttgcctcctgtttattttgaatttaaaaatttataggtttttttcacgtaaaatctgtactttaattaaatgtaagattcgttttcagcacctgaaattaccatagaaaagatttaaacataaattttttttcgctataattcatcttattctcgaattagtacaaactcgctctgccaaatccaaactccgctacaacaataaggggcgactcgtcctgccgagtcgtacagaagtggacctttgcgattgcttggatcaaaagtgcaatggatgccaatatcaggtgacgaaaagcaaaatttagtaggcaacaaaaaaaatttagtgcaaaaaatgtgggggcaataaatgcagctacgcctgtcgcgttaatcggaccacttttattgagcacatcgacacacttggcggaggtcggaccaataacccgtttttgtgaatgaaaagcatgcaagacattctcttttttcataaaacattttttatttgacaaatttctttcgctataaatgcttttaaaaa

SEQ ID NO: 52167 - DNA, 983 bp, Heterodera glycines
agggagtccatccgtccaattctgcttaaatacgtgtctctgctggtgcttgtgcttcagaatgcctgccatgtgttggtcactcgctatgccatgactcgcgtgggacttccgcgcttctcgaaaccggaaatggattttttttttgctaaaatgcatttaattgcggaaatactctttcaggtggccattttgttcaatgagctcgtcaaactttgcgtgtctttgattttgttcttcatcagcacaaatgatttgtgcaagtctgctcttctcttttcttcattttcgttcaattaatttaggtttttcaaaattctttaccatcactttgggccaaattgtttggacacattaaaagttggtgttccggcggtcatttatctggtccagaatttgttgatctttttggtctgtttttaataaattaattttgtcttcaaaatactaattaaggcaattgaaaatttggaaacgggtacttatatggtaaaataaggcatttgtgaattgactaacgccaatttcttaggtcacttatcaacttaaaattctcaccacggcattctttgccgtgcttattttgaagcggaagttatccataattcaatggggggcactgctcattttggtcgccggggttgccctcgtccaatatgtgagttggcatcgtttggaggggggggggggggaatccactcggaatggatctgttaaaaattctctctgttctggtttactttttagtgcaccagggagaatgcttgtgagttcagtcttttgacgccagacgatccgtttacaacaacggcgacagtttcggcacctcaaaatgaatcgacaaaacccgtgggaccttcgccaattggtacaaattaaacacattaagccgaaggtaatttgttgaaaagttcccagcaacacacagaagaaaatgcaaaacccagtcctcggccttgtttacgtgctgatcgcctgtttct

SEQ ID NO: 52168 - DNA, 1461 bp, Heterodera glycines
atgaccattaaaattggaagtgaaatcatccaaaaggacaacaacggacaaaaagcagcaaaaaagggaaaaaacaaaaagaagaaaaaggcgaaaaatgaaggaccactccaaagtgccgaaatttgtccaccgacgaacatggccaccaaacccgagccaattccggatgacaaaagcgggtaatttcagagtttatcgcccgtcccatttttcgaaaaaaaatttgttataaaaattatgaaaacatctttccaagggttttctgggtcgctgattacggatccggaacgaacaattccgaaccctgggttgaactcgaacaaaaagtcgaaaatccaaattttcaaaattctgatttttgttcaaactttgtttggtaatatagtagtaccgatggtaccacatctttaaaaaaaaatttttccaaaagttataaagctgttaaatttatttcttataaggttttcggtgtcgctaagcacgaatatgacatccatttctcccaattccgaacccctaagtttaaatcgaaaatttgagttttcgactttttgttcgaattcgggcccggagtttgggattggaccaaatggatgccggattcgtgactttgaaagcgaaaatggttgttttcatggtcgctgaactcaataggaaaaagttgcgtttactggtcccctggccaaaatgattttgagaaaattgctaacccaatagccttcctcgcccttcctttggttttcaaaattaccctttttcagtagggccaaaatggccgtcaattgcgcaccaattcggagtgacaaaattccaccaaccaacaaatccaaatcggccaaatgtgcgaacaacgtaagccgatcgaaagcaaaaagcgggaggaagtggacgaaggcggtggcttcgaatggtaaatgctttggctcttttacacaaattaaattcggataaataaattcgcgcaaaaatgaaaaagtgaaatacaatattattattttttggtaataagtgctttttatctaaaactaggctagaaatgatagttttcgttaatgcgcctataattttgaaaaaatttttggtgccgaagagaaaggaaagcccttcggatcatcgtcacaaaattttttggaaatttttgacgcgtcgggggtcaattgggctccggaccagtttttgtggtataacgcctttcatagctgtacaatttttcgatctttctattttttgttcgtctgagctggcacttttccccacaaaaatgaaaaaactttttcccaagggaaaaatgcagcgaacgaaagcggcacagagcttggcgaattggtggaaaaagtcaataaaaatgccatcaaatttcgtcgtgtggtggcgcgcactgtgcaaaatccgcatgtgctccatttgctgtacgcactggaaaagcggcaatcgtccatggaaaagctgacgaaggag

SEQ ID NO: 52169 - DNA, 837 bp, Heterodera glycines
ccgtcaccaacgaatcatttggtggcgttggtcactccgacaacttccgggtttcggcaaatattacagacaaaaagtaacgcaacggcaaaaaacggaccgaaaaacgttttgccccatttaaaagccattccatcgtttacattcgcttctttttaggcatcgaattcactttgcctttcaaaacgacagaatttgttgagttgggccgagaagattgcccgaaggattttttgacaaatatcggagacgaaagtattggcatggaccatgacgaatggctgcgtgaccttggcatttcgccacgttcgaaattcaaattaaaacaaaggtgtttttgcgtttaaaaatttgcttggcagcacattaggtaccgcttacttcagggaaatgaaataggaaatatcgcataaggaattggctgttcgtcgcctagggggtgaaagcgtccaaaacataaaccctggggggtacgtccattagaccgcgattatgagttttcgtatatcccttcaaaatggactgaaaatgtgaaaatgcacaaattgcctcttcctcaaaatgttcacttcagtccctctgagttggacgtgtcgtcggcttcgcttttgtccaacgaatcgaagaatgattcttccggccttactaattgtaagagtagcgaagacaattcgcgcggtttgtccgccgtttcgtccgtcgaaagttcgaagtccgccgtactcatctggtggtctttccttcctctgctcataattgcgaatgttttcagtggcgccaaaaatgtggaagccttttgccgtcttttgattggtcagccgactctttgctccacca

SEQ ID NO: 52170 - DNA, 1383 bp, Heterodera glycines
gtatggaggcgaagaaatgggaatcatcccattgattcaaaatcattcattaacctgtacggttaacagccccgctcagcatgaccggtcggaagtcaaagatttttgggcgctcgaatcaattggaatcacggattgtcctgaaatgaatgatgatgaaaaagcggtgcagaaatttgatcaatcaataaaaactgatcaagaagggagatacgaggtatctctcccttggaaaaccgagggggaacgccctccggaaaacttcaaatttgccttttctcggctcgcggccctcgttcgcaaattgaaagacgctccacaactttttaagggatgtgatgacattatccaagattatgtggcaaaaggcattaagaagtggccactcgcaccacggagcagcaatatttccttccccatcatacagttatgggaaaaaagctccgaattgtctttgatgcctcttcgcacgaaaagggagcccggtcactaaatgacaccttattttctggtccaaatttatacccggacttagccgggaaactcatacaattcagggccactaaatttccaatttgggctgatattgaaaaggcctttttaatgatcagcctgagagaatctgatcgggagttttcgaaatttctgtgggttaaggacataaaagctccactctctggtaaaatatcatagtttttcgtttcaaacgaattacgttcgggatagtttcatgtccgtttttgctggccgcaacacttaaatatcatttggacacgcaccctagcagtctcgccagggaaatagtcgagaagtcattattatacgtagataacctgttgaaaccgagactccgaatgttctcggaatgaaatgggttattaatgaggacaatttatcgctgtctttccctccggttcccggtcctgaagggctaacacggagggtggttctaaagacaattgcttccttttttgaccctttgggtttatgctccccgtgtctcgtggggcccaaaatgttcttccagaaattatggaatgaatcccagggatgtgatgatctaattccgatttctgaatgtacggaattgatgaaaatccaaaaacattgggatagtgaaatcttatcaatcccacgtcactctcgccgagtaggcagcaattcgttgcagttacacgctttttccgacgcatcgcccgaagcttttgcatgtgccgtctaaattagggcagaaatgcaaaataagaatgttgtgtcgatggtgtactcccgttcgcgaattcgtccaaagaaaatggcgactagtcaatcggatggtctaaccatcccacgtttagagctcctcggaattctaatcggaacccgagcaattaaatttgtgaa

SEQ ID NO: 52171 - DNA, 723 bp, Heterodera glycines
atgtccgggagccatttatttttattaatttggattaattattggttcttttttggatcacggccattgaaggttatttccattttaatgctgctgcgcatcaattggttttccaaatataaattaattgtaatattttatattttcataaatgtatgcattgtaattaattattactatgattattattacttaatattaatttcacatgatttcaattataatctttgaaaattatttcaatattcttttttttttgtcttatattttggttatattttttactattatatatatattattttgatttcttttttcaatttcattaaattatcataataacccgactgcttagaattttgttaatttgtttttcttatttaattttctttcttgtttttctagttttgttgttattcaatataattgcacattattaggttagataactaaatttttaaattgtttagaatgtttttccattttagttaattttgtgggttttagtgtataaaaatgttaaatttttagtgaacaataaaaattttgaaaaaaaatgtttcagtctcgagtcaccggaattttcagtcttgagcatatttacattgacattttttaaatttctatttgcctgttaataatattattagcgatggaaaataaggaggcctgaggctttctaaggaattttaaaaaaactctaaatttgggttctccaggaaa

SEQ ID NO: 52172 - DNA, 216 bp, Heterodera glycines
atgtccaagttcaagcagttcactttcactgctctcactttccacctcttcttccattcctttccgtgggcagctctaccattaagctaccgaggcacatccgccctttcttttatggatcttatcaacccccgctttccgcgttttaaccgcccagccagcttcttccttacagctccatcctcatcgggaccggtccctcggtccattagttaa

SEQ ID NO: 52173 - DNA, 219 bp, Heterodera glycines
atgactgaaattaaatttttctcacaaagcagtgccgggttaattctccccgatataatcaagttttttgttatttagcaaaaatgtcaaatatctgggaatattctccaccgctgggttgattgtgacagatctgagaaaacgtttattgcctgagaatgtggacaaacttatttttgcatcacaatcttaaaatttatgattttgattatgaataaa

SEQ ID NO: 52174 - DNA, 243 bp, Heterodera glycines
atgccaaggagtatgaaaaaacaaaagctgtttattatgaaaaaaataatttctgcctattaattaaacaattaattttctctaattatataaatagattaaaaattttaaaattaattaaacgaaattcataaaaacaaaaaataatattcagaaatgattaaatattatgaaactaaaatatccatagatagcatgatcatcgtcgtcgaatcgctatcgtcaagaccatgattaaataaa

SEQ ID NO: 52175 - DNA, 1769 bp, Heterodera glycines
atgttcccaaatgacgatggctacgaatcggaagatgatgaaattctcttgccacctccgccgatccccccgcaacttggccaccctccgccaaatgtgccggtaatttcggtctcgcttttcgttgctttttctcacatttccgagtgcttttttcaggcagttcgtgttcagccaatacatgttgggcagcagcagctgccgctcagagacttgccacaattcgaggaccatccgcaaaatgtgccggtaattttgggtcgattttcgctgcgttttctcaaatttctgcgtgcttttttttcaggctgttcgagtccaaccgatacaacaaccattgccgctgagagacctgccgcaaattttccaccctccaccaaatgtgccggtaattttgagtctcgttttcggttgctttttcaaaatcccgagtgcatttttcaggcaattcgtgttcaaccaatgcagcaacccgtaccaatgagagctgtgccacaattcccccaacctccaccaaatgtgtcggtaattttggctcgttttttgttgctttttttaattcccgaatgcttttttcaggccgttcgtgtccaaccagttcaacaaccgataccactgagagacgtgccgctatttgtcaacccaccaccaaatgtgccggtaattttggctcgcttttgttattttttttcaagatccctaatgcattttttcaggtaattcgtgtccaaccgatgcctcaaccgttgccgttgagagacatgccgcaaattcaccatccaccgcgaaatggacttcaatttggatcaaattgtggttgctttttctcagtctctgggtgtttcttcagggaattcatgttcgacaaattcaacgggaatacgccgtaccgcaatatgcccatccgccgccaaacttgccgtatcatcaaccagaaaacgttccggtagttgggtcttgtttttcgtgcgtttctcatattttcggatgcttattcaggcaatccaaccacggcaacgaccgcgccagctgagagacgtgccactattcgaccacccgctgccaaacggacaggtaatttcagaccctgtcttctacctaacaccgaaacatcttttcttaagcaaatgcatcccaacccccccgagagtgctggaagtgatccgacggctgggcgagtggatagaagaccaagggacccaagacgtccgcctcaatgaatgaatggaatttggattttgataaaatttgttgttttaattttttgaattgataagggttaaatcccattacctaaattgtttgaaaattattaaaattttaagaaattagatgctaaacctaacctttgacaaagattatgaaaaaatgaaaagaaatgacgaatttttttggaatgttccttctttttattacctatggattttttttcacgtgcattattttggtgctagtaagatattgccgaatgaattaattggtttttctcttcattttaaaacatttcacgtccccatcgccctgcccacttcccgcggaattgatcaaggaaataattgacgctctcccccctccaaaaacacatcggcttttgcgcttaaattttgttttggcatactttgttaaatgtcggttctattccatgatgagaagattgtttcgcccagagcatatatcaataccaatggcccgaagaactggaatttatttctttttcgatgtttatactccccctatttattttccactctaccaataataatatttaa

SEQ ID NO: 52176 - DNA, 60 bp, Heterodera glycines; identical to SEQ ID NO: 52045

SEQ ID NO: 52177 - DNA, 245 bp, Heterodera glycines
atggggggggggagggagggtaagttgcgcatcattaatttattttgtaataattggagtcgacggacggaatctcgcaagaggggaagggctgctggatcattgtaaaaaaattctcccaaactatttattagtggggtaatttgcacatcattcaacttatattttaatatatgtatattgtagctcatttcttttttgcaccatatccaagtttttatatgaaagcggatccaacattttga

SEQ ID NO: 52178 - DNA, 1629 bp, Heterodera glycines
atgaaaaccggaatgtttaaggtcccgtcggcagcagtggtcgtcatttccgacttttctgacattgccgaatcagtccagtcgaacatcgccgcattgttagcagcggaatcggcccagtcaactgaagcctctcattcttcagtcgcagatgcttctcagccaccaaccattgccgatgagcaggttacggtcgtccgccagtttcagctcgatcaacatcaaaattcggccatcgatgaaaacggagtttcgcctatggatgtcactcagtgtttggccgccagtctctccactttgcctcctgcttttgatatggaacagcagaagctgcaaaccgaagtaaattcggaatcgcaaattttttcactcctttctaatatattttcttgtcaggaggtctgcgcaaatatgccgaatcgaactgatccagctctgctagccaaacaggatgagcattttcttcgtgtgaatggcttccatccaatcggcattctttgtgaacggattgatcttgtttggcagcgggacaaaaaggtgaataattaatcagtttcctcactcatttcacagtcctgatacgccttttattttatttctcattgcgtttttgtgtttcttgtaggctgtggaacgtgagaagcttcgccgggaacgcgaacgtcgtgcagaggcagctgaacagagacgcaaagaacgccgagatgggagtgagggtgtgtggcgctttcttcctgccttgaaattcagtaaaaaagatttttgaaattcattaagaatcgagagaacaccgaaaagagcgcaaaagacagaaacgcgaggaacggcaccgatctccgttaggttagtttgcgagaatttgaaattgtattgaccaatttatttttggttgtttgacggaatacaaagggtgagttcattgtcattccttttcgtttcgaaccaagaaatttttctgccaaaattggttattgtgagcatggaaaggcaacaccacaagtgcagtttgggcacacttcgtcccccggcgcgttgggagtttttttttatgattttgatgtccttaattatttttttgcatcggtctttataaacaaaccaattttcccttaacaactcggaatgttatgacttcgcttacattgagacccatggggactgacgactctatagactatatattttctttctgcgtttcttatttttcttacaattttcagacaaggttcgctctgaagccgttgcgccgcaaaagcgcaacttcaaccggattgtccagtgcagctactgtgaacttattgtacggcatgaccgttttgggggtcgtgaaagtgcctattgctccgctgaatgcatctcacgacgggtggacatggtcagaaaggtctgcgacatttggcattttgtgaaaaaatataagcatttaaatttcattattatacatttttttgtctgtttaagtgtgtcaaggaatctgagcgtattttgatgatcgatctgaagggcaatatttacaatgcctccgtcaacccgaccattgaaacgttggaggcgttcctcaaccaaaatcccagctacaatccaataattgatgacgcacgacttggtcagtcgtattttcaggactga

SEQ ID NO: 52179 - DNA, 689 bp, Heterodera glycines
  unsure (1)..(689): unsure at all n locations
agcagggatgggccgaggtttcgcttttcgcatttcgcctttcgcattattcgcattttttggcgtttcgcatttcgcttttcgcatttcgctttttggcgcgaaatgcgacttttacacccctaagaatttgcggaccgggtcagtttagtacgggccgttttagtacgagcgcacatttttccactataacttttttatttattatccaaatccaactttcttgatatcattcgagagcccttcggatgctctattagcctgcaaaatttcaaaaaattttgtttagtttaaaaaaagttcgagccaaaaaagttggaaaatctggtttttttaattcttctggccataacttttttgaaccttaacgagatttttcgaaattttgcaggctaatataggacacttagggctatcgaacgatactaaaaatgttggatttgattggcaaagaaaaaagttatagccaaaaacttgcgctcgtactaaaacggcccgtactaaaccgaccccgaccctaagaattggattaaattcccataaaatttttcaaaattttacctataaattggctaattttcagtgaaaactgtttataaatgatcaaaatttccaatttttttcccccggcgggcgcctatnncggcaccgccgcgccccccaaaacttcctatttttctcntgaaaat

SEQ ID NO: 52180 - DNA, 1671 bp, Heterodera glycines
atggacagacgaggagaaaccgacagcagacgaactgctgcaaagcacgcaactgttccgaacggcaaatgcaaaaagggtaaaaaaaatggggaagaaatgatcactgataagtgatcattgatcattggggcaatccctcagatgaaatgccaaaattaatcgccatgcattcaaacagtttcaaagcttaatgtcgtcgaatgaagagcgggcaacgagagacgaagcggcacggttgagaagtgtgaccaaagaggtggaggaaaagcttggacttgcgccatcgccggggacaaatcgccaagggccaacgacatttggcatcagtaggaaaaggggtaaaagaaggaaacgcggaaaagcacattaaaaacaattacctatattatactgaatccttattatattagtgttaattaatggaaataaaatccgtcaattaatcagctgatttgtacccttcggcaaatgaccccccggcactgttacggcgttttgttggcaccggtgaaagcgccgtagagcttaagaggtattttattagatttaaaactttaaaattggaacgtgccagaattcggtcacctccaaacgctttggtcgcttctctgctacgccagcaaagagaattgtcagcagtgcaaccaaacattatcagacccagcgttggcaccggcacttttatcggtcctttcttcgctttgaaaaatgccgacaaaaatttgggcgtttaaaaattaaacaaaaaaaaattaaatttaaataattaaataaaagaaattatagctcaacaacaacggcaacaacaacaccagcttgaatatgagcagcaaaggctggttgaacagcagcaacagttgcagacactgctccaacaattggccaccgttcagcgacagcgccaattgcagcagcagcaaatgttgatgaacagtcagaggcaaagtgggcaagccgttcagggacgaaacgagcgcctcgcgagcagagcaagcagtagcagcagcagctcttctcgggcagctaacattgaggtgggctaaccattagccgcgaaagaatccaaaaataaaacgataccctactaattagtaattactctcatgttgacagaaatttccgcctccatttgcttctcccagcttttttgggcctgctaacaacccttttcaacctccaccaccaatatctccaccatcatcatcatccgcattgttcccgggaaagtttttgccgagttcggcatcggcttttcgtctccccggcgggttgccttctccaacagctcccattttcggcggagttcagccatcagattcaaaattcgctgtccaaccgtcgccaatttcggcgccgttccgtccgatcagtagttctgtggactctgctgctgatctgtccgcacttctccaaaaattatcttggaataatcccacaaatcaaaatagcggcaattcggctaccgtagttgtgccgatccctacagtactgtcgaacgcggcgaatcgcggtggcgccgcacaatttgtggtgccaaaaccccaacaggaaaggccattggtggtcaaattggtggcagcaggcaaaagtgaacagcagtcacagcagcagaaccctaacaataacaacaacaatggtaatgacaatagttgggattactatatttaa

SEQ ID NO: 52181 - DNA, 342 bp, Heterodera glycines
atgggacttccgaatgaaactttcagggtaggtagattacctgataagcaaaataggtcaatagacaaattattctctcatataaaataaaaatgaaaaaaatattatgttcaaatttattaatattaaaaagcttaaaaactaatttggatatgaaaaaaaaacaaaataattatttacagggttggggaattgaactttagaagaagaaaaaagtatggaaggcacaaccaccaggccaccgacgctcacattggctttacattctttgaaaatgatattgaaaaggcaaaaaggaaaagcttcatatctcggccagaagcttcatttagcaaaaataaa

SEQ ID NO: 52182 - DNA, 449 bp, Heterodera glycines
agcaaaataagcaggttaattgaatttactatgatttaaattaggtgattgcaattacagacaattaaaactatttttatattttaaatccttaatttggtgcccaaacttcctcctcacattcatttataattttgcttacaataattcattaaataaatgtttagataatttatagttctttctgtacttattacatatgcttcttcattctttcacaaattctttctttctttatccactaatttccgtccattctcttttcacatggcgaagcagaagttgaagagaaaggctaaacaatgtaatataaaaaaaatttaaaaaaacatattttattaattgtttttccaatgaaaaatattattaaaatcgtttgtcattttaaaaagcaaaaaataaaacaataatccatttaaaatgtaaaaaactgatttaaaatcaattat

SEQ ID NO: 52183 - DNA, 1240 bp, Heterodera glycines
atggtcacttgggtacctctcctttgtaagggttcattaaaaatatttaatggtttcttttcaattaattgcgttaatgaaattaaaatgccattttttaaatgggtcgtttaatgtgtaaaattaaattaaatgtcggaaaattttaatcaaaagcctatagttaaaatatcataataaattcttgttccagctccaacccaacagcaatcacttgctgattccaatttgctccggggattgcttcaggcattttccaatttgctaacgcctcaggccacagcatcggggggagtgtcgccatcatcatcagcatttgtaccaccaacagtaggacaacaacagcagcaagtgccaaacattggcggcacaaataattttgggaagtcacaattcgtgggtgtaccccaaccgcagcagcaacaagtccaagcagtacaacaacaatcgcaaccgcaacaaattggacagccaaattcggctgtccaatttgttgcggtgtatgagccgtggagaatggcacaacaacagcagcaaattaatggggccaattttattactgcagcaacgagtggtgatggagcagtaccggcacaatcagcagcgggtagagagggagcacatttttctattttaattcccatcctgctgttcagttctacctcaagaagttggagcagtgggacaacttcagcaacaattcatcggctcatcacagccagtgcttcctcaactgccgcaacagcaacaacaacaagttggggcagtatctgtgcttggatggcttccgaccagagcaggcgaaaccaatgcattttctgctgatggactgttttggccgcagcaacagcaacagttgcagcaaaacaactttggcagcaacaacgacaatggcaacgacattttggtgcagcgacggacggcacaacgacgacgcgaagacggacaacaaacaaatggagaagaagcagcggaagaggaggcagaagacgggggaggagcagcggaacggggggaggcagaagaggaggagggggaagagaggaggagagaaggggacgaggggttggaggacacgggcaaatgggggaatgatgtttgacacggactgaaaattcaaaaatttaaaatatttttaatttctggcaatttttttagattttcccgtgtcatttatttattttttgtcatacatacataattattaagtaactgaaatgttcacttaaattgcaaacaa

SEQ ID NO: 52184 - DNA, 780 bp, Heterodera glycines
tgccacgatttgtgccaactcagcgagttaaacgacgcctccgttctcgcggcacttcgccagcgttactctcttcggcttgtccatgtccctcccccctttttccccccaatttcgcccattttcagacttattccgcccttttctgtgtggttgtcaatccctggtgccctttggcacccctttactctgcccaaatgcgttcactgtatgccaatgccaatggcgccactttgccccctcatatttttgcaattgcccaaagcgcttttgaagggctcagcgacggcacttcgcgattaaaccaatccattctgatcacgtagggcaacaaccaattcattctggcacccatctaaatgtgacattttttatagaggggaaagtggtgccgggaaaacggagaacacaaaacgaataatcgaatatttgatggacatcgccgaaaggaatgccaaagtcagcgaatgtgccgatcagcagaaagccgcaacggtggaaaaggcactgatcagtgccggaactgcgctggaggcatttgccaatgcgcagactgtgcacaacaacaacagctcgagaatggtgggaaacgttaactctaatattggcccagttttatcaaagactttctcaaatccgatcaaaatccctcccccttttttcccagggcaaattcgttcgcattgatttcgaccgcgaggggaaacttcagtcggcacagatcgattgttgtgagtttatttttcatttttaattccatcaccctttttcccttttttg

SEQ ID NO: 52185 - DNA, 1103 bp, Heterodera glycines
atgttgcgggaagggatgagcaatgttttgctccatgcttttatgaaaatgtgccaccatttggttactacgatgtcgtgggctgcggcattgaattggcgacacgccaaattttttacacgaaaaacggacggcgattgggtgggcaaacaaaaaatggaatatataaaaatgcaaatttttgaaatttaataatgaaatttttctatagtaaattatgaaactcatttttttttgttcgaaaatccatccacccattccagcacaatgtttgctgggctataacttttgatgagatatcgtagaaccctaaaagatatggcattgtattttatttttttaatcattgataaaaaagcatagatttttgcagttttggcaccagattcttgattagtgcctaaaattaccccgaaaagtgttttttttttttttttttgaagcgatatgagaaattttaaacaaattttttaaagaaatttataaactacaaatttttataaaatttaaaattcgtttttgtttagattttaattgcttaactattttttcccctttaaatccacttaatttttcccctttttagtcactcccattttgcttgtcgcccctttgtccgtcgatttgttcccatgtgtttcgctgtgttgctcaaaaatggaagcgaattttggccctaatgatttcatttacaaaaattcaaatgtcattccgaaaaggacgagtgatgaatgagaatggagggagaacaacgaagatgaatgatctttaccgaattttatacatttgcagattaagcaaattgaacagtccaatcaatcaattatcatgctcacgcgactgtgaaatttaataaatttcttcaaaaaatataaaattatttattcaaattcaaaaacttaattatccatcaaggaattaatctgatgtacacaatgggaactgtcattatgtttttcttttcttttttttgtaatttggacagcacagaaagtatttctgtatgagaatcaaaaaataatattttggaacttgaaacgaaaacacaatttatcacgaaaatcaaatatctaaaagtaagattttataaatttcctaataaa

SEQ ID NO: 52186 - DNA, 1021 bp, Heterodera glycines
atgggcgatattccatcgaaacaacatcaaaaaatggtaagtagtaaatttagacacatgattaattgtaagattaaaaattagggtgtggcaaaaaggtataaacatttacagaatgcaaatcatatgaataaagaggacaaatgttggacgacggattgtcaccaacggaaatttgaaactgggaggcgacggattggtgccaccaacggaaaatttgggaggcgacgggttggcacaaattttgccaccgaaggaagttattgatcagcaacaacacaactatggacaacaacaacatgaggcgactacggatcagagtgaccagcagaagcagtacgtggacgaggcaacgaatggcggtggggaaatcggtgagtgatcggccgattgttggccccagcggaacgacccaccgacaaaaaaccaagggccgacggtgcctctaggcgttgccggcgaaattttttttgtaaattttgttgaatttgttattcggactggtccgtgaaaaggcctgttaggaccaaaacctctcctcgactgtctttttgggtcatttttcattaatttttacattttttgatttcttcaagcaaatccaattcatagcccccaaaaaaaaattctattttggtatcacaaattaaaatcttattcgtaaataatttactatttttgtttccttacagttaaccaaattacgctcccttcgaaccctttgggcatgggcactgttgttgagggggaagagcatcagaagcaggcaacggtcagtgtggacgttcaaaaaaaattttttttttttgaataaggcgtgaaaaatgattgcatatgacacactttcattcattcatatccctcgaaaaatcttgaaatggttaatattggtttctttgctaatttctttaatcaaattttttttttcgactggcgcatctttttaacacttcggatcatacaaattccaaaaaaaaaaaaatttttttttattatacaggaaatttggggcctatgctaa

SEQ ID NO: 52187 - DNA, 679 bp, Heterodera glycines
atggtcgggggactttcgtcaacaaaagtcgcaaaaagtcggaaaaatcttaataaacttttggcattagggcgccggcgatgcaggtaggcgccgccgggaaaatgttgaaaaattagattgcaatttgttaactgattttcaccaaataacaatttttgcgattttgagcgaaatttttaagaaaaaaacatgtttttagggtccagcggtgccgataggcgccgccgcggtaaaatagaaaattttgagcattttttaaattctaattttcagcgaaaataggcaatttttaggtcaatttaatcagaataaatcaacaaatttctcaaaaacagcaaatcatcatctcaaaaattaaatcatcattgaccagttgaaagcagcaaaatgaggtacttccgtgttttgctatttgtttttctgtgctttatgtccacccctccccatttccaaattttgggtcgaattatcctccaaatttgcttcgtacaaataatgtcatcaaacccctctgtaagccaactgcgcgctctccgccggcagttgctaggattgaaactttgttcgaattcggggttcggaactggcagaaatggatgccggattcgtgatcatcgctagaaaaaattgataaaatcgaaaatttggtcatttttgggcaagatttgttaataaa

SEQ ID NO: 52188 - DNA, 4817 bp, Heterodera glycines
gccgtgcggtataattatttccgggccctcctcgtcgggcaaaacggaattcctactaaaatttattgctgagtgcaatgaactgatcgcacccagtcccatctcaattctgtactgttttggtgagatgaattcggcggttccgctactgcaaaaggcgggagttgaggtgtattcgggaggagctgattaggcgccttcccaaaccgatgctgctcattctcgacgatctgatgctgtcaatagaggagcgctatctgtccgatttgttcaccaaaaaatcccatcaccatcagtttgcggtagtgttcatcactcagaatctgtttgagcggaagatcaaggtggctcgcctttctgcgcagtatttggtgctaatgcgcgcgcccaactcgctgctgtccattcgaaatattggagttcagctttttccgcgtcaactcgattttttccttgacgcctaccgcaaggcgaccgcccgcccctatggctatttgctaatcgatatgcacgcatcatctgatccggcgcttcgcctccgcaccaacatatttaaagaggagcaggaggaggacgagggaacagttgtgttcatccccaaaaatggagcggtataaacggcaacaacaacgacaacaacaacaacaacaacaacaagctaaagttagtcaactaataaaagataatgccaactggctttgtgcactgtcgaaggcaaaatgtgtgaaacgatgcgggagactgatcagaaaggcgaacactgatcagctgctgtcactggtggaagtgtgcttgaacattgttgcttcccgattccgactgacaactcggcagaagaaacgactaatgccctacgtggacacggtgcgccgcgtgagcagagcgaggagcgagaggggcgctaagcgagcgcttgtcatccagaaaggagaggggtttggcggactatttgcagccttttaacccccgtcttaattgaattggccaaatcggttgtgactcgaaacacataaataccctcgtaaaattgtctcacacacgcattcattcattaataaaaatggcaaacaaattcattctcgtaccacaagaaatttatcggggtctcacctccgtctcgcagacgggagacctcaatttggacgcggttcgccacgacctggaccgggccaggggtggacagacaaatccttcggcgaaaaatgtgcattataaccagcagctccggcgttatttacagatgagaaaggaacatgcggacagaccaaccaaagttgagctgaccaagggaataagtgtactgatgaatagaggtggcgaagaaggcgaggttgttgataccccacgccgtcctcccgctcctccaccaccacctccgccgcctggaagacctcctcgtcgtccaccgcccagtcctccgggtggtcccggggctccttcgccaccaacaagtcctccgcctcgtccacaacgccccccgagaccgggcaggacttctcgtagaggaggtcgtatggagcaatggcggaaaaggcgatacgatatacaacaacagcaacggcagccgccgccgctagtggtgcgggacctccttgcggaagcagctgcggcgccactgcccgaaagtgatgatgatgatgagtatatgctagagaatggattcgcgctaccagcaccatcacaatactatggcgatttgcctgtgctgcccgacaatgcggaagaaattgaggaaatggacactgctcagcgcaggattgccatcagaagaaaattgaaaaaggacgaggctgatgctgatgatgatttgcaacgcaaaaagtatatgatgatttatcaacctccaccactgcctcgcgcaaaagtaaaagttgagcagccgaggcctcctacaccccggccgcgtcctaacgtcaagagagaacaacaacaaaagccaaagtcagaattcaaaccgccgtcgacatcaaagaaaaccggtcgccccactccggcaaaaagagtgccagagtttgttgatctcgatccacgaccatccacatcaaggcaggccgggtataacccgcctcccccgacgcccaaaataaaacatgagccgacaacaaagagacccatgccataccgtatcccaaaaagggaaccaaaagtcgaggaagcgccacaacagcaacaacctcttcctgctgccgctgttgtcgtcgaagaaatgcccgttgttcctccgcctaggaggggggccaaacgtcgctaccccgtatatgaagatgatgaggtgcagataagaaaacgagtgagacagccgagaagggtaagggtacagtactcacccgagccaggcccatcgacatctgcacaaagtgatgaacaacaacaacgacaacaagaacgcgaactgtttgccattccatcaaatcagctgaccatgactcagcgggttgaacggctatacatcaaatgcaaccattacgctgatcgtatgggcgttcgtggaaatacaattaacaccgcaaacggcaagccgttggcgcataccaatttgcgaatggccatccgctatataatagacagaagagcgggccgccccaccattagaccaccaggagcggccatattggaagaaaggcttcagcaggacccaattctgtattcatggacggctccaccaaagagaccgtcacagagcaaaaccacgcggacggcaccaaaaatcaaaaaggaatttcgtccgaaaaaatggagctgatcaacgcaacgcttgacaagctgtataacagtccatcgtcgcccgcggcgttcgcgggcgttaccgcgctgtggaaagaggcgcgaaaaagtatcaagcatttacgcaaaaaggacgtccagcattatttggaggggcaccgcacatacactctgatgcgcccccgtagggtgcgctttccaagggccagcaccgtagcggcaggattcatgaccgatgtccaggtggatttggccgattttcaagcgctatcgcgacacaaccggggtcaccgctatctgcttgtcgcggtggatgtgctctcaaaacgcctgtttgttgtgccactcaaaaataagagagccgaggagatgttggaggcattcaagctgctcatcgatcaaatgcccatggccccccaccgcattttctccgataagggaaccgagtttaagaacagattgctgaaggacttttttgagcagcgagaaattgagaatcatgaacccgtgcattcatcggtcaaggcgtcggtcgccgagcgggccatccgtaatgtgaaacagcggctgtaccggtattttgcggaaacggagacgctgaactgggtggatgcagcacagaaaattgtggacgggattaaccgctccccgtcacgtgcccacggaatgcgtccgattgatgtgggcttttccaatgctcagagggtgtggaagcgattatatgattatgcacaccgtgcaccacaaaaacgacgaccgacacgcttccgcaaagacgattttgtgcgcatgagcagagagaagggacagtttgagaagggctatttgccaaattatggcgacgaaattttggaggttgacgaggtgctgaaagcggttcgccccgttcggtacaagctacgggatgagcgcggagagaaattcaagggcagcttctatgagcaggagttggcgcgtgtaagaaaggatgcagagacgagctatcgtattgaaaaggtgtacagaaagagaaagagggcggatgggtccactgagatgcttgtcaagttcataggataccccgagcgcgaatgggttcacgagtcacaatttgttgtataaaagccccacccatataacaacatatcacattttcataaattttacgtgaaataaaaaaatgtcatcgaacagcttctttgtgtttttgcctagcaatgtgacggattacccggacaatcagcccaataaatttcgggtccggctcccaaagccgttgcattttaacggctcttgggtttgtgggctgcatagcataagctacccatactcatggtcaaccattggcacattggatgcacaatggattgacattcacttcacccagcgcagcacaatggatgaggacaggccgagagtgatccgggtgccggtgcccaagacatcacataacagggttgagcagctgagagacttcattgccgctacactgaggaaccatatcggtgcaaaaatgttgccgctccctcatgaagaggaggccgatcggaatcggacaaagccgcttggctctccaccgccacggaagagagacagaagagatgtgaacaacaccactcctccccaatcccccgtgctgtttgatgagcacggaaagcgactcgggtctcccccgttgtacgatccgaatgctggcgaagagcaacacatgagcgatgatgacgatgacatgcgagcacaaaaagggacactaattattgatccaaaaagcccgtcgcctatagcgacacccccagttccggcggttaaaccgctaacaacaacaacaacaacaacaccgactcctccagccgtaaaaccggtaacaacaacaacaccggccccccagtcgtccgcaaagccatcagcacaacagcaaaagccaacacctgtcccgccaaaaccatctgcccctcagacgtccgaaccaaaaatagcaacaacaacaacaacacccgcccctacaacaaagccagcaacgccaccgccacctaagcctaaaacgacagttgctctacagccaaagcaaacaacaccgactccaccacaacaaccaataacaacgccaacccctc

SEQ ID NO: 52189 - DNA, 808 bp, Heterodera glycines
atgattggacaacttttcgcttctgttctaccgcttgtcttgttcgccaacttaataaatggttagctttttaaagtgaatttttaatttttttttttttaatttagttggcgaaatggtccgtggtgggtcaaattcgctttctatgactaatggtggtgggccaccaattcagcaacaaaatccgagcatcaacctggtgacgaatgtcgcccattcacttaacaatctcaggctcaatccatcggcagaaggtaaagccttcggaaaattgaatttatttattcataaataaattatttttaatttagaaaatcaacatcaaccaacaccggtaaacgcagctcagccgaaaatgtaaaaataaaaaacattaaaaaattatttaaaaaataaatttaattattttagacggcaaaacccgaataaaaaaggtgtgaaagttggaagcaaaatgaaactgcaacaaaagcttaagagtggagttaaaagcaaagatttgggtgaaaagaaaagcaaattgggaatggcaatgtaagtggacgaaaattttgaaaattcataaaaaaaacgatagaaatttttgtattaacttattattccatcggacagaatggacaatcccaaaaatatcacgagactctcgaaaataattaaatttttatgttttcgaaaattatttctaattttttgggtttgaataaattattaaaaaaagctcaaaattataattcaaggttttatgtgtttatgctgatcagtttgttcgtgccacatacaccacatgtgccaataaatgtgatgctcc

SEQ ID NO: 52190 - DNA, 545 bp, Heterodera glycines
atgaattcgaatgataccattgacgacggccttttcacgagtcatttgaaggatcaaaatgcttcaaaaatggtcattttttgaaagaagaattgtaatcttgcttttttctagccttcttctatcagtgatgaagctggtccatcgtcatcatcaacaaaaactacagattttacagaacagccagagtaagaaaattttccgaattccgaaaattttactgccaaaattcaatgtttaatagcccatcgcaactttttaggtttaccgaattcaggccggagctcattgtgtggcgcaacaaattttacgaggtcgaccaagaggaggacgaggaatttgcttgggatgactttctcaagagccctgaacgacgcccattcgaattggacgagcaatcgacgtcggggcagtccaaaacagtcaatgttagggtcggagaaacaaaggttgttttaaagggcaattttcgattttagatggtatgatatggggcctgtttcgggaatctcgtttaatgagttcgagtttttagtttaattaaa

SEQ ID NO: 52191 - DNA, 1369 bp, Heterodera glycines
atgcatcggattccattcatccaacttttcattctgttgatcaacatgatcggaattgccaattctaaggacggaattaaaaatttatttgttgggaaaaagaacaataatgactatgataagtgctctgatcaattccattatgaagtgatcgaagatggcacaacagaggaggaggacatgaaaaaagcaattcaaattggcaaaacattcttttggcgagaaatgatagcaaaatgggaatgtgaaaatgaagatttgtataataacccgcaaaaaattggaaaaaaatccatcaaaaaattaaaaagaatttgtgaaaattggaaaatgaaagcattgtcagccgatgcattcgtgaaaagtttaaagtgcaagaaaaagcaaaaatattttatggtcacacttttaataaagattgatgaaggaggacagcctttaaacgaatgtgaattattttttgagaaaattaaataaaatatggaaataatttaaataaagaaaataataatttaattaattttggaaattcagtgaaatgtttgtgtgtaaagccacgctttcttgttgaggagggcgaactccaactgagctcagcaatggaagcgactaaagctgtttatcgggatttattcaaatggggaaatgggaaaggcttaaaaattgcggtaaaaatattttaaaaatttgaaaatcttatttaagatcaaatttgaaaatgagagagcatgggatttggttgacagatggctaaaagcattcaaaggcctccggattgaacaaaatgatgaagtcaatcaaatgttgaagaaagcgcagagcaaccaaattctattcaaggctgaaaatgctcttaaattcgacccatattttgagaaatttgaaaattcagaattttcgaagacatttttaaatgcgccgccacggtttaggaaggaacgtgacgaacataaaaattattagattttaaataatttaaaaaaatattgtttgctaaagagcttggataatttatttataccaaaaaagtaaaccgggaccgggacctaggaggaccgggaattcccgtcccggtcccggtcgcgctcaactctaatttataccaaaaactatttcattttgttttttattctcaaataatttcaatttgaaggcacattagcgtccattaatgaaatgacttataacgataaaaagaagaaccgttattatttgaatgaatttattaatgttgcggaagactacaaagaacaatgggactttttacagcagaaaaatttaaatgactatgaaaagtttgaagttttgaaacaaattaagcaagaaagcagcgttcaactttggcacatttcgcagcaacttggattgg

SEQ ID NO: 52192 - DNA, 215 bp, Heterodera glycines
atgcgttctaatgagacagtcaatcggaaagtccttttttcactaatgaccatttttttggttgaaacgttcggctgggtgtccaattggtcgctgagacttttgctaattcaattcggggccactgaaagcaccaaatggttcgtgatgagctatgctggttatgtgatgcaaatttccttggcactgaatgggccaattctttacgtgttgag

SEQ ID NO: 52193 - DNA, 119 bp, Heterodera glycines
aatgaataaaaataaatcaaaggttaaacattcacaggcgattaaaatatagtgtaaatgtggcacagaaaatttcctactcagaactcattgcttttagtaaaccctgaattcctttg

SEQ ID NO: 52194 - DNA, 2202 bp, Heterodera glycines
atgcaacgactcgaattcgaggacgggagcgaaagcaacatggacccagcgaatgagggccatcgcaacggcgcacagcacgacgaaaatgtgcaggacggggatggtcccgtcgcttcaacgaacgaagagcaacaaaaagttgccagagtaaacgaagcaacgagaggaagcaacatggcgacaggcttggggacaaatcagcaagggatgctacccttcccatcacgcaatttgcggagtgtatccatcccggtacggacagcgcgggacagaatcgagagagcatccgggactctcgccgctcgaattgcggaggctcgagaagtgatcgaccaagaccttaccgaaggggaggcaggctaccaagcggcgcgactgttggccatggagagaggactcaaggaggcaactcaaatcttccaaggacatttcgagattggaatggcagcagcgggagcagaacccgcaggtcgccaggacttcttctacgacatactgacggcgccactgccggcggcaacgaaagagttgcagttgcgaaaccatccaacaccagctgaactgcttcaaattgcggacgagcacatcggagacttaaggacgatgcgactggcactcgaggatgaagaagaagcaatcgcgcggtctcgattgagcgggtcattcgggaccaacaacagccatccggtgggggacgacccacctccacccgaaaatcggaacatggaagaatgggagagatccttccaagtggcggccaaacgatggcaaaacgacggacaaggtgtacagcaacacaaccgcagaccaatgggacgagttgcgacacccgtcatgtcgaatttggacgggatttttcagcggcgtgccaaagtgccgtccgtcgccagcatgagagtgacgaacacagcgcgagaatggatcaatcgaaatcgagacgagatgggggcgttccccccagcaacagcccatcggccggcactgatgcaaccaaaaatcgaaaagcagcaggctcacgtgaacgacgactatcgggagcgtcagacatacccgattcgacggcatgctcgagacgagggagaacatgatcggaagcacgggagggacgaaagcacggggatgacaacattcgagaccgttcggctacaaccaccgacattttccggaaagcccgaggattggacgacattttgggcctatttcaagcgagctgtggacgacaaacccattcccgggtttgaaaaacaattgcatcttctgcgctgcttaaaggagggatcaccagcccggcgggctgtcgaagtctaccctccctccgacggcaactacccggtggtcgtgcaatttttgaaagaacgatttggcgacacggacgatttacagcgggcaattcgggcccggcttcttcatttggcaccggcaaaggacaatgtgaacagcttgacgacgatgatcgacgaatttgagcgatgcgtttgccaactcgagcagctcggggcgaacgtggacgacgactcatttgggccattgctggaagccaagttgccagtgcgagtgctcacggaattgcggatcagagaaagcatgatgggatcgaaatggtcagtgcgcgagttcaggagagcggtgacggcacaagtgcggtgcatgcgatcagctgagtcagcactggcggcaatgaaagacccggaagtacgcactgatcaccgaaccgaacgtgatcatacgggacgaggaggcaaagcaggtcgggaaccatttcaaagagcatttatggtacgggacagccaacaaacccgtgcgcagcccaacggaacacgaaaagaagagcagtgcgggacgagtgcccgtttcaccgggcgaacagtggcacgcggcaacgagaacggacacacgggcgggaatggaccccgcttcgcgcaaaatgggctccctccaagcttcgggagggggaattgttcgttttgtctggagagcggacatcggccgagtgaatgccgcgcctatccgacgccgcaggcacggaggaagcgactaattgagcaaaaacgatgcctgcgttgcctgggctctgatcacacattcgaacagtgccaacgaacggtccgatgtgacgcatgtcgaaaggacgatcatcattggcttatgtgctggaagaaccaaccgggaaaccaatcccggccctccggtgaaccctaa

SEQ ID NO: 52195 - DNA, 899 bp, Heterodera glycines
atgaacaaccgcaagaaacagacacaaagccaaacggacttgggatttgttgagttggaagaccctgaaaaggttgggaatggcactccaatttaatgtgccatcgtttgaattacgtatttttagatggaaattaacgggacaactttggccaaaagccttggcgacggagaacaggtcaaccacttttacattccgacaagcgaccggggggaaatcaacaaatgcagcgtcgaggaattggtgttgcaccatttcattacggtggagcatttcacgcacggattccattcggaggtggccaaaatcaaaaatactctgataaaagcccttcactttggttgggcagggcgccgtttggcattcgctctttcgccttttcttcactgatataatttttgacgccgatgttccgcaagtttggctttctcaaattcaggtggacaaacggaaattattatgcttttgcaaagtcacacattttgttcctctgcaggatgacccattggacttgaattttcccgacttttaccgtaatcggaaggcggcgattgaccaacgactccaagaaatccgttcgactcacaatctcgctggcttttcgcgtcacttttctgacaaagtcaaatcgaaagtcgcttcaaattctcacattttgtggcacaatttccaaagtgctgagcaaatcgccgtttgtctttctgcgttaaaatttgcttaacaattgccttttccagacctttttggcctgttgttcgccccttatgctccacgaccttttcaaagagttttgtacaaatttcaaagaaagtcgtagcggatttcccgatttggtcgtttggaatgaaaacgtggcggaaatggcggtcacttactctttggcatttgtgatgcactaa

SEQ ID NO: 52196 - DNA, 622 bp, Heterodera glycines
atgacacttctgatcgacaattcaaaaatggtgacacaatttaacactcaattatggtcggtatggtaagccatcatggcttgaaggtaaaattgttgatggtaagaatttggtctggaaggtcaaaatccattctttgggtattgtggttaatcgccacataaatcaaattcggtcatttattcccaaaatcccaatttcaaaagattttgtcgaagagcagagaccaaattcgccaacaaagaccccgacgacaaagaacaatcagcctcatggttcgcatgacgagcaaccttccgttttggcacgtcctcagcgtgaacgacgcccgccgaaacgattgaatatcggcccaaatgctggcgctcgatatgaaattgagggataatttcatttaaagggggagatgttgtggatttgacaatttaaatatattttattatttattgacacgattccctgtgtcatcacttggaaatgtttatttaatattgaccttttcactcattcgggtcacttgccgttctctccttcatttttcatttcattgattgtctttcctccgtcatttatttatttgttatttatcatttatttttctgtttgtctttgctttaataaa

SEQ ID NO: 52197 - DNA, 919 bp, Heterodera glycines
atgccatcatccgccaccggcaacaccacttcaacatcgacgagtgcatcgtcaacggcgtcgttgtcgtcaagcagtagttcaacaacattggcagcgtcggccgcagctgctgctgctacggcaccgccaacccaaccagcaaactcctcacaaccaacggctggagcatcaacaacggcaccaaagccggccagctacacgtcggtgatggtggaggattttgagaaccgggcatttgacaaggaccagttccgcttcaacaaactgttggacattcagcacaatgtaaaaatcagtgtcattattttgcatgttattattattttttgctttcctatatgccgggagcagtttaaccttgtgatttttttttcaattttttaggaaattttcaaaaaacttattgttcgaaagtttttataagaaagtttaaagaaaaaagtagaaacaattttcaagcgttttttttttaattatcataaattactaaaaaaaatttatccccgtttgaaaaatttttcatgaagttttttttaataaaaaatttccaataataagattttttgaaaaatctagcttaactattaagaaattatgaattggagccaattaagtggcctgaaataatttgaaaattcaatttttgacaatatcttatttgtgtgttcaggacatctatgacgaggtgttggacaagttgcccgaagtgtcctcggatgagggcagtccgtccgaccacaatttcatcaatgtcctttcgttggatggcggtggcatccgtgggctggtcatcattcaggtaactgagtgtgaaaagtgcactgccgatccgatccgacacttttcaaaagtttagataggctttaattaaaaatgaatggatttttttcggaaaaatgggaatggaccgaataaa

SEQ ID NO: 52198 - DNA, 608 bp, Heterodera glycines
atgccattaaaaattgacaatgccaaaagaatgcagcaaattgtgcctaaagtcaaagcatcagagaatgtgccaggatatttggaaaacaaaaatgaagaaaaacagcaaagaatttcattcaaaaattattttaatgaagtcaacgcttattttaactattatggtaaaaaagcggataattaaaaaaaataaaaattataattttcaggataattaataaatttaatatttaaattaatttagtgccgaaacatataattggactaattgctcttaaactgatcaatgcaattcaacggcacttgaaactgaacaatggtcaattggcacatgtgttgacacctgatcatttggtggctatccgtgttggtgatcaatttagcaagtcggaactgctcggaaatgctcaccttgaaatcgatgccgaaattcaacgcgtggaagacccacggcagagggcacttcccagcgctgatcaaaccaaaatcatttggctaaaagactttccgtatatgagcccacagcaaataaaagtaattctgatcagtgataactaaggaattaattaattttaatccaactaatttactacaattataattaaa

SEQ ID NO: 52199 - DNA, 1108 bp, Heterodera glycines
atgtcaatgcttttatttgtgttttcaatcggtattttgacttggacatatgattatattgtgggaaatgcccatataaacctttccttaattaatgctgaagaaatatttcaaattcaacaatttttgggtggaaatatcggcgactttgtattatattgtggacgaaatgtgagttgagttcttcttatattttataatgtttttttttaaattttgaaggattattttctcggcaaaattacaatgggtctttattttgtcgaaaacataatttgttatgcggtaattgtcatttgtggatataaaatggtcagatttgtttacaaaaacttggacaaaagttcagcaagaagacaacaaattaaccgacaaatcacaatcaatttgattctccaggtaaaattgatgaataatttgaggtgaagttttagattattgtcggtttagtaaattagtatattatgtataacttaattaatacatcatgctaaaatttaattatatttaggcatttataccgttggctatgaatttaataaaccttataatttcggttgaaatggtgatttttgaattccaattgtccccgagttttgtttattcaaatgtgcatcactcttccctttcattggttgcccgtaaatttgtccatttgaatattatgaatttagaaatatttaaaaaatccgggatttatttctacacaagacgtggtttactctacctttcaggtgtatattaggcccctgatcccgaatctgagctctattgagtttcaaatcaattaaaatgtgatggagcagggttaaattttccaaatttcagaccctaaggggtcaacataccaatttccgagaaaatcgacaataactcaataggtattgattgatctgatctgaatataactttttaccatatagatatcgtcaaaatctagcaatttatatttattgtctcatgaaaagcatgagtttaaaaggggaaaagcaaaagtcatgattcgatgactaattaacatttaaaaattttgcagaaaatttgttaaaatagtgaattttttagttttttggtatttatgattattaaatttaaaaaaaaactttaa

SEQ ID NO: 52200 - DNA, 502 bp, Heterodera glycines
acacaatcgacgcgttggcctacgaagcggccaaggttttacagcggcagccttttcttttgtccgccgctggtggaggcggcgagaacggctcagtgatattggagaacggaggacggacagcggcagagggcggcggcactttgacaccgcacgcggcgtccgcgcccgggggaagcacggaccaccagcagcacaataacctgcaggtgctggcccaatcgagagtcttggtcatcgagtggggctttcctctcgagacttttgtggaaaatgtgccgtggcattcatttatatgggtattattttcgcattattcgtgttgttcagccgtttggctcttcactgggcggcggtcgctcctcctcgctgggtggcggttccgcctcttattttgcgggcggaaaacgcgactccaacgcgtccgccatcagcggactgtcgtccggcacctgtggacggatggagcggaacgaactcaccgacactttcgaccgattga

SEQ ID NO: 52201 - DNA, 482 bp, Heterodera glycines
atgccaagtcatatggtgggaaaggatggactcacaatcagtgcagaaaatgcactgaacggtcgggactttggcggggtgccaatttccgtggaaccagcatcggaatgaaccaaaaaaggccttaatcaatctcaaattgtttacaaattatcatttttacagttttgttaatttgttactttttatatgctgtagaatttgttattttttctgcaaataataaagcgaatttacaaaatttatctgttaatgcattacgaatgttattaagtaaagagttatcggtcaagctcggcacatcagttatttatgaagaattcaagtccaatttcaagcattacgaaatgaaagacgacgacctttgaaatggcaaaaaagaaattgacactcattttctattaaagaaaaacctacaaaaattaaactgggcattagcagagcgtaatacctggagagaaatgttaaattttacaaataaa

SEQ ID NO: 52202 - DNA, 113 bp, Heterodera glycines
ctttatcaaacaatcccttaattaattatgtcttcggaacagtccaaacttttgctgcagaagcagttaaatgagttgaccagaaatccggtggatgggttcagtgcggggct

SEQ ID NO: 52203 - DNA, 797 bp, Heterodera glycines
atgaacgccatcggtaagaagaaagattaacagagtcagttggcagaagagaaattcgaagaatttaaaattacagcttttaatggattgggtataccaacttttttgcaaaacattgtcccaacgggtcaccattcggaatctaaccatcgtcggaatttcgaatttgccaactggtttttggccaagaaatctttcaatgatttaattaaattttaggcaccgatacgaagcaagtgctttgtttgttatggtttctaaataagttaataatttgctttatttataggtcaatccatccgttgtgcctaaactgacagaaaagggccttttgtttgttggtcagtgtgtttttcagtggatttttcatttttacgacgttttaattacctattggtatttcggttgactgtctgtcagtgtcttaattttttgtttgaattattctattttgtcagggcttggcattgatgagaattgcatcgtcaatggacaacaaaatggtgccgggcaagtcacgccgtccgctgctctcttgaaaattgttgagaagaatttggcggaaaataatgtaaatttgcaaaaattaaatacgggtgatgcggttttttataatttagtgtattaattttgtttggttggcttattgcctataatttcatttatttattttccttcagaacgaactcgctgaaaaggttgagaaaatttgtggtttcggtgccaacggctcatcattccccggagggactgccattcgaatggaaatggccgagttgccgcgcaacagtcagtag

SEQ ID NO: 52204 - DNA, 1341 bp, Heterodera glycines
atgaaacttcacgacaattataataaaaattcacaagtaaaattttttgaaaattattaataaacctcatcaaaaaataaatttagcacctttttcacaaaaattgcatcattaaatggtaagaaaatgtgtaagattaataatttaaattattttacaaaggattgaatcacagcaaaaaattcgttgtccgctgtgtaattgggaaccaacattcttaatggtaaatatttttttttttggatttttccagccgggccttaaaaaattcagagtagctgatcacgaatatgacatcacttttaataatccttaagccgaactcgagcaaaaaaaatcgaaaaaatcaatcttttcgatcttcgaatttcattttaatttagctttgggatcagaattggtcaaaattaaagggatccctttttaagaatgttagtggtaaaagccgtttaaaatgaaaacataatacaatataatgcttaaagctaattataatatcctttgtatttggtatttgatagctttaaagatttgtcaaaaacaataataaatttataataaaataaaaaatttatgaaaaaattcagaaagtcgagactcagaatttcagacaatagctttttaaaatgagctaatatttaaaattttagactagcttcataactattctcagaagcaagctaaaaaaatctacttactgtcttccgctagcccttccttagattctcaattaacccataaaatttcaaaaaattcgttagtttcttgttgtcatgcaattacactaaagcttgattttacaatttttaattaattcttctaagaagcgattttttacgtataattttttataaatttagaatgcaaatattactgcaatttttaatggacctagcgattttttgtcgaccttggccctgaatccgttggccaatttgttttcgattgccaatgggcctttggaaattgacaatttcaagcgaaatcaagcgcaaaattccattaagcatggcaaacttcttttacaaattatgggcaaagatttgactggcctaattttgctagagcattttatggatgtaactggattatcagttgaacacttttttgaaattggagctgatggcctcgaagaaaaaactgcagttcaacaaattcggaacaaactcgaaattgtcttaagaaagccggagatatctgtagacagaaaatcgtcggctcaggcaatcattaagttgattaaagtgatcagtaatgtctcgaacatgttagcccataaagattttgatattttgcaacatataagcgtgaaattataaaaatgttaaattttgttaaaga

SEQ ID NO: 52205 - DNA, 1250 bp, Heterodera glycines
atgccgaaggtggactttgactatttggacatgttttcacccatcttggtctgtttcgttggtatatatcattttcatttcctttttttcttgttcaggtggcatttatttttgcgctcatcctttttgtgagttctttttttcgtctggtcaataattgacctaattaggagtggacccgacaatcaattagcaattaaatagcaaaaaagccaatgaaagtcgccgaattcattaaaaagattttcttcttttggtgcacttaatcccccctcccgccataaaggaacttcgaacgaaaaaagtttaacgaaaaattcccaatacaattaaaaccacattccatggcactttcaaatttttaatttgatcattatttcccaatcccattttacagttcatctccttcacgtgcatcaattggtactgtatcacgcacaaggatgaccttacggtgttcgaaaaggtcggtgtactgtgtgatcggtcacacattctatacctaatttgatcactgatcatttttgggaaaaattagagctcgacattttgaaaaaaacatggaaagggattcctggacaaaatccaagaaaatccaggaaaaattcaggtgcctacgtatccccctgatcagtccccctcccgaaaaaattaattttttttataacacataaatctttcaagaaaaaaaatcttgaaacttgtttataagaaaattccaagaagaaaaattttcataaaatttatttgaatcactaaaacttcaaaaattttctaaaaaaaaactgcagaaaaatttctgagagttcttttttcttggatttcttataaaaaaaactttttaagatttcttgaaacgagctgctcccgaaaaatcaggttgctgaaaatggcacctggatttctgggcctggatccaggaaaaacacaggcccttgtaaaaatggcacttattttccagttcggcacccgcttgaaccttcgtcttggcccccattcaatggcagtgatcaaacgaggcggctacgcgtccacctacgcccgcgaggaggcaaagcggtcggaatgtaccggaccacaacagcaacaactgaacacgcttggggacggaaaatgccaaattagccacgcttgacaaaaatgattggcatttttttcaaaatcattttaattttgatgaaattttctatgggttttcaattaaccaaagaattttttttatgccaattaattcctcttcttttaatgca

SEQ ID NO: 52206 - DNA, 2171 bp, Heterodera glycines
atggctttttacagcgctgccgactcagaccgacaaccacaaggacaaccagcgccgcaacaaccaccacaacaggaagaactggtgccagccgcttctccgccggcagaggaaagtgttgcgccaaacaatcagccggttgtaccaatgatgccagcctccgctgggcccgagccacaaaacgaacttggcacgcagcatcaaacttcgccacctccgttaccggcacgggcaccgccccaattgcatttccaaatccgcaacctgggccccaacccggagggcattcccggctttggtgccaacgagtacaagcccaacaggaagccattgccgtcagctgccaaggaacagtcgccggctggcagcgctgctgctttttcacctgctccggcaccgcctgttgtgccgctagccgttggcggttctgctaatccatgcggcactgtggcagtgccgccaccagccgttgccgtgccatcatcagcggctggtgccgaatcaacgtatggtggcggaggtgagtatgtgtgagaagctctcggcttctgatcagagcattaattggtcgctcatataggaattgttagtcatttgatcagaggatgtaggtaaaatccaaatgattgaaacaacttgactgataattggtcattttatttttccttctttctgatcaaatgcgctaatatttcggctattcagttttaagctcaatttccgatcaaatcattgttatcagataaccccaaccattcagctgagccctcagccgctgcttctgctgtcggtgccgcggcaccagcaaccgctccgccagccggtggagacggcggttccgcagagacgaatgtgccgacaacagctggtggagtaaccgcatcgtcggctgtcacaacagcagcagctgtatcatcacccataacagcggcggcaccgcaagcttcatccggtgcgccatgcccgtcttctgcagcaccgttgctgccagccggtggccctgctgagcagcaacatgtgccagtaggtgtggaggtgaagccggcaccggccacggcacagattgggcccggcattgccgctgactacggcgaagagacaaacaacggcgccgcgtcgccatcgggtgctgagccacaaccggccactgtcgtcagtccggcgccaggacaacaagcaacaacagtttgtgccggaataagtgccgctccggcagtggccgccccgtccgccgcgtacggcgcggaagaagcggtcagcggcgatgggcccgcttcttcttccgacactgtgccgccttcgacgccaacgtctccatctgctgagggcggcgctgcttcttcgtccgctccgcttaccggaaccgcttcggccgttccaccgctttccgccactacgtcgtgcccctctcctgctgctgtcggaagcgtttcccctcccgctctacacattggcggtagtgaagcagatgggccggcttcagcagcagttggtgcacctgcagttgcaccatcttcaggagctaccgcatctgcatcttccggatacagtgaagaatccgcagcttccgggagcgcttctcccgctccgtccttgggcggcatttcttccgccgctccgttttccggaagtggcgcgtccgcagcgcccggacacgaacagactgaaagtgaattcgcttccggaagcgtttcatctgttgttggagtttcttccgccgctccgtctcccggaagtgccgcgtccggatcgcccggatatgttgaagaaggagccgcttcagtttctgcttccgggcctggcgaaactggtggaccgcctcctgtaagtgctccgtcagctgccccatcatacggaagtgtttctgccgctccgcgtgccggaaatgccgcatcagtctcacccgaacatggagaagaagtagccgtttcgcaatccgtgtctgaaactacttcttccggaatttcttccgccccgacttacggaagtggggcgtccgcttcatccgctgccggaatttctcccgcggctccgtcttccggaagtgccgcgtcaatttcgcccgaatatggagaagaaattgacttttcggaatccgcttccgaaagcgcttcttctgcttcagccgcagccggcatttcgcccacggctccgtcttccggaagtgcagc

SEQ ID NO: 52207 - DNA, 574 bp, Heterodera glycines
atgcattcctcttcaattgatttgcattctcatggcgctgtcggcatttgtgccgtctgcggtgaccgtgctgatggccaccattacggcgtgctttcatgccgcggctgcaacgcgttcttccgccgtgccgttactttcaatttgcagttccattgcaggcgtgacgggcattgcgacatctccaaaagtaagagaattgaagcggtcatttctcagtctgcccacaaccctttgacatttgtcagatgctcgttgtgcttgtcgcgcgtgtcggctgttaaagtgccaatccgtcggcatggatcggtcggcggtccaagtgcggcgcgagatgaaaaatgtgttggttttaggaaacgcacagaacgcagaaggtgcgaaaccgtttaaaatgttaattgatcggacggacttccatcgaaataaaccaatttgaatacaaatttcagttccaacgaattctgcggattttcttctcctttcgccccctcaggccgatggccctccgttccccacaaatttgcaagtgttgggcagtgggaaaacgctcgatttggtaaagattaagtaa

SEQ ID NO: 52208 - DNA, 1289 bp, Heterodera glycines
  unsure (1)..(1289): unsure at all n locations
atgcattttccgacttacagttcgggtggttggttcccttgtaagaatacaaaaacgaatcattggcgatcgaatgtcgtctacatttttttttttgcactacgatttcttcacccatttcattttttgccagatttgtcgactggttcagctaccatttgtcaaactttgagtatcgttggtcatggagtgattggattgaatgtgtcgaggttcgtttttttttttgaaaaatctgttccattatttcgatttttaattttcttaaacctccctcccaaaaatgtttttttaaattttcacagttggattcattgcatccaaagcgcatttttgtacgtgaagtcattgaaaagtgtttgcgcttttcctaccacaaaaaattggtcgaatttttgccctccgaattggcaccgatcattccggacgagccgaacatcatttacattcttgacgaccgtcagtttttgcatattacccattttagaaaccttggtgtagtaccaatcaaccagtcatgccaatttccaatggaaatttgtttttccaatacaaaaaagggttccagtttttttttcggtctacttttggcacacgattgtcagttttggctcaaaaattagggttcgattaaacgactgctcgcgccctaagtaaaatttttgcccattttcagcccaacatccggcatttaccaaggccgaacaattccggggcctcatcatgaacaaggctgacgatcaggaaattttgagcgcccttcgaatgccaagcgatgaacctggcggtggtggtggtggtgaattttccaccgatttttccatcgatgcggtcgccatttttttctccgttttgttgaagctgtcttcgcggacaatgacacattcatttgcggcactgacaaggtatgtagggaaatggaggaattcaaaaaaaatccttggaacttttttcataagaaaaaattcaagaaaaattttttggcaattttncaattttatgatgaactgctaancataagttttttcaaaaaattttccanaaaatcgnctggttngaaagatannaaaaaaattttttggagaaaataaagtgcatgcacccccgcacgaattncactcatttgtattttatttttttacagatacataaacattgcactgatgacgntgacaatgaggaaatgcatcgacattctcagacattgtgagaaaattgaaaatttttatggtcggttaatccaatttccaggaatgaataatggatttgctaacagtctcattatttga

SEQ ID NO: 52209 - DNA, 68 bp, Heterodera glycines
tacgtgttcttcaaagatgtgaagcttgtccaccattaccatcgtactgattaacaaacagcagcaga

SEQ ID NO: 52210 - DNA, 909 bp, Heterodera glycines
atgtcggaactcattcgtcaacgtctcaccgccgaagtccgaaccctttcggacctcgtcaagcgcctccgacaaagggtcgggaggctcactgaattcaccaggatggcgccagaggaaatcccgctcgccgaggagaccaaactcgccaagggcgtacgaactgaccgacaattgctacagagaagcatcgaccgtgtcaatggcatgctacaggaatgttttgaccacattcagcggctaggcgacccgtttctgaagcaggcggaggaggacctcctggccgcactcccgaccttcgacgacgagcaagccgacccaaatgtcgaagaatggccgatcatcactcttctctctaaagcccagctcatcctcgacggcctccaagtctacatcgaggctcgattcgacacgacggacgccatctcttctcgcagcagcagtcgtgtttctgatcacggggccgacgacgaaaaccggatccaccgccaacggcaatccaccgacccaccggctcaggcacagcaagcaaacgcacggcagccttccaattcggctcgagccgatcaaaacctattcaaccagcgaaccccggcattcccgcttaatctcacatttccccgagcatcgaatcgccccacccatcgatcggaacctcaccatggccacttccgacagtcgaccaatgacgacgacgcacttcgggtcagccgaatcgaaatcccgaggttcagcggatcggcagaagaatggatcacattttgggccgcctttgactttgccgtccactcacgccaataccccgccttccaaaagcacctcctcctcctacagtacctcgagaagggatcgccaccacgacggatgattgaaggttacccaccgtcagacgccaattacagcacagtc

SEQ ID NO: 52211 - DNA, 234 bp, Heterodera glycines
ttcactttcgaccatccgtcactcttctctctgccgccagccgaccctttaggctcccggcaactcaacccttcgctgtccgacgaccatcttaggcctccggcactcatcactcaactcaagtcgccagccgccctttaggctcccgacaaaccctcaccgagtcgtcagccgcccatttcaggctttcgaccattcatcactcttctcccagccgccagccgccctttcagg

SEQ ID NO: 52212 - DNA, 396 bp, Heterodera glycines
atgaacggctggaagttttttgtggcatttacatcgaatcactgggcaattttaaggcggcggaaatggcaaattttggcacttattaatgcgagtattaaattaatcccgagcaattcacagagttttgatgccgatttgtacctctatctgagctggcaagacccctcattggcccattcggacagtgattttgtccttttgaatgacccaaaaattcgccattacatttggtaacattcaaaattaaaaatacatcccataatttgtgctcattaaaggctgcctgacctttattttgccaattctcgcaccagtcgtttccacgaagtgattgcaccgaatttaaatttatttatcgaccgaaacggcacaattgcctattcgacacggtaa

SEQ ID NO: 52213 - DNA, 277 bp, Heterodera glycines
atgtctttgctcgccttcctcacttatttggtgttcatcgttaccaaaatcgacaaaatgtgcgttttccctttcatttctcacttttgcctctttcccttaaggatcaatgatcgtgccaatttgctcgcttctttgtacgtgctcctcatgttcttcttgatcacttattcatatccctttttgccggggaatgttgaaacctttcaccaccaaagtgtcacatttccattttctgttccattttttcattttcagatcactccaatcattctga

SEQ ID NO: 52214 - DNA, 973 bp, Heterodera glycines
atggctcgccgtatggggatgaacttcgacagtttcgtcgctctcgcagtacgcgcagaagaagtgcaaaaggccacgaaatcggctgagtctggaaacaagcaccgaccaaaatttcaacagaaaccgacatttcaaccacaaaaaattttcgcgccaaagacaaaccgaattgtgtgctacaactgcaacaaaacgggacacatttctcgccattgtaggttgccctttgcgcggaagcaatccaactgtgcacgaaaaccgccacaacaaaattttgcgacgaaaagtgccgattttcgaaaaaattcagaagctgagaagaaattgattgatttgcggttgtcgaaccaaccaccggcacaaccaacgaacgtggaagctggaccaaaacggaaagcgtccaaccgacagcgcaattcgtcgtcaagttgcagcgtaaaagcaacaaaaatggaggaaaaatcggcggaaattccaaaatggtttttgaatgctattttcgctgcgttggttgtgttcgccggcgtattttcgaaggaaaagtcaaagtgtggacaaatttggaaaagtaaaggctcaatgagtcgcaccgacgaagtgaaaggacggaaagcattcggaaaattggggacaattttttcgccgaaggccggggaggaattggcggatgtcgcagccgccaatcttgaaaatttgttgaaaatcggcaaaagcatgaattttccaattgctgatcgcaaatgtgcgcaagaagctgacactgatggaattttaaggccagaaaaaagggcggatttccgttttgtccgttgcttttacagatctgactctgcaacgcgacttcgtgccgaaccggtccactgctgacacccttgccgcccctttcaacgccgaatgcactaccgatgagcccaaagcgctgaggacatcgcttcttagagggcgaggatgtgatataattgtgatttaa

SEQ ID NO: 52215 - DNA, 661 bp, Heterodera glycines
atggagccttttgtgtaagacaataacaatttactgaaaacattttaaattgcatattttgcaccattttcaggaatctttacgacttttggttgggcataattccgttttctgactcaattcggcatttctttcattttgtttacgatgcattggaggcaaacttttaatggcataactaaattggcaatttggaaaacaattgtaattgtacgcttattgaatggtgctgctggactcaaaattaacacagatattttaatattaatgaatgaatggcagcaattaccaatgccaacgcatccgttgcctaaaaacatataaaacccattttggctactttatttatcaagttcagttttgtgtttgctttattttttgtccttatttcaacaatcggatatattatagcacctaaagaaattcttcccgacggtgccgattggcgcgccgaaagaaggaattggcatgccactttgcttcctccacctttaatatttttcataataagtaaaaaaaatttaattattaattaattttactcgaaaaaggcgacacataaaatgcgtatgtttttacatacatttgtttatttgttttcaattttatataattagaattttggggaagaaaaattatttatcaaaaagtcgtaaataaa

SEQ ID NO: 52216 - DNA, 771 bp, Heterodera glycines
atgacatccaaaaatgatgtcacttttcttcaaaaatctccttcaatgagcgatatgaagccccttcgacttcgtagaccaagcattgtcagcaccagcagaagcggacttgggaatttgggagtggtaaaatacaaaatattacaaaaaaatatatatttaaaattatttttaatttatttcattatgatattttacctcttcattagagtttcgaatgttgagtctgtcaacataactacaagtataatgtaaggattgttttcagcaatgtttgaaatcccgacaccgaactttttggttattttttagggttatttccgacctcgagactttttttaaagacgggcttctacaaattaaacattaaaatgtttttaaattccttaataattgaaaattaataatgtgaagctttcctttttttaattaaagatttatctatggatctgggattaattacccagtaattagattaagccattaattaatggttattaattacattaagccattaactcgtcatctatcgattgaaccaccggccaatttggctgatgccttgggaatgcacaatccaaattgggctttttatcactacagttcgcccaattatcggtcagcgtggccatggcgaatgttccgtgaccgtttcgatgtaagaagcaattggcaaaaatgcaaaaccaaattaaatgcattttttgacaaaaaatcgtcataattttctcgaaagtaatcaaaaaatcactatatttttctattaaccta

SEQ ID NO: 52217 - DNA, 228 bp, Heterodera glycines
atgtacaataagcacttctctgtgcagcccatctacagaaatgtgccattgaatgtgccatcgcacagaacgtaaaaaatatttttaaaaaatgaataaatttcttatttagcaatttttccaaccaccaaagagctgggtattggtcatttgactacgattatatgtaaattatatttataatgaatatttgtttagttaattaattaatggaaccacattaaatta

SEQ ID NO: 52218 - DNA, 595 bp, Heterodera glycines
atgtacaagcaacacgcgcaagcactgttttccgttttgtcctcctttttgtgcagtgttggcacgaaagggacagaaaaaagtgactgcaaaacgacgcatttggacaatgcaaggcaaatgtacaagcaaatgggggtgagtgagcatcgttcgaaaaggccgatgaattaattggtttcaaataaccattatttttcttgctataaattttttaaaccctataacattgtttaaatagcttaactacattttttatggtattgctggctgaatgtttgccttatagcttcatagtttcaaaaaaaaattagaaaccaaaatgaagttaaaaaacggcgccgccgaatttaacaaataaatccacaaaatagctttctttttacgattgcttcaggtgaccgacgagcagaagattaagtcggatatgcttcttgcgcgtcggacagtgttcaatacgatcattgcgtacaacgacgccaaaactggcgaggcagtgcacgcggcgattgtggcagtccgtgctgtgattagtggcggaggggacgcggcaaacgcggccgtcagctcgagcgagttgaccaacgagtactaa

SEQ ID NO: 52219 - DNA, 1845 bp, Heterodera glycines
atgccttcaacaaatgcaaatgatggcatcacttccgccgatgatgcgactcgattgagaatggttgacccggtcgatcgttattcagcattaatagttcgtgtaagttaatcctcaatgttaatgcttacaaacctctaataaataggctattcatttaggggctgatagttggaacgggtgcgcttggattaggacttttcattcgaaattcaaaattggtaggtattcttcaacaagttttttgaaatgcaataagttaggtaagcagtttttctatgcattatttttttaaaaatttagtttgcagcttttaaccacgtgaagcaaataccgcaagattattatcagaaaggaataattatgaaaggaattgtgcgcgatttggagtcaaatggcataatcaaagtggaacatcgaccagcaattcgtattcctagactttttggtaccaaaaaatcgaaagtggtaagaattttttaaagaatagtttagtggttgactaaacggttataattatagtgtgtgtgctttgccgcctttacatttttcaaaaaatagtaaaaatcctagaattgttcaaaacagcctctttttgtgggaccagtaaactatacattcaccgaatccggttttcttccgaaaaaattccggggcctaaggcatattgcattttatacatttaaaatattttcattttaattctttaatttggtgctgtgctcaaactttccctgcagaaaacttagtccacttgcataaacttgatttagttatttttaaacctttttttaaatttcgttcgtcgattgtttttttcagtttattttgccgttttagggtggaaatttgaatcttcgcttggctggaattgaattatcccctgttggaattgaatatttgcagaaggaaatgcaattgaaaggacgatttgtgaaattttctgtgataaaattagcacaaacggaaccggacattgtggaagcggacgttaccgcaaaaaaagttgtagaaaaaaaaaaaaaaaagtttttttaaaatattcctgcaaaattataatgtcgaattaaacaatttccttccttttcatgctatccgtcacgttaacctcaacaccgaactcatccgcaagggtttcgctcgtacgccaactctcgacaaccattggcacagagagtcgctccaattcaacacgaattattcccgactgatcaccaggctgttgacctgtgagaaggtgcttttatgtgccgatttaacaaattgtttcattttttaggttgccgaacgtcgcggacttggcctttgggaacgcgccacttgggttgagcgtgttcagtcgtacccatcgacggcagtgcaaattttcaaacactccgtgcccgccaaacttgcggtttatataaactgagttaatccttcgtaaaacaattaaattgtttaggtattcagtttcgagttgctcagagatctgtccatggttctgtactccatcgcccagaacatttattttatttgcgtggaactgttcaaatactgcgcatttggttaccgaaaattgtccatcggaatatctaaggcatttttgatctacacaaatgccaaaagacatctgatccaaattggctcaaaaatcggcgcgcgacagtcaccggcggggcgagaaattgccgcaacggaagaagaacaacgcaaatagaaaatcccaaaatttgaattatttgtttaattctgctcaattaacaaagtgatcaggaatatattggacttttatgacttttattaggaaaataatttgccttaattgtttgaatacttaaacaaaataagaacgaaccaaataaa

SEQ ID NO: 52220 - DNA, 1121 bp, Heterodera glycines
atgtatccaccgaaagacagcgacagcaacttcttcccgaatcgaatgttgagtgtggacagaagccggagcagcagctcccatctcgtcggtctcaatgctgctctggtgctgtgtgctttttgtttttgttgctcctctaatgactgactaatgaatgaatgcactctcaattaatccaatcgcaaaagagtccaatcatttttgttatgagtcaaattactttgggttttgttgaccgttgtgactttgtttcatgtgttaatacagctatttagctacaattttggtatcattcaaaggcattaaatccgtctaacttcttcagacttaaaagtcatgaaaacttatttccgagggttttcggggtccctaatcacgggcatccatttcgaccaatttcgagccccgggaatgcattagttagaaccccatatataattatgttgctatactgttaaacaattttgattttgtcccatttttttgctacagcaaggctgccgttcggacattccgttcatgttgcagcgtgtctcattttccaaggacatcaaattgcatcggatgcttcgctatctgcgcgcttgcttcgtccgtgacatccgtgaacacaaccgtggcttcaacaatgggacccaacaaaccacaaaatgccaaccggagatgatcgaccaaacgaatggcgtggtaaataaaatgaattacgacgaataatgatgacattttttggaaaaaaaaaatatttttttttgaattttcatattttagttgaacaagcgaagctggctggagcagaacgcctactttgccgagaacaattgcttctacccattctacggccaagcagtgttttacgcatcgtttggccagcacagtgagggacgggtggtgtgctgcagcgatggacgcattgatgaggaagagagcttcaaggaaaattgcaagaaaatgacggatcacatttacgcagccaaagctggatggcgcaagggaaaggatgcccaatgaagggacgaaccgacgatgattgatgatgatgtgattgatgaatgtcaatttctatgcatattcatttagcaaaatattgcggttatttttgtcttaaatactgtaataaa

SEQ ID NO: 52221 - DNA, 550 bp, Heterodera glycines
atggctgggatttattgtttgtttttttcaggtaagttttaggcacttaaacacattttatcaacccaattttcgcaaaagagtgacttttgaacaaaaaaactatgctaaaaaatttaaaaatgaaaaatttcgccgaaataaaaaattttcaaatttatttaaaacaaaatttctataaaatttcatataaaaggatcattgattgtgagaaagtttaaaaaatatccatattttggacaatttttggcatttcaaattattgctttttagtatttccggctatgaattattcaagaggcatataccgacgtagtaatgaaaaatgaggcaatgatcggaatttttcgttttttaaggctttctcatacttaaaatttataattcttggaaagtaaatttgttaaacaaattggaaaaatttcattttattttaagaaattacagctaaaaatcacaaaattagtcatctgttggacgttatgtgaattaattttctaaaatgagaggcttttgtaaatttccatctctgcaattatcgataaataaa

SEQ ID NO: 52222 - DNA, 995 bp, Heterodera glycines
atgatgatttatgcatatgcaatttcttttgttattcatcatttcttattgtcattttcaaatgcagtgccatcagtgagtttctcaacagaagtaattaattggggtaattaactcatgctaattaggttgacgacagcgcactaattgcatttatgaaaagcgatcaaaaaggaagtcaaaccaatgactataaatattcaatccaaaaatatgaggcccatcttggcattctgcattttatggtgaagaattggcactgtgacaaaatgggagaccaatttgagggtatgggacaactcagtctaatgccaactccgtcccaatgcttatggcaaacattgaaatatttaaaattttgtttttaacattactatttaatagtgatgctcgagagtcttggcttcgagaaaccatcgggttttttgggtcacggcttcgagtctcggggtcgactctgttcggtctcgagcatgactattatttaaacatatttttggaggaaaattaaattcaagaaattttaaaaatttatatttaaaaataaaggcattcttaaaataatttttacaactttgcatttttgcccgccaaaaattctcaaaaatagcattttttttttgcataattttacaaaaaattttcccaggacccacagtacaaaatttttcaagagcgagactttcaaggacgcggaaaacgcgtccttatatattttgggatggtcttgaccagactgaggtgacccaacttgggaatttggagactttgaacggacagaatgccacaaatatcgccaacttttggaccttttgtacgaatatttgtaccgagaatattttgacggattgccaacagtgagaccaaaatttgtacttaaaaagcgacgagaacaatttgaaattgaagccccattaatttatgtggtgaattgcatggccagaatctcgagattttatttcaattcaaattgggccgagaattctgaatggaaa

SEQ ID NO: 52223 - DNA, 190 bp, Heterodera glycines
atgaaagtgccaaaattggaggaggacaaaaagaaagtgccaagatgggaggaggacaaaatgaaaatgccaaaggacgacgacaaaatgaaagtgccaaagttggatggggacaaaatgaaaatgccaattaatgaacggattttgcagttggcaattgatgtggccaatcatgatcagacaaatgaaa

SEQ ID NO: 52224 - DNA, 631 bp, Heterodera glycines
atgaatattctcactgtaaagcttctagaaaacaaggggataaagtaagtcacaaccaaatctttaaaaaaatagccgccaataacagcagaaacccaattaatacaagaaccaatccacccacctaaacacaaggcattgccgatcaggccgaatatgttccgaaattgacttcacttgcggctcttaaatgaaataaaatagaaaagcatgaaaatatgagaccgaccaaagcccaaatcgaacattcggtcgacttcgtcaaagacgagaaaagttgtacggagcaaattagtcgcctcaatttttaccaggtcaatgatacggccgggcgtacaaatgcaactgaacaaaaaaagcaaggcaattaggaaaagcaattagtaattgaaaatgaaaggaaataaaatgaaaaaacattaaattcaaaaataatgtaattaattttacagctctgctccctgctccagcgccttctgttgctcatatttcgagccaccgccgtaggcgcaaacaacagaaatgttgtacggcacgcagaatttacgcgcctcgttgtaaaccttaaattaatttttaaagaatgaaatggtgggcaatttttgaaaaattttaatcaagttttttctta

SEQ ID NO: 52225 - DNA, 2167 bp, Heterodera glycines
  unsure (1)..(2167): unsure at all n locations
gtttatggacgaatatgccaaacggcacgaggaagaggacggcgaagtgtacgaatatgacgaggacgggaacatcatttggacatggaagaaggtcttacaattgactaggaccagagaagatcgaagaacattttgaatggccaggggtggactagctattcccgaaaagtcgagaccagggatcataaatcttcctagaattttcctttttctctaaagtcttcaaatgaattaagatcatcgacccattgccgccaattgaccatgctaacattgagtaagtcagccaatgagtgcaaataatgccaacatttgtgtgtttgtcccatttttatgagttgtgtaattttaggtacaagccattcaacaagaatttttatgtggaacacggcgaaataaaggcactcagtccaaaggacgtgttcgaactgagaattgcgcttgatgtcagttgtactcccccccccctcgaattatttttaaaattaaatatttttgcgggggaattacgtaatcatttgttctgactacaaatcctggtgccaatttcttggcacatttttacatccattgtcagatccgagtctacggcaatgatccgcccaaacctgtcgtcagttttgcgcatttccaattcgacaaagtgctgatgtcgtcaatatgcaaggcttcgtttgagaagccgacacaaattcaagcacaggtcataccgtaaacatcacagtttcaatggtattgtaggcaatttgaaatgtttaggctgtgccagccgcactcgccggacgtgacgtgttgggcctggccaaaacgggcagcggcaaaacgctcgcatacatttggtaaccggtggaaagcatacagtaatcaattcatacggtttaggccagtaatttgccacattttggaacaacctgaactttgtcccaacgacggtcccatcgctttggtggttgtgccaactcgggaattggccattcaggtcgctaattcattcattttcgggaatcgtagtctgaacaagcccataacttaaaaaaatctcggaaagggacaattttctccagtattatattaaaatttcagtgcctgagagcaaaaaaaaccaacaagaatttgtagccgtttttcgccaaaaaaaaaaanaaaactaanttttgccattttggtgttaaaaatggtaaaatggaggcccggcggtgccgtccgccggtaataatttttgaaattttaatgtattttattaagaaaaaacttgattaaaatttttcaaaaattgcccaccatttcattctttaaaaattaatttaaggtttacaacgaggcgcgtaaattctgcgtgccgtacaacatttctgttgtttgcgcctacggcggtggctcgaaatatgagcaacagaaggcgctggagcagggagcagagctgtaaaattaattacattatttttgaatttaatgttttttcattttatttcctttcattttcaattactaattgcttttcctaattgccttgctttttttgttcagttgcatttgtacgcccggccgtatcattgacctggtaaaaattgaggcgactaatttgctccgtacaacttttctcgtctttgacgaagtcgaccgaatgttcgatttgggctttggtcggtctcatattttcatgcttttctattttatttcatttaagagccgcaagtgaagtcaatttcggaacatattcggcctgatcggcaatgccttgtgtttaggtgggtggattggttcttgtattaattgggtttctgctgttattggcggctatttttttaaagatttggttgtgacttactttatccccttgttttctagaagctttacagtgagaatattcattatgtaatctttatttgggaattagagcgcgaattgtgagctcgggcggggtgctaataggcaccacaggaaaagccaaatttgcattgcaatttgttagaaaactgatacaaattaaataataaatgttattttcttgaccacttcagtgcaacaatgaagagcaagatcgaaaagttggtgttccatgcgctgttcaaccccgtgaaaattgtgtgcggcgacgtgggcgaggcgaacaccgatggtgaagggtcggttttggtggtgcaggacacacaggccaagttca

SEQ ID NO: 52226 - DNA, 211 bp, Heterodera glycines
atggaaaagcgcttaaggaaaattcatccaaatcagtggaaaaagattcctaggctcgctcaggtaattccaaaataaagcagaaaaaagttatttttggcaatttatgggtccccagagaataattttcagaaagtatggaaaagcgcttaaggaaaattcatccaaatcagtggaaaaagattcctaggctcgctcaggtaattccaaa

SEQ ID NO: 52227 - DNA, 211 bp, Heterodera glycines; identical to SEQ ID NO: 52226

SEQ ID NO: 52228 - DNA, 200 bp, Heterodera glycines
atggaaaagcgcttaaggaaaattcatccaaatcagtggaaaaagattcctaggctcgctcaggtaattccaaaataaagcagaaaaaagttatttttggcaatttatgggtccccagagaataattttcagaaagtatggaaaagcgcttatggaaaattcatccaaatcagtggaaaaagattcctaggctcgctcag

SEQ ID NO: 52229 - DNA, 1387 bp, Heterodera glycines
tacagttatggggaaaaaagctccgaattgtctttgatgcctcttcgcacgaaaagggagcccggtcactaaatgacaccttattttctggtccaaatttatacccggacttggccgggaaactcatacaattcagggccactaaatttccaatttgggctgatattgaaaaggcctttttaatgatcagcctgagagaatctgatcgggagttttcgaaatttctgtgggtcaaggacataaaagctccactctcgggtaaaaatatcatagtttttcgttttaaacgaattacgttcgggatagtttcatgtccgcttttgctggccgcaacactcaaatatcatttggacacgcaccctagcagtctcgccagggaaatagtcgcgaagtcattattatacgtagataacctgctcttgttggcagacacgcatgaggaagctcgcagcaaggccatcgaagcgcaaacaattttcgccgcggctaaaatgcgtttatgcgaattcatcgcagcggttccgattagtcttgtcggtatacccgaaaaggaccggcttgaaaccgagactccgaatgttctcggaatgaaatgggttattaatgaggacaatttatcgctgtctttccctccggttcccggtcctgaagggctaacacggagggtggttctaaagacaattgcttctttttttgaccctttgggtttatgctccccgtgtctcgtggggcccaaaatgttcttccaaaaattatggaatgaatcccagggatgtgatgatctaattccgattgctgaatgtacggaattgatgaaaatccaaaaacattgggatagtgaaatcttatcaatcccacgtcacactcgccgagtaggcagcaattcgttgcagttacacgctttttccgacgcatcgcccgaagcttttgcatgtgccgtctaaattagggcagaaatgcaaaataagaatgttgtgtcgatggtgtactcccgttcgcgaattcgtccaaagaaaatggcgactagtcaatcggatggtctaaccatcccacgtttagagctccttggaatcctaatcggaacccgagcaattaaattttgtgaaaaaacacttaaattacgacatcaaaaaatgctttctttggtcagactctcgcatagcactttcttggttggcttcaaccgataaaatgccaatttttgttgcaaaccgggttagagaaattcgttccaatcggctggtcactttcagctatgttcggtcggcggataaccccgcggatttggcgactcgccaaacaacgcccgcagagctgaaaaacgccattctatggtggaatgggccagaatggctgtccaaatccaatgaattttggcctaaagagt

SEQ ID NO: 52230 - DNA, 594 bp, Heterodera glycines
atggaaaacttggaacggacactcaatcatactcgtttgactagacagcgagctcaaaatgaagggatattgctcgacagagatggaaatgttttttttcgggagaatccaccaaatagaactttaggcgtgatgaaccaaaacgtggtggtggcggatcccaatttggagaattcggagcagctggactcgatggaaatgagacggcgccttttgaacccgaacaatgacagcgcacttggacagttgcgacaaaatgaacgtgctagccttgacgaaaacgaagaagaggagacaaagcaaggttttatgcgaaaccgaacggattggacacaaaatttgggagagagggcaggcccaacccaacaaatttttcgaaattttggctttggacatacccaaaatgaagatgacttcttcgatcatccaaacattagaagaacttcgactccggtcaatgaaaaccgctgtgttggggttggcccgcaaaacctcaatgaaatagggctgttagccgaacaaattgggagggtcatcgttggtcagctaaatagtgctcatcaaaatccgaacacaaacccggcaccaaattga

SEQ ID NO: 52231 - DNA, 1285 bp, Heterodera glycines
atgctcggagtcggaacgtccattggcccagtggttggagctgatcggccaaggccatgcccagttcaaagtcaagtaaaagttgccattttgtaaatttgccctatttttcatttaaataagccccctcttccaagatgcttgggaacctcgacttgagaaaattttcgggtttttttggtcgcagtctcgagccttaactcgagaaaagtgtccatctattgctgccattgcctctacagaaaattattttttattagaaatggaggcatttttcaaaaaattttcttttttcgcttttcttgtgaaaatatatttatttttttaaattaaattttattaaatattgtcttaataccatcaccgaataaataaggcgtgcccattgggactgtcttggcgaagcgttgacagacgccgtctgtcattggcttccccctgggcgtcaacgacgtgaaacagtgcgcgcctggcgcgtcatgctttcgttcatctctgatcggctgggtgagaaatatattttttgattttttttttttttttgatcagcactcctcatagtcagctgggaagttttcatttccgaatatattgagtattttttgatgtcattttgatcatcaaagatcacattaatccgtattttcctgttttggggtcgcatgccaaaaaaaaaagcaacaaaaatgcgcgcgaatttacaaagtgcgtaaagcattattttgggcacataaatgcaacaacagttaaaatctcttcgaaatagatcagcttgagaatattatgagtgagtttgtgaacccaaaatgaggaaagtacacgctaatccgatgaaattcatcttttaatccgaattcgatcaagaaattaaattttttttttaatgaaaaattcgattgatgctcatttggtcaattttttaatgtaaagtccaaatccaaaatcaggaaaatttcttggattagaaccggtcttgcgataccatgggaccttggaccaagaccgaaaatccatcagatcttacataccgtatttactgaattagagccccctgaaataaaaccccactttcgagggtggttgaaaatagagcccctgggggttctaattcaataactgtggtaaccttagcagtggaaatttaaaaaaaaattaacaggcacacaaatgccgtctgctggccatcatgggccaacagcgtgccaaatgcatcatccacgaattgaattgctacagctaatcgcagacggcaatggtgctggttgttcaagtcaccaagaataaa

SEQ ID NO: 52232 - DNA, 375 bp, Heterodera glycines
atggatataaatcttcggaaagtaagttttttttagtttttagtcataaattttttgaaataaaaaaaattttgagatcttgcagcttgatagagaattattcgggctaccgaatgataacagattcattcaatttggacgactatgagttatacccaaaaatcgcgctgtcgcccaattgtccccatcggattttaaagcgatttttttcgaatttgcacctgatcagcatctgttgatcatggcttaacagaataccaagatgatactgttgttgaagcttgaggcgttgcatgctggtgatcggggacgcgctacgtgaccttgagaatattttttagacaatgtttaagccacactgatatttgatatgaa

SEQ ID NO: 52233 - DNA, 326 bp, Heterodera glycines
atgcatccaagtgtgactgaggtaagaagaaaataaataaatgaattaattaaataattatgtatttttagaaacactccctcaacggatttataaataataatcataataataacaacaataacaatttgtcgccaacaaatttagttttttgccagactgatggaccacaaagtcgtagcaacaagtaatgaaaaatgcttttatattttataaaaaattaaattatgtaaaaattaataaaattaaaattccatgtttcagccaccttcttactgcacctgaaaattcacaccaattactgcgaaggtaataaaattaataaa

SEQ ID NO: 52234 - DNA, 300 bp, Heterodera glycines
atgtcgtcaaatgaagaagaagaatccggcggttcaaatgatgaccaattttcgtaagtataaatttatttaaatttttttaagagaaatgtctaaattacttgagttcacaaaagtgtggtgtcccatgtcggaaaggaccaagttggcgatggcccagttttttggttaaatgttctgtctcatttcttcgaaatgaaccaaatttgttatcatttaatattcttaacaagtaactgtgctctattagcctgtaaaatttcaaaaaattacgttgagtttcaaaaaaaaaacaataaa

SEQ ID NO: 52235 - DNA, 73 bp, Heterodera glycines
atgttcgccggcgccaaggaaaaaggcgggcaaaagttgctccagcaaaaggacggtctcttcgatgcgttcc

SEQ ID NO: 52236 - DNA, 356 bp, Heterodera glycines
  unsure (1)..(356): unsure at all n locations
gcgccgcattcgtgacgtcatcctcgnccttgaccaattgttcaccgatctcatagacttgacgacccgctcaatgcccaagcggcgcagcagtggcaaaccaacaaagntgaatgaaaaatgccaaaaaaagcnagtgataaatgaatcgttcaggatggatttgcccaaaaagtcaaggaatacatgaccaaatactgcccaagaaactgacaaaaagacggagaaagggaaaagacgggcgataaattggcaaggattctttaatgatggacggatttgactaaagtttgttttgatcggacattatttcaactcgtttacatttgatcgttgttataaattttctattcttt

SEQ ID NO: 52237 - DNA, 955 bp, Heterodera glycines
gttttccgcctgccaattggagcgttccaacatcgaaattccctatcgtcgtccaaccgccggcttttgccttggcggttcgcgactgttccatcgctgtcggaggcaaccgtttgctggttgtgtgccgaatgcggtaggcaaagcaaattttgaacactttcatttatttttagttaaaatttttggcctaaattttagaatttttggtgaattttttgatgcattttaaatagcctctaaatgctaatatctttaatactgctcaagatattacaatatgcaggtttattttgattggaacaaaatggatatgtattattttctcgaagcctcaaacatccaatttttgctggccgcaaaattcctttaattttgggccttaaatgtggtgttaaccctttgttttcagctccacaaccgtgttcagcctcgtctctttgagcattcctttcctcgacttcaccatttgccggttacgccttcggttttgctgccaatttccaacgaagagctttacggtgggccataatttaaattttaaaaagtttttaaaatttttttttcaacgaaaaactataaattaaaaaatttacaagtaaattcattggaggaatgggcccttcaaattctacctgaaaaccccttaaaagcaaaaatcaaacggattcatttatgcctcgacaaattccaaagaaaatttcaaatgtttcccttttcaaatttcccattttcagccccccttcagttccaaagtgtgctgaatcggccccttttggacattgtcaaccgcagccattggaacgaagccgaacaaacactcgtcgaacagctcgaccgacagaacacaaaaatatttttccgcaatttttatgtattaacatattattactttattaatttaattttctttttaagaattccaatttgagcgcgtatttgcctcctcaccacg

SEQ ID NO: 52238 - DNA, 852 bp, Heterodera glycines
atgaataaaaaagttatcagaagggcaaaaccacttactctgacgactgttcagataatatgtcgtagagtaagtgataaatatatggatgaccaaaaaatcaaaatatattaataaaatgaggtcaaagtcaattgagatcgacagtataaatgccaaatcacttaaaaaattaattctgttttttgcttttccggttattaccctaatgaatttttaagttttgttttaaattaattcaaagaatttgtttttattagttctttatcgagtttattccacaattttgttaccctcccagcaaagggaatgaattttttgcctagtttatattttgtgttaaatctgtaaaaggggatgttaaagcgtgttgatggattaaaaattgaaaatagtttcagatctgttcggccataaaaatatacataaatcctaaccttatataaatgtaacaacaacaaattttattcgagaaaacagagatggagcagcattcaaagcaagaagaaaaagtgatggacgatgaacagttggaacgcttgtcacaaacgctggaattgctgttcagtgccggctattttcgtgccaaaataatggggcttggaaattttgacaaagtggggacagaaagattaggctctagatttcaaaataggtagttataaaaattcccaattttcttggccaaaatttttaaacatttgtttggtaatttttagagatcgacctggacctgaatccaggcctggatttttcctggatccaggtctaggtccaggccatttttcggcagcctggatttttcctggacctggattttcctggatttttgtccaggaaatcaaggtccag

SEQ ID NO: 52239 - DNA, 1121 bp, Heterodera glycines
atggccactaaatcagcggccgcaacaatcgaacgactgcgttatctcttcacgcgtcacggtataccggaaacattggtaaccgacaacggaacgcagttcgccgccagtgaattcacaaaattcacagaagcaaatggaattgcacatctcttttccgcaccgtacaacccaatgtccaatggacaagcggaacggttcgtggacacttttaagagagcatttcgaaaaataaaaggggagggagtgccgaataaagaaatcatcaacacattcctggtaacttaccgcacgactccgaacgattcgctgccggacgaaaaaacccctgccgaaatgctccttggccgaaaaccgcgcacaacgattgatctcctaatgccgcctcttccacagccaacggagagagacacaaaaatggagcaccatttcaatcgccggtttggcgcccgaccacagaaatttgtgtcaaataagccagtttgggctcgacaccgactctcgcagaattggagagctgggacaatttgtgattgctccggagtcatctacacggtcaaattccccgacggttcgacaaatcgctttcatgcgaatcaattgagaaaccgggaaaacaccgaaaatggccacgaaccattggcaattttaaatgaggcattccatctgccgatcaccgcaccgaacgttggaattgtagggcaggaccttgagccaaggcctgacccgatcaacgatgagcaccaggacgagatcgaaccggagcaggcccgtcgaagcccgacaccgcagcaacaacaagtgccgcgccggagtggacgaaaccgccgagcccctgatcggtactcgcccggatgagcccaatcaaaaggggaggtgttcgggtgatgaccccgagagagacatttaatttattttatttatgtaattccctctctctgtctcccgcactatttctctcatttaattgtgtctgcactccctttgtaaaggtcagacacatcattcctcccccacattgtgacccccgctcatttccataattcattctgtcttcttgttgtattcccacatttcctccaattgtcctccgccccaaatatttatttatttgttttcca

SEQ ID NO: 52240 - DNA, 750 bp, Heterodera glycines
atgccaacactgatgcggacgagcagttgcaaagaaactctgaaactgtacgcagtgcaactcgaccatggcgaaacattgcggacacagaattggcacaacgaaacgaaatggtggggaggggttacggaaaatcgacagggtgaggggagatcttactcaaaaaataatgtcaaaagaaaaactacagcaacaagttgatgcatattttaccaatttggcagggattacgtggacactttggtatcccattccaccgacaccggcgttccgtcgccgtcggacgctgagaagacgtacgctcagatcagctcgtacaccgtctcccgccattccgtccatttcgcacttcgaaacaccggtgcctgttcttccattctttcagtcaaagtttgaaaatgaacaaaatccttccctcaatctatccattgttcagatttattacaacgtttgtcccgagcagacttcgccgccccatcggttgcgtttgccccgcacggtctcttcccgagatgcccatggcgttgtcactgtgccgggccgttgtgcagacaatgcgtcgccggtggtgccgacagacagcaaaagtgagtaatcgaaatgcgttactggttgtgaattcgttgtcctttcagcggggcaccgccattcttccgccgcctctacgtcctccttttcttcgccgtcgttgtctccaccgaccgcaatttgcaagtcggacggcacgtggcaagtgttgggtccgactga

SEQ ID NO: 52241 - DNA, 1396 bp, Heterodera glycines
atggtaactttccatatagcgcctcattttgtccaattccctttttactctcaattcgtgctttcttttcaggctggattccctccgggcgtggtaaatgtcgtccccggcttcggcccaactgctggcagagccatcgttcagcatccgcaagtggacaaagtggcattcaccggctcttccgaagtcggactcgaagtgtcacgcgaggcatccggtaaaaatctgaaaaggtgcgcagtgggtgagtcaggcaattctttttatggccggcaatgagtttagaataacactcgaattgggcggtaagtctccggtcatcattttcgacgacgcggacatggaattggcagttcaacaagcggctttcggtctgttcttcaaccaaggacagtgctgttgtgccgggtcgcgcacttttgtggacgcaaaaatttacgacgaattcatccaacggtcgaaggtcagcaaaaacaaaagtttaacatttggtgggattttattccgtttgacttttagcaaattgcggagaaacgcgtgcttggcaatcccttccatttggacaccgatcaaggcccacaaattgacggggaccaaatggataagatcctcaagtacatcgaccaggtgggattggaacaaacatctcgagactaaaggacaattcagggaaggaaagagggcgccaaactgatcaccggtggcaagcagttcgggggcaaaggctttttcgttgagccaacaatttttgcgggtgttgaggatcagatgaaaattgcacaggaagaggttcattttcagtcctccccctccccatgattcaaataacattttgcttagatattcggccctgtgatgtccattataaaattcgacgggctcaaggacctcgtagaaaaggccaacagcacaatttatggtttagcagcaggagtaatgacacgtgatttggacaaggcgctctatgtggccaataacatcagagccggcaccgtttggtgacttttttgctttaattttgataaatgtaagcgttggaaatacgcctctaattattaaaggaatccaaaaaatctgttttaatttgccttttattttcagggtgaattgctacgatgtttttgacccggcggctccattcggcggttacaaaatgtcgggcatcggacgcgaacttggagaatacggactatctgcttactcggaggcacggaaaatttaattatggtaatttttcgattcttaaggtgaaaactgtgaccatcaaagtgccccaaaagaactcttagtgggaaacaattaataacgacataaattagttaaactttgaatttttattcataaattttatttattttgtttggacatataaatggaatacatacatacaaataaa

SEQ ID NO: 52242 - DNA, 622 bp, Heterodera glycines
atgactcttacgcttctacgtctattgaaggtcttacaaaacaaaacaataattgcatccaatcggcccgtaaatttatggtcaagatgcacacacaagacattgtaagttgttcatttcgcatgtgaattgtcatacaaattgagttcagattgggatttttatcttttttgcccttccgattggatttttatatgccgtaacttttccactttccctttcgtttgacccgttcagcaaggtatgcttaaaatggttacatttagtaattccgtccttttttatggttggcttgtgagggtcgtcccctgctcacttctcggcctcaatgtttacttaaacgcgctgatgatgttcaaagtgggaccgaattcccagcgcaatgttttgccgtcggtggtgaagcgcgactttcacttctgccacctttgccaatcgaattcgcctccgcgttcatttcactgtccgggtatttatcgtatttttacctcagattttgctcttcaaatctgacagtttgcaacttttgcgtcttccgccgtgaccagggactgttgcaagggaccgggttcttggcgtcggaagcgcccacccacgagggccttagtgggagggcccgcat

SEQ ID NO: 52243 - DNA, 379 bp, Heterodera glycines
atgacttcaagtgcggtgttgactgaacaacagcaatcgacgcagcaacaacaacaattgcaaaatttcgctggagtggtcgcgaatattcttccttcagcggttcctcagaatacccaacaacagcaaatggcggctgtttcaccggcgcaagtgatgtggactcagcaagcgcaacaaagccaggcacatcagcagcaacaacagcagcaaatgttgcggcatcagaagaaagtccatgtcccgcagcaaatggcatcatcgtccatgggaccatcattcttctgatgatttaaaataatggattcttaactaattatcttaaaatgtattttatttctcaaacttttcatcttcaagtttcacatgtgcctgtaaa

SEQ ID NO: 52244 - DNA, 67 bp, Heterodera glycines
ttcacccgcagaagaagctgggctgaaagtgcatgacaaaattctgcaagtgaacggcgtcgattac

SEQ ID NO: 52245 - DNA, 81 bp, Heterodera glycines
atgcgttctgcaagggttaatcaacgccagcaaattgaagaattggcccaaaattcggcacttctgcaggacatgacaatt

SEQ ID NO: 52246 - DNA, 1121 bp, Heterodera glycines
atggacgccgacattattgagctgactgggcgagacaacgacgagcattttttgcctcaccacgccgtcatcaacccaaagaaactgaggatcgtcattgacgccagtgctcatgccaagggcaccccaagcctcaacgactgtcttcaccgcgggccagtgttgctccccgacctttgcgggattctcctccgcttccgttcagcgacaattcctgtgttggccgacgttcagggcgcctttcatgccatcgaagtcgaacccgaggacaggcgcttttgcaaaatgctttggctgaaaaaccctgcccgtcctgtctcaggcgacaatctcttgatctaccgctacaaacggctagtgttcggcgcgacgtgctccccctttatccttgccgctgttctcctccaacacttcgacaagcacgagcacccattcgcccaagcgttggccgcgaatatgtacgtcgacaatctcctcatcgagtgtgaaacggaagaggaggccatcgacaagtcgtccatcgccaaacaaatcctcaaagacgccgacatgaacctccgggagttcctcagccactccccaaacgtcatgggacgaatccccgaggacgaccgactcgacaaaacgccggccaaagttctgggactgacctgggacacccccagcgactgcatcaccttcagtctcccaaaagacacagacatcactgctacacggcgttcagtcttgagcatcatcgccagcacgttcgaccctcttggactagtcgggccatgtcttctgcccgccaaacggctcttccaacgcctgtggggagaaggaaccgcctgggacacacccctccccgagaccgaggcggaaacttggaatcaaaccctttccctttggcaacaccaaacacttgtcgttccccggcactccattctcggcaagcacagtcgcctacaactccacgtcttttgcgacgcgtcggaacacacgtttgccgccgccgtctacatccgaagcgagacttccgatagctcccaagcgaacttgattttcgccaaaaatcgccttcggtcacgaattgcgagccagcgcttcaccatccctggtctcgagatctttagccgttgttg

SEQ ID NO: 52247 - DNA, 365 bp, Heterodera glycines
attaatgtcgaataaaaatgaaaaaaatattatgttcaaatttattaatattaaaaagcttaaaaactaatttggatatgaaaaaaaaacaaaataattatttacagggttggggaattgaactttagaagaagaaaaaagtatggaaggcacaaccaccaggccaccgacgctcacattggctttacattcttttaaaatgatattgaaaaggcaaaaaggaaaagcttcatatctcggccagaagcttcatttagcaaaaataaaaaaaaatttataatacaaagggggggggggtaatctacctaccctgaaagtttcattcggaagtcccatggtcacttgggtacctctcctttgtaagg

SEQ ID NO: 52248 - DNA, 1908 bp, Heterodera glycines
atgaagacgcggccgtttcccatcggcacgccacgtgtgtggaccggtgagcagctgtggcagcagcagccacaaacggcaggaggccacccccacactgattgtggtatgtataattatagttttatgatcatgactaatttctgccccctttttctacagctaaaccatcaccaccggctcttcgaccacccgcactgccatggtgccgaccggaggacaaccccttccgcggcttcctcttctgccgagtgctgccacccagcgcggacgagctgggcaaccgcgagccgctgctgccctatcgcacacaggcagacggacgactcacgttcggcctgtgcgcacgatgcgcggagctccgacagcagcgtacctgtcgtcacacggaacgcgagcgcgcgtggaccgccgcctacacgcatgtggaactgaacagggcgctgctcctcggctaccgtgtgctgcaggtgcacgaggtgtggcactacgagcagtgggcgtcgccggagagcggcaacgggctgttcaacgactacgtgaacacctttctgcggctgaaggcggaggcgagcggttggccggccggctgcgacgacgagccggcccgggcggagcacgtgcgtcagtttgcggagcaggagggcgtccacctacgccgcgacaacattgggcacaacccgggcctgcgacagctggccaaggatttgctcaactccctgtggggcaagatggcggagcggccggagcgcgacgaggtggtctacacggacagtgcgcgcgccttccacgagctgttgatggatgcgcggcaggaggtggtcagcttcacgcacatcaacgagcagctggaccgctgtgtggtgcgcaagcgggagccgtttgcacgggcgccggagcacaacaacctggctgtcgcctgctttgtgacatcacacgcacggctctacctgtacgaatggttggaggaggtccggcgggtgggcggccgagcgctgtactgcgacacggacagcgtgttgtatgtgaggcgacagggtgctgccggtgtgcgggagggcaatgcattgggggacatgaagcgggagctgcccggccgccgcatcatcgacttcttcgctgctgggcctaagaactacgggttccagcacgtggacgcgcgcacgggtcaggacctgagggcggagcgcaaggtgcgatcctttgagctcacctacgcagcagaccaacagctgcagtacggacggatgcgccagctggtcatcaaccattttgtcaggtaaaggcgccgaaatcggtacgacacttgcacaagcaccaccaccaccacactcattcgctgttttctttaggcccgagcagcgcgccaaccatggtggtgggggcggaggcgacattgcggaggcggccaccgagcagcggaccattgccgtgccctgtcaacgctttgtgcgcactcgacaggcggacatcttcacgcgtcgctccacccgcgtgtaccgccccgtctacaccaaggggcgtgtcctgcgaccaccaccaacagcgggaggcgaggcagccgcggcggaggaagaagctgaagcggtcacgccgacgcctctgtccatccgcacgcgaccgtttggctggtgttcggcagaggcgcagcaaatggagacagatgatgaggaggaggagggggaagaggaggcggacgcgaacagtgatgacgctggcggcgagagtgatgggctggagcagccggtgcgcaagcgggccagggccgagccggtgcaagaaatgcttgtggaggtggaggaggcagcgccggcgccggtggaccccgacctggaggaagagccagtggccggctgttcaacatggaatcagcagagaaggctcaatgagcacatttttcgaaattga

SEQ ID NO: 52249 - DNA, 127 bp, Heterodera glycines
atggacttacaggacgccaacaaagagaacaaagagccaacgaaaaagcaagaggaggaggcggaggatcccagctggatcagcctcattgatgaggagatgaagcgcgagccactcgctccaattg

SEQ ID NO: 52250 - DNA, 4335 bp, Heterodera glycines
atggacgctttccaacaatttaaaagggaggatggacaatttcgtcatccattcacaatgattgtgtctgggagcacaggcagtgggaagtcagagtggataatgcgtctgttgcgaaatgtggataaaatgatctctacccctgttgaacgcgttatttatagctatggggagctgaacagaaatgtgatgaatctgcagcgcgccggcaaaattggcaatgtgccagtcactgtccatagcggtgttccacgcgcagagcaagttcgggagtgcgccaaaaaagaaaaaaccttgctggtgctggatgatttggtggtgggtatgagtcaacaatatttggacgcactcttcacccgtggctcacacaattggggcgtcagcgtaattttggtgactcagcacctgttcagcaaagagttgcgtgtggcgcgcactaattctcactatttagttttaatgcgtaatcctgcgggggcgttgcagatacgcaccatcgccacccacctcttcccgtcaaggactgcccattttattgagacctatcgtgacgcatgcgcaaaaaattttggctaccttctcgtggacatgcacccagagagtccggaagagattcgccttagaacaaatatatatgaacaaaaacaaatagtttacctaccaaaatgaaagggtcacaattagtttcaagaaacgaatcctttttggagacattgtgtaatgccaaaaaggcgaatgcccttattcgagatgcatcagatgagcaacttttgtgcctcgtcgaaatctgcctaaacattctaaagtgccgagtccctttgcgtccccggcatttgaataagctaaaagctcatgcacaggtgcttcgccgtctcgcccgcacccgctgctcgcgctctgccaaaaaggttttgctacaacacggagatggccttcccgctattgtggggctcattgcgtcaattgctcttccgcttattgcggatgtcattgaaaaatataaatagtttccaaaaaattaaaaacaagaaaaaatgcagcatacaaagcgctatttgcttgtccccgaagaaatttatcagagtttggcagcaccgccaccggctgacggaacatcaattgggctggtacgtaacagaattaaacaaatcaaaaacgatgacggcataaatgaggcggaacgggcaatcaaatatgagcaggaacttaagcgtctcaacaagctcacaaaggacgaagatgaacgtcccgtgggtgttaaattagaaaatttgagtgatgtggttgacgccatgccaaaaccagtcaacgttacaaggccaattgttgtttctacgcgtcgccatcttaaaattgggcgtgcgcgaaaagaaaatgttgaacaattagaagatactgatgatgatgatgattatcaaaacccacggtcgtcaagttcaaataaacgacaacccacacaaacggaaatcttaaaattaatttataaaaacgcccaatctctaggggtgtcggggaagggcaagttttgagagccggtgggcgtccatttataaccagcagtgttgatgacattgttagtcacctgttgaacaaggacaagcgtggccaaaataaagagccaacggcattcaaagaatttgttgaaagggcaaagcagaatccgctcttgagtaggcatttatttcccgaaggccaatccggcaaaggaatttataaaaacaccacacttaagtttaagccatcattatggatttgaaaaagcttcgcttgctcgagtttttgtacaaggacctaagttcgcctgtcacattcacgagcgttgaaccgctgctgagagaggcgcggaaaagtcaaccaaaaatcaatcgaaacgatgtccaaaattatttgaccagccaacgtacatacacactgcatcgccagtcgaagcggcgctaccgccgattgccaacattggcgcccggcttgcatactgaatggcaggccgatttagctatttttgaccgacttggtaaacaaaatcgtggcttcaagtacttattagtctgtattgatacccttagtcgacaggtgtttgttgagcccgtaaagaccaagacgagcactaacatgatcattgcctttgatcgtatattcaaaagatcaaaatatatcccgtggaaggtgttaacagatcagggaaaggaattcactgcccgggcagtacagcagttcttccgcacaaaagacgttgaacacttttgtatgctcacttctccccaatttcatgccggaatggcagaacgtgcgaatcgtagcatcaaagagcgcctttaccgctacttcacggagcgcaacacgtacaaatggattgatgttgtgcaagacattgtttgcgcaattaaccactcgacaaattcgagcattggaatgcgcccagtagacgtgaactttaaaaacgcagaagcattgcgacaaaaattacatgatgcagctgaaaatgttgtacgacgcaagcaaaaataccgcgtgggagatcgcgtgcgcattgaaaagtacaagcacgtgttccaaaagggttacctcccacgcttcaccaatgaacttttcacggtggcagaggtacactctgagcgttcgccagttgtttatcggttacgtgatgacaataatgaaattattagtggttggttttacgcaaatgatttatgcaaaacgctagaagacaaacagcaaaaaatgtatgaaattgaaaagattttgaagaaaaagaggcagaacggtgtggattatgcgtatgtgaaatggaaagggtattgcactcgctttaatagttggattcccgtaaattcaattagcgagaaaaatatataaaaagcactatttgtcaaaatttaacaaaaatgccttcaaattctttttatgttgttcttccgtcaaacactaatattgaaggaaataggacaaattctttccgagtgcgtttaccgcgcaaattgcaattcaattcggaatgggaggtgggtcttgccgttattgtatacccccactcttggccttccataggcaccgtggagcaacaatttgttcagattgagtggcagacggggaatacggtacgtatcgaagttccaccatcaaatgtcacaaacccccatgagcttagcaaaaatttatacaggctactgggtgagggaagtgatccgttggcaaaaaaggtacgatcaacacagaattctttcatgcttttgataaacaaggctcggcgatgggccagagaagaatacattaagcgaaagactaaagaaaaacggagcgtccgtgacgaagagctgctcctacaggccatgttgacagatactggaacattggttgatctcaacagcgtagcccaaggctttctgacacgtgaaaagagtgctgcaacgagtaatgtaccgttgagaatgccagctgatgataccaattcgtaccaagaaaaattgtatgagtacttttcaaaattaagtgacaaaaatttgaacatttttgatgaattgggcatgacaaaattgaacgccgaaatcaaaaatttaacagaagaggaacgcgtgatccttgaagccacaaaggaaatgggaacggaagcatggattcaggcgtaccgtgagatacgtcttgtttgccaatttaactatgacgtccatagaaatcgttttgtcctgaacatcgacccacggtacgttaaaaaggtcaaagtctcgcttcaactcgcttacattctcggtttcaacaacacggagtttattcaatctgaaaacgaggcaagattcatgccggacatgagcggtggtgtgtcatcattccacgtttacacgccggatcttattgaaccaatgatgattggagatgtcacggccccagtgttgcgcatagtgaccatacgcggaaaccccgaccaagtagttgaagaacaattttttgccatacagtatcataaacttttattaaaggagttttctgaaattctgattgagatacgtaccaatagcggcatcttgatgccattccaatacggaacatgtacattaacattacactttagaaaaatgtcctatttttaaatgatgaacacgttggaaattgacaaaacattgacaagaaacaacgtgactcgccactactatattggctgttttgcagcagatcaaatacccgccggtgcaattgtcaaatttccccactgtatggtggttaatcttgaccccagcacatcacatggttctcattgggtgggcatatattgcgcttctcctttgcatttggagtattatgactcattggggttgtggccaccgcccagtgttcacattgtga

SEQ ID NO: 52251 - DNA, 317 bp, Heterodera glycines
atgtctccaaatgaatgttctgaccgtccctttcaacaacccgacaatgtacaacagccgcatcaacaaccagatgaagacgccgagttgcgcgcacaaattgaagacgcggaagaggatttgctcttgaattggtggcgtgaagatccgacaattgtaagcttgtttttcaatttagcatttttaatttcttcacgtttcagattcgttttctttttggacatggtcgagcccctgccatagaagccgcgcttcttcaacgcgccgaacgtgaggcagaaattttgcgccaatatgccgagaatcaacaacaatga

SEQ ID NO: 52252 - DNA, 1557 bp, Heterodera glycines
atgcgcgacaacggatggactcttcgccatgtggaaagccctggcggcgagtacaaacatggcaacttcctcttggacggcatgctcgagaggatcggcgaggacatgaatttggcgattgaagtgaacgggtaaagaaacacttgccaaacttatgctaatttttctcccttcaggtgttattggcacgcgtgcccgcactgtttccctgaagacgacgcaattgttggcggcggagagacggccggtgccattcgagcgagggatgagaagaggatccggcaaattgcgcgggacttcgaggtggagatcgtgtgggagtgccagctcggccgaatgctggaagtggacccaccgatgaaggcattctcgacaacacgcccgactccggcccgattgacttccatgacgcctttttcggaggtcatttcccccaattttggttaaaatatgcaaaatttgtttacaggtcggactggccccgagtggctcggagcatccatcatcccggacaaagaaggacaggctgggcggaccattaaagtgaaggacttcaacagtctgtacccgtccaggtagaaaataaattaaataatcacaaataatcaataattaaggaacatgttcaccaactaccccgtcggtcatccaaaggtcatccaaatggacaaggacgtcaactggactgcgaaggaacacattgtggacgacgacggcgtgaaaatggagggcatcatcaagtgcttcgttgtcccgcctcggcactgcctctacgacattccggtcatcccaatgcggcgtaacaacaggaccctcttcccactctgccggaaatgcgcggagatgtacccaaagggtctggtcgaccctgagtacaactgccctcactttgaggacgctgagaggggtaaccaatggctttattttccaatgattttatttttccttcgcaggattctcaacgaccatcccacacatcgagctcgaggcggcgctgcgatccggctacagagttacccatgtctaccgggcgtacgtttggccgctgtattgtgattggagcaacggcctcttccactcctacctcaacaaattcctgcgcataaaatttgagggtaattttatcagcaatcaaaactaaattaatcaataataatttagcgagtggattccctgctgattgtgccgttgatgacattgacgaggaggagagggaacgccgaaagcagcagtacattgacaacccatggaagggctgtacggtgcggctcgacgccaacaacatcaagccgaatcccggcatgcggtacctttcgaagctgtgcctcaactcgctgtggggccgctttgccttgcgcaatcggcttacgaagacggagatcatcgactgccacgctgatttggccaagcttctgaacgacgtcaaaatcgacatcagcagcatcgaccaactgacggagaaattctggatggtgtgctacaaggcgaaagatgagcacgtggtggagcacgacaccagcaacgtcgccattgccctatggactacggcagcggccc

SEQ ID NO: 52253 - DNA, 730 bp, Heterodera glycines
atgccaaagcttccggaaacactgtacacggaccgtgggctggagtttgtggccaagcccatgaaggagttcttcgctgagaatggcattaagaagtatgagaccagctcaaagaagaaggctgccgtcgcagagagagccatccgtacgctgaagactcggctgtacaaatatttctctgccaaaaacacctctgcgtgggtggatgtgttgcccaagtttttgtctgcgattaacaattctgtgtgccgcgcaacgggacttaggccaaacgaaatcagtgacgtcaatgcgagagaggtgtggaagagggtctatggcgaaggacttgtaccagcggagaagagaccaaagatcaaagcgggggagactgtcagaatccccgagcccaagcacatattcgagaagggtacagtgactcctccatttttttctgtatttttcttgtgcttaaggctatattcccaactattctgaccatgtgtacaccgttgatgcggcacgcgcaaccaaaccccagcactatttgctcaaggactattatggcacaaaaatgaatagaaagttttatttgccagagctaacaaaagtacaagtggacgaaaacacaatgtataggatcgagaaaaaatacaaagaacgaatgagggatggaaaaaaggaaatattggtgaaatttatcggatttccggaaaaatattgggtcacagatgaggattttgaaaaataa

SEQ ID NO: 52254 - DNA, 1827 bp, Heterodera glycines
atgaacacaaatgcattgattgccagcagtagcgtagtgccattggttatcgaggaatttcaacggttggcacgtgcccgagtcgttcgatggcaaactttggaccaattaaggttgtaaatgttggcaattgaatattattttaaaaatcagtgccataattaaaactaattcccggcaagatggatggataccaaggaccaaaaatagtctgtttttagccaaaacttatgcgacgaatgtaaggcagcaacgaaatgcccagacaaccgtcgtcttttgcaatacggcgtctttctgctgcacgacagttttgcactcgtttctcggcctgaacgaaaggtttctcagtgaaattcgccaaattttggcatcgattgcgctcccatcgcacttttaagctttccaaaaacagttcagcttctcgtcgcgctgtgcgaattggtcgtgcggtcgatgcgcagcagtgccatgtccgtttcgttcgcttcgcttttcctctccactgaatttgtgcatgtggcgagtcggacaatttccgcactcctttcgcgcatttttgaccacatcggtcacaccgatgtacggcttgggaaccattttcttgatttgtcccaattgctcgctgctatttcagctgtccaaagtggtcgatgggcgtgcagttgcttcgttcatcgccgttttggacctgttcagcggttgttccaccgacaaatgggtgcttttgcgcgacaacgcaccggtggcctccattctggagacgctttgcgtcaaaatgagcactccgtgcgcaacccgagcacacattttgacacttcaagtgctgcctttgctttttctctgcctttttcaaattctgtcgaattcagaaagttctttttgccggtctgaagggcgtcagacagccgttgagcgaccaaagcattgacgaactgttccgagtcatcgtcaggtttagtgaagctccgcctttttgtcgcccccggaattccatggcttttcagatttatgcgcatagcgaactttgacgcgggcgaagcgtgcgcgactttcgtccaattgctcaaagccccgtccctaacaatggcattcagtgaaaatgtttggcactttttggatttgttaatagttcaattgctcatttttgggagcaccccaaaattccaccgccgaaatcatgccgctagaaatttaaattttttttaaacttagaattttttcaagtaaaaatcttagaaaaatttttttataagaaaattttaagaaaaaaaaatttgaaaaattttcagcgattttttaaaaattttatgaaattttcgtataaaaaaaatttttctagcggcgtgattttgtcccggcgttatttcggccggcgtgattttgtcatgttccccatttttttgttgccttttatccctcttaaaaatccaaaatataaaaatgattctttttttttctttcagtctttgcaattggtgaaggagttgaatttgttcgccgattgcatttcgtttctttcgtcggtcaaaagtcagtcggaactgctcgcattgggcaccttcgaaactttgcatttggtggcgaatttaatccatttgggaaatgcggacagagaagtgagtggcgcaccgacggaaatttggcacatttttacactgttttcaattgattccttaaaactcattttgcattttgttttcagacgaccactcagaaactgttggagtgggtccgcctcgtgaacattttgctccaaaaatgcatccaaaagggcggaagccatcggcccagcaattgttggcaccatcctttgttgggatggac

SEQ ID NO: 52255 - DNA, 178 bp, Heterodera glycines
ttcgttgtcaagtgcctcttgctcgaaattagttcctttatgagtttgggacttttcccttcttcaaccgctgtgtattcgtcgaacagtgacaacgaaaacgaccaaaacaacaaattccgtggtagtactgttttgcgtgcttcgtcagaaaactctgcgacatcgaacaactcta

SEQ ID NO: 52256 - DNA, 531 bp, Heterodera glycines
atggatggaattgcacagtccaaccaaaaagaccattttttgcttaatttctttgttggcaaagtcaccgaaggggccgtagttgcggcacaaagtccgcaacgaaactctcaccatttgaatgaatttgagaagcaactgatgcgggaaaatgtgagtgtaacaaaaataacaaattccttggtatcgtaaaagtgagtagttctttgggtgaaatttgttgattcgatcaagatttttggacaaagacaattccaacggtaaatcccctttcagggtttcaaccacagtgttgctgtctgcaacaccaactttgacacggtcaatcgttcaacaattggccgccttgaggctttttatcttgcttttggagttgagggcgaaaaactgacgaaacgactttttggaggttttttttcttcatttttgggcttatctaatttttcttttcaggtcaagacaattcgcatttcgatcaagagacgcgacttgcccctcaaatcgaaccaacaacaacaaaaattttgctga

SEQ ID NO: 52257 - DNA, 1642 bp, Heterodera glycines
  unsure (1)..(1642): unsure at all n locations
ccncnngcnancacaaannnnaancgcnnaaaaaacccngccggacnnncncagcnagncgngnnngnccnnncccangncggccnnngcnnnnngggggccgnnnacgccgnnnngggcgcnnnnatgnnccgngccancgaanncccggccgaacaaaaatttccaggggcatatcgccaacgatacatggacggtggagaaaaatntaaaaaaatgaatttaaaatgaaaatttaaaaatgatttaaaaatatgacaatttttatctctccaaaaaggtggtgcaaaaattgtacgaatttatcgagaaaagtgaagtgatcagagaggacgaaattaaacgaggcgagaagcaaaaaaaaggggaaatccaaaattgaaaaataattaattgattgaaattcagaggcacacaaactttacaagcagtacgaacagtcgctggtgttcgccgtgaactacgaaggtggggggagggaatttgaaactgttcaaaaagtatgccaaggctatgacgaaaaatacgacgacagtcacccgacatttcaatggacggtaaaataaacaattttaactaataattattaaaaatgtttatttaaataattattattaatttgaaaaaataatttaaaaaatattcattgtttttttgttcagttttccggtgctcttctttattccatcacagtattcacgtaatttattctctattttattttttcaaaatgttcaattggcacttttctcccattttggcaccattggctatggccatatttgtcccaaaactgcgcttgcccggggcctgaccattgtgtacgccaccttcggcattccgctgatgcttttgtgtttagcaaacattgccgaaagtttggcacaggtcagagagagagagagagaagtgaaagagaaaagcgaatgtttttaaattttaattggaatttaattttgtcctcattttcaaggtgttcaccttcgtctactttaaagtatgctgtgcctattgccgttggcaggccaaaaagcggcaggaaaagcgcagtgccctcaaattgcgctaccacccaaatgcgccggtgaatgtgcgacgtggtaggccaaaatgggacaaaaatatgcaggataaaatgaaaaatatttggaatgaaaagcggggacaatttcccggcggggggggggggaaggatgggggggggtcgaaagtgccatcgatgccaaaatcggctgcaattagcctatttattcggaatttcccttaaaattgttcattcagttcactcagggcgttctgcgcaacgctacaacagtttgttgcgtcggcatgcgaggtaaaatggggaggaaagctattagtaatttgtaagcaaagttagtgccattttgagtttgtcagtgcgcggccgttgggccaccggcgacacgaaaagcatgcgatcactgcgctcgctggaggcgcagcagcgggcgcagaactacggcatggccaaatcaccaaattttcagcaggaggatgggccaatgaaaaagtgaaacaatttaaaatgaaaaaaaaatttgcatttaaatggaatattatataaaaactaatttaaaaacaataattaatcctgattcaagactctagaggtccccgg

SEQ ID NO: 52258 - DNA, 384 bp, Heterodera glycines
atgtcaacttctaccaatttgtcaagcagcagcattttcacaccagcagaaaggggtaagaaaagattaattggcaaagaaatgggtgaacaaaaataaatattgtaattagtgtgcggattaattagtagttataccaacctccgggatttttaacaattattattgtaagtgaacgaaaattttaaaatttttaagcttatagacgtgaatttctttttagtgttttaataaaaattttccaaaatttcagaggcgagttgttatgatggttcgcttattggtcaaaaattggacaacccaagatcattcagtgatcaacaacagattgaggtggacgaacgcaacagaaacaataaaaatggaaataaattttattattaa

SEQ ID NO: 52259 - DNA, 2062 bp, Heterodera glycines
atgacaccagcaaattccgaggactcagaaaatccattgccatgctccgtcaagccaagaatcatgatcggtgttagagatttttggcgttttatcttggattgggatgaaattcgacccggaatttacagaatcagaaccgtttttggtgtcatttttggaggggaagattgcggtgtccccgagaaaacctcaaatccgtcgttatgttgtccagtcctcaacacacctcatcccatcgaatccgatgttgccaaactttgggctttagaaacgatcggcgtttccgattctccaattttaaaagatgacgagatggcgcttgaaaaattcaacaaaaccattaaaaaggacaaggaaggacggtatgaagtgggccttccctggaagtcagagacggaatatccgcctgaaaattttcgaattgccttttcgcgattttccgctctggtgcataaacttcgcaattccccgcgtcttttacagggatgcaatgaaatcattgaggattatttagcaagaggaattattgaaaattcgtcccggacttgtgacccccagcattttttgccccaccataccgttatggggaaaaaattacgaattgtttttgacgcttcatcgcatgagaaaaatgtaccgtcacttaatgacacattatatgcaggtccaaatttgtaccccgatttagcgggcaaactcatccaatttcgggcgaccgcccacccaatttgggcagatatagaaaaggcatttctaatggtcagcctaagggaagcggatagagaattttccaaatttttgtgggtcaaagacgttaatgcaccactgtccggaaataatttgctggtgtatcgtttccggcggatcactttcgggattgtgtcgtgcccctttttactagcggccactttacaacatcatttggacacatcgccgagtgatttggccagagaaatccggcataagtcacttctatacgtggataatttgttgttgttggccgattgcccagccgaagccgaacaaaaggccatcgaagcgcaagaaattttttcagaggcaaaaatgcgcctccgagaatttgtcgcggccaaacctgaacttctgacgacaattccaaaagaggattgcctctctgaagacgagccatcagtgcttggtctgaaatggattttacagtcggacgatttgtccctgccatttcccgaagtaccaaacccagcggtacttactcggaggatagttttgaaaactatcgcatcgtttttcgaccccctagggttatgctccccctgtttagtgggggcaaaaatttattttcagagcttatgggaccagtcccgcggttgggaccagcccatagaaaattccgaaaaaagtgcatgggatttgatcagaagtcagtggagtgatcaaacaattttgatcccaagaaatacaccccgcacaaaaaatggagctattcaattacatgttttttcagatgcttcacccaatgtttttgcgacggcggtatatctgagagcggaaatagagggccatgtaattaactctctcatttacgcccgttctcgccttaaacccaaaaggatgggtgaaaatcagcccgacgggctcacaattccccgtttggaactcttaggggttctgatcgggaccagggcagccaaattcgtccaatcacatttattttatgacatagaaagtgtccatctctggacggattccaaaattgttttagcatggatttctagcacagaaaagcaaccagtttttgtgtcaaatcgcatacgtgaaatccgaacaaatcgttcagttaattttcactatgttcgttccgctgaaaaccctgccgacctggcaacccacccgaccagtccaaatgagctccgatccgccaacatatggtggaaaggacccgaatggttggaaaaaccagcaaacctttggccagacgaattgacggcaattctgccaccggaggaaagttcagcgcccgatcccgttgtggtcgccgttgtgaaaattgggccagacattttcgaattcgaccgattcg

SEQ ID NO: 52260 - DNA, 1582 bp, Heterodera glycines
atgggcaagctcggtcacggcgagttcaagcagtggaccgaaattctgtcgaaaaagaacctgaagagtcgcaacaacgcgctgaagggcaaagcgccgccggaggaaagcggtgccgtgtccgctccgtgccagtcgtgtgcccagtcgcacggctgggccgagacgcccgcgctgttgtccgcctgcctggtgtccaccgagccggagccacacttacgcgtgatggcctccacctcgccgggtgcgctcggcgacagcgccggaggcactggcaccacaaatgccgcaggcggtggtaccggtgccggcggaggaatgaagccgagcggcggtggaacatcgggcggtggcggcggtgccaacaccatttcgtccgcctccagcgcgacaagcagcaaaccggcgatgggcagtgccggcgcggggcgccaatcggcgctgggtgccaatgttggtgcgcagcaacagtggtggagccaaacggcagtcgcctgtccggacgaccgttccgtcacacacattatggtcttccaggtacattttgggttcgggttttttggtgccggattggacggcacatattttctccctccaccgagggattccctgttttttttgtgccaatgccttattgtgttaattttagaccattctgaatgtgtcgctgggccaccaccagggcgaggatatgcttcagagtgcgtttgacgatgatggcgacctcacaaatgtgttgggcggcttcaattttgttgaacagaaccaagaggaattggaccttgacaatttggagattgacaaaggtcggttttcacatccgttcatccctcaaaagattggaaatttctaaagggatttcgattacaaaaaaggcgtatatttcgggaattcgacaaaatttcgccgccaaaatttaaaaaaaaattttgaaaatttttctaataatttttttcattgcgcgaaggttgggcaaatgaaatgctttgccctgttaacatgctatcatcattatttatggactaaattttaaaaacaattttgcagacgaagaaacgcagatcaacaaccagccgatggccatcgggtacaccgtgtccacggccccactgcctccgggcatgccgtccagcttttggcaccggtgccctgccgcacgccgtcgtgccggcgcctcgggcattgcacatctcaaatcgtcactgcacatcaacacgtccaacctgaacgaggagtacgggggcggcgcggcacagcagcgggagcgcgactcgggcggcggaggaacaacggcttcatcagctgggggaggagcagcgaatgcaaaggcaaccggcgccgagcagcaacaactgccccatgcccaacaccctttggacgcagtggccaccgacgacgtgttaaggtggtatttaagattgaacgagaagatcaagccgtaccaggagtaataatgaagggtggtgaatctccaaaacaaaaatatttcatgaattgggacattgtgaaaatttccattcttttaaacaatttactcttaaaagccaataatattcatcattttatatggtctaaaaactta

SEQ ID NO: 52261 - DNA, 980 bp, Heterodera glycines
atggcaattaattctaaaatatctgaaaaagaatgcaactttttgggtagcgataaaccttttttaagtaagtaactaattattacagccgcaaggattttagaaatgtataaaaacaaggaaaataataaaagatgaattttcggtagccaatactcagctctccggtagtcagtacctaattaaacttggcccgccagtaaccaatacctcacaaggctctgctctccgatagccaatacctaattaagcttggcccgccagtaaccaatacctcacatggctcggctctccggtagccaatacctaattaagcttggccctccggtcaccaatacctcgcaaggctctgacaccgaacactgaaaacttcattcttttgactatgaatttttatttttatgcaaattgttatcctcgtggtctaaaatttatatgagaataaaatatatctttcctattgatttggcaaaacgcataggatggaaaagggagtgggtaaactgagtttgcgatggtaaggagcaataatgaccgaatatgtgttggagaggaagggcagagctgaggaaaccaaataagtgaaggagaggggggtgaggtcactgcgtcatcttatcctgtaaatcgattcctctaaaaggaacaaatggaaagaggctaacgccaactgctttcttaacaaaatcctatatttagagattttggtttcgggtttatttgaattattttccttttctccgtaatacactttctctactcttctatatctgtttactttcactgttattccttattaatttcagacctacatattgtctaaataatcgtttccgttagctatttttcaatatcttttcttccaacactatgttttattctcgaaccgttatcttccaagtgttcgtattcttgttctttatcaaactattctcttccctatacattacctaatgtttgccttacaaactcacattaaa

SEQ ID NO: 52262 - DNA, 426 bp, Heterodera glycines
atgccattggctaatccaatcaaatcccatcaattgccaatgccattggccaatcccatcaaatcccattgctattggccaatcccatcaaatcccattgctattggccaatcccatcaaatgccattgccattggccaatcccatcaaatgccattgctattggccaatcccatcaaatgccattgctattggccaatcccatcaaatgccattgctattggccaatcccatcaaatcccatcaattgacaatgccattggctaatccaatcaaatcccatcaattgccaatgccattggccaatcccatcaaatcccattgctattggccaatcccatcaaatcccattgctattggccaatcccatcaaatgccaatgccattggccaatcccatcaaatctcatcaattgccaatggcttga

SEQ ID NO: 52263 - DNA, 1319 bp, Heterodera glycines
atgctcagacatgagcccgtgttccgagacgaagtgaagcgactggtcgagtcgatggtggcaccgaatttgctgaagccaaaaatgctcaatgggcggccaatgaccgtccgaaaattcgtcgaatgcgtccgggtgagtggtcgcgctattttaatattaaatttctaattaattttgctttttattaatttttaaggaatacgcccgcattttcgacagtgccgtcgaaatgccggacccgcgtgccattctaaacgcgtgcggtgttttttggcccattaccacgtgctcaatttgtttgttttacagtaatttacaattggcttgcgtggattttgcgatggaggcaaaagtggcgtactgtagggcgatggatcgcgcgacacggtcaagtcgaatgatggcggagaagaagctgcaggaggcacacataaagcacggcatcaaggcgctgaacatttacgaccggtaacgtaccgtatttggtccctactcagtatgccgccgtatcaataatgagacaaaggtacagtaaaatagcgaaattaatgcaaatttaggtgtcctaaaatatattctggtgatgtgcgcaataacaacttggcccgactacaagaatccatcaatgtccggcgtttggattaaatgaattactataattgcaatttttgaataccgtacccaattgaatattgaaagggtactgtaaatggcatgggcactcactgttttgcagcgatatttcagcaatggtgccccatttctgcccaaaactttttcggcttttcagcatgaattagagcgttacaagcgcttgaatgaggagaagcgcgtaacgacgtgcgcttccgcgatgttggcgtgtggcgactcgccgctgttcggcgtcggcctcggcggcgccgcgtccggcgccgtcgccgctaccgtagtcacactgcaaatgggcgtagtcaggtggacactgtaaatttcgtaatccacaattatgaataaactgcttaattcacaatttagcgccggaattgttgcaattcccgtttcactgacggcacttttcggaatttgggtagattcaatcgttttaaattattaaattacaataattaatttttcaggtttacgtgacacttaagccaacagtcaaagcgtgccttggcatggaaaaggacaattgaaacataaattaaaaaacagctgtgttattattacccttgcacttttttatggcattgatcacttgggcattttttactgttcaatttttgttttttagataaaaaaacttttttttttgaaattttaaattaaataaa

SEQ ID NO: 52264 - DNA, 1323 bp, Heterodera glycines
atggcatctgcgatgacgtttactgagttagcaatcaaataatttggcaaaattatcttttggtttttcaggaccaaaaccgcagcatctccagcatctgcatccaaggggtcaaacaacaagcccaagcagcaaaagaactcggcatctgcttcaatgacatctgtgatgaagcggactcagttagcaagcaaatactttggcaattatcttgtggtttttcaggaccacaaccgcagcatctccagcgccggtatctggtacgatggcatctgcgatgacgtttactgagttagcaatcaaataatttggcaaaattatcttttggtttttcaggaccaaaaccgcagcatctccagcatctgcatccaaggggtcaaacaacaagcccaagcagcaaaagaattcggcctcggcatctgcttcaatgacatctgtgatgacgctgactcagttagcaatcaaataatttggcaaaattatcttttgggttttcaggaccaaaaccgcagcatctccagcatctgcatccaaggggtcaaacaacaagcccaagcagcaaaagaattcggcctcggcatctgcttcaatgacatctgtgatgacgctgactcagttagcaatcaaataatttggcaaaattatcttttggtttttcaggaccaaaaccgcagcatctccagcatctgcatccaaggggtcaaacaacaagcccaagcagcaaaagaactcggcatctgcttcaatgacatctgtgatgaagcggactcagttagcaagcaaatactttggcaattatcttgtggtttttcaggaccacaaccgcagcatctccagcgccggtatctggtacgatggcatctgcgatgacgtttactgagttagcaatcaaataatttggcaaaattatcttttggtttttcaggaccaaaaccgcagcatctccagcatctgcatccaaggggtcaaacaacaagcccaagcagcaaaagaactcggcatctgcttcaatgacatctgtgatgaagcggactcagttagcaagcaaatactttggcaattatcttgtggtttttcaggaccacaaccgcagcatctccagcgccggtatctggtacgatggcatctgcgatgacgtttactgagttagcaatcaaataatttggcaaaattatcttttggtttttcaggaccaaaaccgcagcatctccagcatctgcatccaaggggtcaaacaacaagtccaagcagcaaaagaactcggcctcggcatctgctacaatgacatctacgatgactcttactgagttaacaatcacataa

SEQ ID NO: 52265 - DNA, 360 bp, Heterodera glycines
aaaagccgggtccgggtccaagtttttaaaccgggtacgggaggaccagaaagtggaagaggaacagaaagtggaagagaaagtggaagaggaacagaaagtggaagaggaacagaaagtggaagagaaagtggaagaggaacagaaagtggaacagaaattgaaacagaaagtggaagaggaacagaaagaggaacagaaattgaaacagaaagtggaagaggaacagaaagaggaacagaaattgaaacagaaaatgtaagaggaacagaaagtggaagaggaacagaaagaggaacagaaattgaaacagaaagtggaagaggaacagaaagaggaacagaaattgaaacagaaaat

SEQ ID NO: 52266 - DNA, 174 bp, Heterodera glycines
atgtccatcccagctctccccccccccttcgtcagtgttttggctcgtccgcttctcctcctcccccgactgatcacaacggttcgccgccgtcggatgagtccgtcgtttattcgtcctccaattcaaccgccgatgcaatggcaccaccgccggcaacagtcgacgaataca

SEQ ID NO: 52267 - DNA, 462 bp, Heterodera glycines
  unsure (1)..(462): unsure at all n locations
gatttccgcgcaccaaaatgtgccaattccaagccatgtgattgccaaccctggccaacagagttcggttggccatggaaagacagacgaaccngatggcatcggacttcgatttntgagggcacagaaaaagaaatatacatattaggaggaaaattcatagttaagaaaaccattttgttcgcctattctgaagaaaatttgttttggtaaaaaagactgtattcaaaatattttttaatatttattgattgggcgtgaaagcatagaacttccataattataattatataagaattcttcccttttaaaagcgacgaattacccctaccattgttttgtataatgactagtgctgtcaaaaaaatgtacaaaaagtatagtcaaaatatgtacataaatatgtaagaaaaatcccgaaatatgtacaaaaaacaaataggtaccgaatatgcaaataaa

SEQ ID NO: 52268 - DNA, 424 bp, Heterodera glycines
atacatcgatcacaatgtgatcgcttttctccgacgtttttgcccaattttcgccgcttttccaattaatttggccatcaaaacggacagtgatctgatttcggagttcattttgcgcaacatttggccaatgctcggacgaaatatttgtggcctgtttttgtttgcgaatgtttttcatcgtttgcgcaaatttgtgccgtcaattctcaacgattgtccatcgcttcgtgttgtcaatttatgtgacgccgatctcttcattgaatttccggccgatgacagtgccgcggcatcggatggacaagcggtggccaaatggcttttcactccgcttcaaaacaatgtgccaaaagtgttcatgtgttggtgggacaataatgatgatgggaatttggcatcggaacttgaagccttcaaagcg

SEQ ID NO: 52269 - DNA, 753 bp, Heterodera glycines
atgtctgacaaccgaaaagaagcggaggaaaagatggcaaaagcaatgtaaaaataaaattaaaatgccaattttcaatttaatttaaatgccaattttcaatttaaatttaatttaaataccaattttcaatttaatttaaatgccaattttcaatttaaatttaatttaaataccaattttcaattttaattttcaatttaatttaaatgccaattttcaattttaatttaaatttaattaaaataccaattttcaattttaatttttgttttctttttttcagttttatctccgccgattgttggctcaaagtgttcgatttgctctctccgcgtcaacttggccttggaattgcaatgatcagccaccgtttcgacttttatgtggacgaacacttcaaaattcgcaaatggacattcggaactgttcaatttggagacaaaatgcatgaaaattgttcaaaattcaattaattcataactagggaacggatttctaagtttttgcttattttttctgcggctttaactcgacgagaaatgcacgaaaaacacattttttgttcgaaaattttgtgttttaacgcacttattcgaacttagaaatgcttattttggcgtttcgtgcttaaaatgcttattttagaggttcgcccttaaaataagtttttgtacttattttagcgttttatgcttattttcgttcttatttcgcgatttttgggaaatttattaacaaaaatgcaataaa

SEQ ID NO: 52270 - DNA, 2974 bp, Heterodera glycines
atatttattagtaagaaaagctacctttgtttgtaaaataaccaaaaatattatttactataaatgttcttctataaaagagacggcatttgtcgtacgtaatccttttaccaatcatggcttgcgattgtccgtcacagttttccaccgtttgcgtcaattcgccccgtcaattctcaacgatttgccgttgttatgcattggcaaattccatgctcatgatgatgatgttgacgatctcttcgccgaatttccatgcaatgacagtgccgcggcatcagatggacaagcggtggccaaatggcttttcactccacttcaaagcaatgtgccaaaggtgttcaaatgcgggttggacatggattatgtgaagaattggtcgtcgaatattgaacaattcaaaacggtgcattcatttatctttcatttttctttatcaatttccccatattttaggcatttgccaatgcttcttcccccgtcaatttcatcgttttcatttgcattccgttgccttttgctgactccgttttggcctttgattttaccaacgaattgactcgggaacaattgacactgaaaagaactgactttcactactgttttctgttggtccgttgtccaattgcgcgagacgaaagcaaatggaccaaatgggagaaggaagcgattggctggcgaacagatgatccctggaacagaattatcattcatattagggttgcaaccccgaccccgccccgaccccgaaccccgacataacccggttgactgtttcctttttaatttatttttatgtgattaatagaattctcctaaaagtctttagaaaaagagcgccgcgaaaaaaaagatgattcgaaaaacaaaaaaaaaagaaaggtgatcagaaatttttgggcatttttttgaataaaatccctctatttttatttgggggcccggcgccggaggaaaaatttgataaaattattattatgaataataaaagatttttaagaaaaaataataaagttttttgactatatagcataaggcaaaaatcgaaaaaccccgaccccgaaccatttggtcaaccccgaccccgaccttgctgaccccgacaaccccgaaccccgacttttccaaccccgacggtcggggttgcaaccctaattcatattgatgatgagcgtgcaattggtgacgggtcagcgaatggcttattcaaaaattcaaatttatttttcgttttttatttttaggcttctcaactcagctcccggcccaagtgatcagcagaagaagtgaatgatgaattgctgataagtgattgaccaaattatgcaaatggaattgcaaattgacgtgctcataaaaaatgtgttttgttttttgttggactgatcaattttggatttttgtgtaagatttctcgttattatttttgttgtcctcctttttagaccactaaaattaggtcaaaatttttgcatcaaaattatgaacaatttcaaacggaagtgtccaccgcctgtgacgacccactgggttaattcaacaataattactgcctcaaggaataaatgtaattttctgtatgctaatatcccacccgcccccggcggatgtacaaaattagcgcgccttctccctgcgcttttcctccccccattattttgtgcaccgctcgcgcacacaatttcactttcatatgcttttgttgcatataagatcaattctccaagattgatcagttcacattcataactgttttggcttctttcctttccaaatgatcggaagggacacatttttatttttaatttaatttttttaaaatatttacataatttacctaaatgatcaaataaatcgaaattaatttacggaatccaaattttttatttcaaaaaatttcgacttgaaaattattattcttttttcttgttttaataaaaattaagctgtaagaaaaatttccttctgcggcgcccaacaccattataatactgtatatcaattttaataggatcgaaaactattatttttgaatatttaattaactcttaatttgtgccctccccgtaatggcacttccattatttgtcaaatgccgttcttcgcgtcgcgctctgtgcctgttcgtcgccttttttcttgttcattgctacccgggaccgccgtactttccgccaattcgtgctgatcaacattgggccacaattgggacgggatttggcacaaatcggtccaaaaatggcataaaaatcccccttataaatggccaaaatttgacagaattgtcgagactccgttctcgagactgccgaccgccattgaaaccgtgccaaaaatggcaaaaatgccattgaattggaaggcatcaagcaacagtcggaaggaagctgattttttgccgatgtcagctgaccggcgcatgattttggtcaataatatcagaaaagtttttatgccaaaatgaaaatatgggaaatttttgtccatttatcataatccacaaaaatataaatgcattaaatattgtacaaaattttaatctgtgggagggtgaaaaatttcaaagaaaaaaagaatttccataaaaatttacaaaatttcataaaaattcactaaaaaattgaaaaaccattccattgtaatttcacctgatttttaaatttttaataattatttcgctttcggatttaaaattcaaattttagttgtttttttttttgccctgaagcccttgaatttagctcagttttaatcaaacttttttctatatttataggctcttgcctcaccgctgtcattgagtaccactaattctgtgatgcgtacaatagggcagcaacacgatgtgccgtcaaatggtactgttacagtaaccttaattgtaacacaatcttcatcaacagaatctaaatggaagcaaatggcgccttccgatttgctcgcaaatgttacggtaacgccacatgcaatggtg

SEQ ID NO: 52271 - DNA, 959 bp, Heterodera glycines
atggatgagtacaaaaatgtggaggagggcatttccaatggcattcgcattcagctgaacaaggagcagggaaatgtgagaaaaagagagagaatggcatgccggtgccaaaatatttaattaatttaattattttaaaatttaattataattaattatttcagcgcgagttcatcttctcaacagttgcgggccatttcaaagtgttgcaaagggtcaaactgttctggcaaaactgtcttgaagctgaaaagcaaaaaaaggtggacatttctttaaaaattccttttttaagtttctattttaaaatgccaccgatttgaattcatgccaatcactctctctgcttgaatgtcctttaataccatatgtttcttgatttgttttccgtttttccctcatcttgtcaattaagcccctaattgccactcccctcccacttaattagtttgatcattaattggatttcctttttttgccctgcggctattcactcacctcacacgcaattcccaattaagcgcctaattaactattgccatccccctctctcccacttgatcagttggcactcgcccgacagtccgccagtgccaccgtccgtcgtctgaaccgcaagattgtgcgcgagccgctgtacgcgcactacccgcaccgatccgtgccgacgccgacggccaatacgacggtcggcacaaccctcgccggcactgcggacgccgacgcagttgggccggtgcagtcgcgcactgctcgccgctgggagaaactgttccacgactacggccacaactattccatgttccgcacgatcgaactgcaccgactgctgctggacggtgctgttgttgtacaacaaatagcaaaatgagagtagctttttccatcactgccaaccctgaccaaaattgatttacaaattcgaatggggatttttttgcaaaacaaattttaataaa

SEQ ID NO: 52272 - DNA, 1428 bp, Heterodera glycines
gagtccaccaatttatgggtggggaatgccaaatggaatagtccaatttcttaaaaaaataaaggaactctgcaatcgagagtttgagtatctgagcatcacgcgggacacgacagaggtcgacatcaaacaaaggcgcgaaatccgcgccggttcagcctattacactgatttggtaaatggagggggggggggcgatccaacgaaaaatcaaagccaaacatttttttttttcgtatttcctcattttggaagatttattctactgtttgattatctaggactttcgcaaacccaccaggcgcccgaaccagatttttcccacccagactgacaagggaaaactaggttaggcctgtagcgcttgtaagcgatttaaaaaaaagtttaccagacatatccggctcaagttttcaccgcctttcctcacatttcagtgcgctgtccgtgccgctctctgtggacgcattttatttatcgatggcgtggaaaaggccgaacggaacgtactgccaattttgaacaatttgctggagaatcgcgaaatgcaattggacgacggacgctttcttttgtccgctgaaaaattcgaccgtctccttcgggtgagtgaacaaattaaataggtttttataggagatgttttacagtgggcaatttccttacattgataatttacaggttcttaatttattttcaatatcatactgcttattgttagagaagcaaatttttaccccaaaattaacacggaaaaaatcaacattttatttcctaaaaattgatattttcaaatattggtctacccttaattcaggtaaatctgaaaattagaacacttgcgaaacctgaaaaccttgttgaccaatatggtcgcagaagaattcctagtgttttgtacacaattgcgttgtttcccccttttttctgaatttcgctttgtccccatttcttccccctttcagaagtattcccccccccccccccccccccgccttctcttcctcttttttcggttttcagtcaataattaatgcatttgagacgaaatttttctgcttttgtgagaaaatttgttgaacgtttgataataagaaaaagggagcggcaaggagtgaattgaatgaatttggagaaggggtgccattggtaggcgaaggaatgccatttccgaaaggaggagaacggataagtcgggagcgcatcttttgcatctctgtcgagagttaattaagcatccgagcgaagggaaagcataagcaaaaaggaacggacggatgggcggtggcccagagagtgctttttgtaaggacttcaattggatttccctcgtgggatgcgttgcgggagcctccgacgcccaacgccaccactctcgcccatcccccacccgcaatcttcctttctttttgcctcctcctctttctc

SEQ ID NO: 52273 - DNA, 721 bp, Heterodera glycines
ccctccatatcatcctcagtcgaatggagtagcggaacgttacgttgactacttcaaacgccaactcaaaaaatgcagtggtgatcgaaattggcttagcaaatcacttctctcatatcgatcaacaccaattgctattttaggccaacgctcaccagctgaattgtttttaggccgaaaattgcgcacaaaattgtcactcatgaggcccgaaaccattccaaagcaacaacatcacgaacacacgtccaaaatgaaattgcaatttgacaaaaagcacagtgtaaagccggtacagtttaaaattggagagcaagtccaatttctcaattaacgaaatggtcaaacactttggcttttcgggcgcattgtttcaattaaagggctaattttcgaaatccgttcccctcagcttggcaaccgaatcatcacgcgtcatgccaatcaaatgcgaacaacaatggcacagagcggtgacgaaacatgttcggttcccgatgacatcattttcgcgagggaggagcatggaaccggaaatgaaacgacgaccggaaatgaaacaacggacgatcagcagacaaacacgcagccacaacaacaggcagcgcaacaagaggaacaaaggcaaaaccaacaaccaactttgcgtcgttccgaacgaacgaggaaaagtgttcgttttcttagtccgacgcacactggacagagttacgatcactga

SEQ ID NO: 52274 - DNA, 980 bp, Heterodera glycines
atgcaaatggtacacaaaaattacgggccgttgttagcatttgggggacaaagaacgaagaaaaagagggggacaaaagagcgaagaaacggagaggaaaagaaatggaagcaagagaaagagtggaggaggggtgagggcaaagcaccgccagttgtagataaggtaattgggatttaaaaattcaaatgtaaagagaaaatgaccaatttaaaatattagattaattacgaattacattttttattttaaaaaaacaataaaaaaatttaaggcaaaaccaacataatattttttttattaatttcgattttatttccataaacagtggggaaaattcattgttttgtttatagcagccgaaaatggggcaggagcatcacaaaaataatttatgtatgtttccaaaaatatcctttttaaaaaggcattccatctcatgtgcaattaattgattattggggggggggggggaatattcctattattttaaaagtgtaaaatgtatattaaaaataaaaataatgtataatataatacatattacgtaaaagaaagagtgcattcgaaatttgaaaaagatttgttgggattacaaattaaaacacagctaaaaaccaaaaaaaaaaatgctaaatcgtaacggaaaaagtttgaaaagtgttcgaatttggactgtcggaacaaactttggcaaaaactattagcatttgtataattaggtagatatgaaaattgtcgcgggaaagtgcacttcgcaaagcgacagagacaaagggaggaaaagcatttggagaaaaagcatttctgggaaagtcacggggacttcattcacttgcggttcgtttggttggttgatggtctcggcacggaggtggacaaagaaagcgaaggagcagaagcaaatttttaatttttgtctaggcaaccgaaaagtaaatttaattggcactcatttgtttggcattttgtaacataca

SEQ ID NO: 52275 - DNA, 260 bp, Heterodera glycines
atgacacctttttgcgcatttgttggactgacccaattggcggttactgtaattggaaaaggagtggaagtgcgcgtgagtgcagcagagaaaaataacaatggcagacaatcgtttcgaaatttttttttttaaagaaaccgtcaaaaaccacaaagagcgaggcttcttgaaaaacaaaaaaagaaaataaatataaaaccttagcaaaataagcgtccgctaattgagaaattagaaaagggataaaataagctgca

SEQ ID NO: 52276 - DNA, 154 bp, Heterodera glycines
atggacaacacaaataataaattcattttgttgaagaatggggcaaaattattctatgcttctgaagaatgcgtacgtcaggaagcgaaaaactttgtgggtggaattgtcggtttgaatgggccttcggatttggaggagggcatttatgagg

SEQ ID NO: 52277 - DNA, 79 bp, Heterodera glycines
tcttttggctgccaaatcgcattatttcggcgtcggcggaagtgttttggcattcgttgaattcgtccgctcgcgagga

SEQ ID NO: 52278 - DNA, 697 bp, Heterodera glycines
atgtctctcattattaaattaaattacctgcaaaggaatggacagttccgttcgagtccagtgtgtgccgccgattggtgttcaaattgttcgatctccacgcaatttgccaagtgcgtctcacaacgcgaattcatccagtccacctgaaaaagtcggccaacttgagcagcgccagcacattttcctctgaaatgcgacaaaatgggaaactttacaaaaaaagcaatttaaaatatattttttaaaattagggccttaaccatagcggtacggtggagggcggatttcccccgggtgcactccgttcaccccccccccccccccgtttcccgcgcatcgtttcccttacgaaaaaatgttaaaaactgaaaatttttagttttctatttttttataagttaaatagaatttttttttcagttttatcattaaggtttttccttgaaaaaattaaaaagttagaaaaaaaattttttaaattttttttcgggggaaaatgtgctttgggggtgggggacggacgctccattataaaaatgaaaataaggaatttttagcaagaaacaaatgggtgcattctgaaaaataccgccaattttcttaataattcggaaaatttccaaaaattttccacgcggcggctaccgccatcgctggatttaaaaaattcccataatttttgaaatttataaaa

SEQ ID NO: 52279 - DNA, 2917 bp, Heterodera glycines
atgccggatgacagcccattcatgtaccaaatcatccgcagcaaactgccgtcgactgttctgtccgaactcatcaaaatggaacgtgcggcaggcattccatggggtactcctcagctcagagctggacttgccgaagttctcggagtcagagaagaggtcgaacggtgtctgcgcgaaacaaatgccgacagacaaacacgatttcggcacgaagcaaggccaaatcgacctcagcgaccagaacggcatgaaaatgcgcgagttttttccgttgctcagtccgtcagaaattctgatgacaagcgagttccgtcctgcctgttctgccctggccagcattgggcctcggagtgcaacaaagtgacagatgcagagactcgaaaacgttgccttttgcagcagaaccggtgcctcaattgcctacggaagggtcaccaattgagggagtgccggtcaaagcaagtatgccgagtgtgcaaagaacggcatcattctgcaatctgccctagtgccaaagggacatcttctgcccgttcaaagcaacagaagccctcgcccaggaacaaacagagtttcggaaacgagcgcaactcaaggccattggtgtcatccgcggttgccaatgaggctgactcaatccctgagccgaaaactgttaacacaatcatggcaattgtctccccatccgttcctcatctcgtcatgctcatggccctccgagctcctgtgttctcagaatccgcaccgaacaagcgccgtgacgcactcttcttctttgaccctggtgcgcaagtcactatggtcaagacgccattgataaggcaactgagccttccgaaactacaagacgatcagctagaggtgaatcctttccacacgcggcaacccatcaagatgaaagcgccgcaacacgttttgtgcgtccaacgagaggacggcggatacgaaactctggttgcccatcggacggactggatagtgccatcagtgcgccgtgccacattcctccagggaatgttagtgcctgtggatgaagaaccggacattctcgttggaatggcagacttttggaagtttttcaacggtgtccaacgagtctctccgcaacttttcaaagtccaaacttcgatcggttccactgtctgcggacgcgatgaaattccgtcccgcccaactgccgaccatccactgtccgttatgcccgtcactgtccatgttcctgccaatgaagacgagatgcccaatacggctgtcagcggaattcagagaaacgaatccatctctgatcttgactcgctacgacaattctgggaccttcaaaacattggcatcagagatgatccactcgaaaacgatgacgagacggcacaacaaatcttcgaccagacgactacgcgcctggcaaacggaagatacagcgtaggatggccatggaagaattttccgccggacctgccctcaaattttgccatcactcgctcaaaaaccaaagcactggcctccgttctgtccattctgatgtgcctatttctgattggcgcttcccaaaccaacgccagtagcacgaccaagccaaagcgtgggaaaggacttccaattcgttgccgtggatgcgaactgacctgcacaaaaaccggcgttgacatttcaataccgaatgggattgtcaaattcttgctatgttgtgccggtggaactcagtgcatcactcaatcaggcgttcggaaatcctttcatcgtttgcccaaggaacatcttcttttcgactacgattgcgaagcaatgtactggacgaaacggggcaacaaaagaatcgggagcgtccaatgtccaggcagagatgcgtgcgagctcatcgattgttgggtgtgcctcgaacgactggcaaatcctgattgtcgtccagatgtgaccttcggactcattggtggagcgagcttcttcactttcctcttccttttctggattctgccactgatgtgccacgtcaccatgttttggatcctacagcatcttttcaccctgctcgttcgcttattgtgttgtttttggccaagccaaaatgcaccgcagagagaagaatcccctctccttgccttccaaagtctgcctactccgcgcaggcgccaaatgggtcgcagtcgttttcgtccttttccaaaacttcaaacgacgctcctgttattgaccatctgtgcctttacttcatgtgccagggcacaagttgtctcaatcactgcctctgctgagaaatgccaaaggtccgacttcggctcggtgtgccatctcgagagctcgacaacagttactcttctcccatcgggtctgccggtacgtctactccttcgacatcccgacgagagagtccttggcacgcttgaaatcagcatgcgctcactgactttgcattgcctgccaaaatctgagcaatggcttcggtcctatcacattgagacagtttcggtaaaacggtgcccgagtcgtggaaattgtacacgcgagttctgcgatgacgtcaacaacggaaggaagacagaagttcaggagctgagcgaatggaccaagcatcccggattcaacagatgctcagcatcttgctctttttggtggtgtggatgtttaaatgccggtgccagctgcatcttctaccgtccacatgccattgctaactcgccaattgtctatgagcaaatctcctgtcccacatgggaataccgcttgcgcacttcactcaaactgtcggtcaacgcaaacttcacgaaagagccgtccgtgtcgctcacacccggcattacattccgttggaaggatttgagcatcacacctattgcctcttctgttcctccggccccaatcatggcaaacaagtttctctcggatggcaataacgtggcaatcagtgatgaaatccaaa

SEQ ID NO: 52280 - DNA, 68 bp, Heterodera glycines
atggcaaaatttgagggcaggtccggcggaaaattcttccatggccatcctacgctgtatcttccgtt

SEQ ID NO: 52281 - DNA, 2529 bp, Heterodera glycines
atgtccaagggtcttttcggatgctattcgtgccacactggagctcatctccatttgcaatgccacaccgactttggctccgcacttggctacgttcgtggttcggatggcacagaattcacagccctttgccacaaaacaccaaaagttttgaatgtcagcctgtcattcaaccgtgccgaggtcgacatcaattgtaccattgaatgcagtggaggacggaacccattcgtgattaatggtcatctccgctatgtgccaaaacacttccaagcacctaatgaaggaagctcatttgcctcgaaggccaaacccagcaactcatgcctaatttggtgcccagattggaacttcgacttttccgatgtcttttggtatttctttggcctccaaaatgctctacgaactgttggcatcatcactctggcccttttcatcgtctatgtccttttgcgttgcaaccctgcccttcgatcttggagagccataagccgagtcgtccttttgttccttgctctttggcctacgactgattcttctgcagcgggagggctgagccatctactcagcattcaaaattcagcaccaaagctgcagtttgaaggccattcttcggtgtcaagacgtgtgactgagactctcgacatttttgatgcacaaatcgggaccattcatctcgccaaaaaccaaaaatcgccaatggacttcgctataaaagccgtctctgtgccagtccattcaccattcctacaaattcccgaatcggccttccacattcaaacccaagcccaattccctccatttccaatggccacactgctctctttcctcgccaacacgatgaacatcgatgtcgatcgcttcggtcttgccgtcactacatccatgagccgttggaacgaggcccaggcgatcgttgagggattgcacgctcgcggctacgaactcaagacacggcatctgtacccacgtgagcgaaatgtgcgacttcacgggtctgagctgagccgaagtggtgcgagtcgtctcggtgcctacaatggaagtgcccgtggcccaactgtctccgagctgtaccgctctcgacatggcatcactcttcggcacccctctgccccatgcttgatggagcccggcgggaatgaacaccatgattttttccccatcgaaatgattcgagtcgtggcccctgaccaagtttctacaccacggggcttgtccacacgccctcttccccgcccccgcccgtctcacttcgagctctgggacagaactgaccatccgccccggtcccgagaattggtgatcaacgttatgccccatggtgattcaacgagtcgaggtgccgcggaggaataccgcatcggtgttggccgcgaactcacgatctctggccccctcgttctacgaatctatgctggtgcccttcttcttgccctattctctgttgcccttgtcgatggccaatcatctattgctggtctctgccctgctcattcttttgccctttgctcttcacggctgcacaaattttcttgccactgtccgtcgctttttggtccttccgcattcgattttgtgcaaatcgtcaacaaatttgctccgctggcttattcaccgtcttccggcagcgaacacttcgttaaaagccatgtcaaatcagctgactcacccttctctccgctctttggccgagttcaccatttgccgctatttaagccgttggttgcaaaattggggcaccattcattgccctccgactcttcaatttccgtcgccctcgttgctatgccgtcaacgcactgctcgtcgactttggctcctgttgcttcccatgttcaatcgggtactgcgtcgctttttgatccttcgtctccgcgtgtctgtactgccgatttcgtcagggcgcccgaatcatgccctccaactattggcctctgcacgaccgaccgtatgccgactatcagtcctatcgctgataatcaaatggccactggtgtgacaagccggtggatgagcattcaacaacgcgaaaaatatgaacgacgattgcttcgactaaacggcttccgcccaacgcttgtcatttgtgagccaatgagttcagccattcggcgcgaacgactccgactgaagcgacttcacatggccactccccaggaaccgagaaaacctggagcagtgtcggaggaagaaggaacagcagttgccggaccatcttcggcggggagtgtcgccaaagcgactgagaaaatggaagaaaattgaggaagagaaatttaattgatttaaattggataattttaaatattgtgattaattttattatttaatttgtgatctttgaaattgtgattttgtccctccattgaacattttgtacatttttagcattagtcactctttttgttgttgatcgctctgtccaaattgctccacctacgctttttctttctatttaaacacgcacatttctcactcctcacatcttatacagacatcttattcattttatattatatttattaa

SEQ ID NO: 52282 - DNA, 484 bp, Heterodera glycines
atgacgtccaaggacagagcacagcgaatgactgccaaaggggtggtcgactatttggagggaaaatgcaagccaaggcaaaacgggaaaagccccgaggcaaattgtgtgagaaaaagccccaagagaataaaactgtttggcacaatgctgaccgatgagactcccggacaatccgtcagtggacaatccgtcagtggacaatccgtcagtgtacaatccgtcggtgttaaaaatatttaagttcccttgagtttccggggtcgctgatcatgaatccggcatcaatttcggccgattccgcaccccggaacccgaatttgaacaaaactcaaaagtccaatttttcgaatttagctattatggttcaaaaacggcttagatgatctcttgttgcagtgttgatgggtttcagtttggttccatgtgtttaggcgcagacaagtttaaagattcataactttttttaattcgaccaaataaa

SEQ ID NO: 52283 - DNA, 719 bp, Heterodera glycines
atgaagcgaagcaacacaacaaaagacactcctcctcaaccaaaacgttcaatggcacccccactggacctggacccaaacactgtcgcactcgcagagcaagaacgtcaacgcacattggtcttcattggcatcccggaaagcaatgctgttcgcccatcggagcgtgttaaggaagacagggaagccaccaccaaaatcttggaccatcttgaagttgaggccgaaccaaccgccgtctttcgactcggccggttcgacccgcagcgaacaacacctcgcccgctcaaggtggtcatgccaacacccgcacatcaacacatggcacttggaggatggaagcgcgagcgtgctcgactccgttcgcaacaaaatttggcccgtctgttcgtccgcccagcgctcagcaaggaacaactcaaggaggaatacgaagcgcgtgtcagaaaacgtcaacaaaacactgctcccgtggcaccagcaatgcagccaccacagacaaatgttccggctcccgccaaagaaaatggtccaaaaccgaaggaggccagtgaagacacttcaaaatcttcacaggttgaaaaaacaatcacacaaaatcaaattccaaattcactcccaaaaattgacaattttctcctccaactgcaatcatttcaaaaacaattcccccagtgcttcgataaatagtttttcagacctccagcaaattcaataaa

SEQ ID NO: 52284 - DNA, 938 bp, Heterodera glycines
atgtatgtgaaatatgtcaggtaaaccacacaaatgtttcccgagaacgtgtgagataaagagagagagagagagattgaggaggagagaagaggggaaatgagagagaagagaggaaaggatatagagagaggggagaaagtgatagaacgagagagagagaaaagagaggaagcgatagtgaggggggatagagagagagagggagaacaagtgagagagaaattggatagagagataaggagagagtgagaacgagtgatagagagaggaaagagagagagagattgaggagaagagaggaaacgagagagaaagaagagaggaagcgacagagagataggagaggagagagattgaggagaggagagaaggggggaaaggaaagaaagaaaaagattaagaggagattaaaatcgcaaaaactacttttcttatttttatttgcctgcattataaccgtttgtttaaaaaaaattttgaagtagaacggagcggttgggaaccaagcgctcgtaaataactattgaacaattctgcgcatttagctcaaatatattatttcatacttaaaaaattttatatttgttggcgattcatctcgaattcgagtttcattggttaaacattttgctgcaatacttttgcgccgccttaattgcctgaatttgtttctccaatttctttctaaaaagttaaataaatctgttcatttttgtatatttgttaggccactaaatggggattattttgacacaaaaaagtgaatttttttaaacatgcattttttaaggattaaatgttcgtaaaaatttttaaattgcgcaaaaaatcccatcggagaagctaaatagtagcaaaaggcagaataatgttgagattttgatagttctactgatgaatccaatcaacattataaaatatttgcatcatattta

SEQ ID NO: 52285 - DNA, 209 bp, Heterodera glycines
atgctaattgcggttatgaaaggccgtccgaaaattcaaatcagccaatattctgtgcaaaaatatgaggcacaccttggcattgtgtattttatgaaaaacaattggcaatgtgacaaaattgtggatgtatttgacgaatttgaacgggcagaatgccaaaaatatcgaaaatatttggacattttgtacgaatatttgttcagaga

SEQ ID NO: 52286 - DNA, 569 bp, Heterodera glycines
tctcttaaaaaatcaataagatagtgccaagaaacaaaaaagttctttgctttcactaattacccatttatttattttaattaattactcgcttttattgccaatatggccactgcgtcgaaagcgtcgcgcgtttttagcattttggaaagggccaaattggtctgttggtttgaagagaccaattcgtacacccaaacagcacgaaggtgaagggctaatgaatgaccataaaatgcaaaaaatatccagatttcggaccgaatttggaatggacccgccgccgcgagaacaagtcaaaaaatggcacgacacttttctgaagacgggcacaattgggaagaaaaacggagagggcaacggcacgacggacggccaaatggcactttgaccggcggaagaatgggccgcgaaaggatgcacaatttgtcggcactttgcagtgatcgccccgcttggcattcaattttagttgtggcgttaatgggacaatcagtgaataattgaagtaacaaaaaacaaacatttgctcaccgaaccattggaatttttatcatgaatttattttg

SEQ ID NO: 52287 - DNA, 1089 bp, Heterodera glycines
atgttttttttgccatttgcttttatgcttttctctcccacattcgccactctctctgtcggcaaccctggggttaagagaagaaaacaggtgcaaatttaattaaaaatttcataaataatttttttttttttgagcatccaatcagaacaagccgtgaagacgaattatttgatgaaacacgcggtgctgaaatgttatcaaagtgcaaagcttcaaacatggatttggtaagtttattcaaaatgaataatattaatatattttaaaataataaataaataactgcgctgaaaatgtaaatcctagccaccgaaaaagggacaaatcctcacatattaggaattcaatttttgttatccttaaaaattaatcgatttttcaaaagaaaaattgcgctaatttttatttagtttaaccatattccgaaaaagacttgtcattcatattgagtgaatttgttttccatattaaaaattagaataaaataaatcaagattattatattggacgcgtcaacctcgcgcgaaaacgttttcgagcaccagcgtgagcttgcactgtcattaattgaacggcttccgatcaaccgagaggatgcgcacatttccacggggatcattagcttcacaaacagtccagtgctacgacaaaaccttggcctgggccgggaccgtaaggttctggaaaaaaataattttaaaaatatgaaaaaagcatgggtctgggtttcgtgtttgacccggacctaggatttgctgcacaaaaatccaagttcagtgacaaagtccaggttgtccaaaaagagcctggaaatgtatcctggatctagaaaaaatccaggcctggactcatcatgtccagatcgattcactgtgattaattaacctgtaattgataatttgacaaaattcaaaaatttagactgtccgtaaggcaattgaagacatcaagtacagaggcggtagcacgttgacatccaaagctgttgagcttgcgttgcaggacatgaggcgcggaatgcgtttggacgcgcgacaggtgattatgagcccagtgaaaaagccaattaattaatttataaataaa

SEQ ID NO: 52288 - DNA, 937 bp, Heterodera glycines
atgtgccgccaaatcgggctcggagaaaccggagagcacttctggattcctccgcagttcctcgttaagagcaaggaagagctgatagattatgtctatcctaacttccaacaactccttggcaatgacaaagagctgctcaatcgtttgattctcgctccgcacattgacacgtgtgatgaagtcaacgagatcatgatggcgaatgtgccaggtcaagtgcgggaatacttgtccacggataagccccttgacgaccgcccactggacatcgatgagatcgagtccgaagtggctgcgttgaaccggcgcacagactcgggcatgcccccgcacagtctccggcttaaagtcggatggtcgtcgtccttcttatcaataaaagtgataaggaaggactgatcaatggcacacgcatagttctggaagaacttggcgatgatcgcctcattggtcgtgttatcaatagcaatgctattggcggccaagtgagattctttcttgaaagaacacgaaatgtctatgaagacaaatcgcctggcggcataaaatatgagcgtttgcagttcccaataaagcctgcattcgctatgaccattcaaaaaggtcagggccaaacaatccgcactgtcggcattgatctggaaagggaagtattttcccacggtcaattgtatacggccttctctcgggcaaccgacggaaacaatgtccgtgttcatgctcccaaccgggaaattgatgcccaaggccgagccaaagtgctgaatattgtagctactaatatgctcaagttacaataaatagcttagtccagagcagttggtacatggtttttggagagatgccaaagcattccattcccatctgcactatgttgggtgcgaaaatggtgagaagcttggatccgggacatggaccggtcagccctctttag

SEQ ID NO: 52289 - DNA, 910 bp, Heterodera glycines
atgaaattctgtattttattatttttatttttgattgccctaattattccaattgaatcagaaaagaaaaaacttcagcagaaatcatttggcgaaatatttggagaaaaatgggaagaaaaagaagaagaaaaacgaaatgaactcaaaaaaagagaaataattgcaaaattttataaaataaaagagaaaataaagcaaaaaggaagaaaatattcaacaaaagaatggggaaaaatagaaataaaaatagcgaagaaattggggacaaatcgaatgaaaatttataaatggatcaaggaatttggtcttcaaaaatacaaatcaaaaagtgatgcagaaaaaatagaaattgtgcaggaatttattgaaatgacaaatgaatataagcaaaaaagtaaatattcacgaaaagaatggaaacaaaattatgatgaaatttgtaagaaaattggagttaacagagaaacacttagaaaatggaagaaacaatttggaattagcaagaaaagaataacggaggaagaaaaaatggaaaaaatgaaaatttattgggaaataaaaagtgaaaatccgaaaatgagtgataatgaaattgcaaaaatattgaaaatccaccaaaatagcattataagatggaagaaactgtttggagaagaaatgtttaagaaaagagcagaagaagaagagtgttgatttgttgggaatttaaatttgaagaattttttttattatgcttaaaattattattcaaaaattctttttcttgaattttattaaacatttcttcaactttgaatttaatctggaacttttttgtgacttgaagattttcaacattatattttgttcgattaatttcacagaaatatcttttaaatttgctcgactgatcacatatgcaaataaa

SEQ ID NO: 52290 - DNA, 1101 bp, Heterodera glycines
atgccatccaagctttcccaaaaatacgcaggacatttaccaaattcgctgacaacagtaatgagattattaccaaaaaaaattaagatgtatctgattttatattgtgaagctaggatttaataaaaatttggtttttttagtttttttgagtttttgtaatttttgggatattttttaagtttgtttaggcaaatattgaacacaccgtttcaatttttgcctcccagttccaaaaaagatttgcatgtgtggctcagttgtttttgtaagatagtgaagggacaaaggcgggggttcgagtccgttgtgcaacatgaatatttttatttaaaattcgtgcgttaaaaatgtttataatatttttctctatcgatttgcaaaatttattgtggatttaacaagtagaaaaaaaagttaaacaggatgaagtgaattcgggttttctctattaacagagacaaagaaatagtacgccaaaaatagagatgtttttttctctgaactctctctttattggttcatgtctcgttttttgaaacggtgtgtgaatatatacatatttttggatttttgagtgttacgattttctggcagtttttaggccatatttggcaatttttgagctgttattccatatttcggagctttttagcccatattctttacaaacctatctataagttaatctctaaaaaatttatacctattctgattttttgattattcggaatttcaaccggcgtgaaattctcgttcaatttacccaaatttccaaaaaattacttcaaattttcagttggcttcatttccaattaagaattcagaaaaaggaattattgccacaaatcaaatcaaaattgacattgttcaaattgttgatacttgtttggttgtacttttaacatacatttttttaaatgttatgaactcggcatagtttaaaagatttctaatagatcccactgaaaaacattaaaaattgcattgagcgattcgttatttgaaagaatttctcatgcaaaattgttcacttttaaatattagtgggggagggcaaaaattaaggcaaaataatgatctaaaagatgaaagaataaa

SEQ ID NO: 52291 - DNA, 79 bp, Heterodera glycines
aaaagagcgcaccccatctgatattcccatttttccgttccacaactggccaaaggcgactgtgctcattgacacgtag

SEQ ID NO: 52292 - DNA, 569 bp, Heterodera glycines
atggttactgttaggaccaaacgtataaaattgagtgaatctgagtttatggggaaacgaattttcgagaaatggacaagagagggaagtaagtaactagtatttggttaggtcataataaaagttaagactaaaaattcgaaataaatacagtttatttgtattgttttaattccaaggcgtgttaatttaacttggtgcattttgtacggttaatcggcacaacgaatcaaaagaaaaacaaaacaagagatgaactaaaaggaaagaaagagagagtgagcagagaaaaaaaaaaatttttgatttcgctgtttttgcgctaaattcaaaaattgattgaagtgctttttgtgttgtctgcttttttatcgccacatacagtatgggacaaaagtataataatagtaatcaaacagtatcacagatttttttttaatcgagataaggttattttaggggttacagggtcggagaatacgattcagatatccatttcgacccaattccgaacccctgacgaacaaaaatcgaaaattcaaattttcatattcgcatttttggtctaa

SEQ ID NO: 52293 - DNA, 133 bp, Heterodera glycines
atgtcaagctgtcttgacgtcttcaaactgacggacgatgacgcaatgaaatttttggtgtgcgaatcgcacatcggcaccaaaaagatggactaccaaatggagcattatgtgtggaagcgtcgatcagacg

SEQ ID NO: 52294 - DNA, 55 bp, Heterodera glycines
atgcgaaactctaaaaatttgaaatttcgactttttgttcgaaatctggtccatg

SEQ ID NO: 52295 - DNA, 407 bp, Heterodera glycines
atgaaacggcaattcaacgacaaaaacggcgccaagcccatcactttccaaaatggagagccagttttcatttggaatttgaaaggcaataaggcaaattggttgccggcgacgattatcgagagagttggcaactctccgacttatcgagtcgacgttccgacgctccgttgcgcagtccaccgccttgtcaaccaaattcgccgccgtttcccagtagaaatggagacaccgcaacttggccaagaaaatggaaatgatttggctggggaccaaacgaatcagacccccattaaggagattgaaaaagccaaatctccaattggccgaagtcaaaatgcgccgcgaacatcagcacgcgccaagagggcacctcagcgattggacatggacccgtcgaagccgaa

SEQ ID NO: 52296 - DNA, 1530 bp, Heterodera glycines
atggacgactcagtttctcttgccggcagcgacgacgaaagtcaacaaccacgcccaaagaagaagttcaaaattccgaaacgacgctcagcactgttacgacccatcggtcagcagcaaagtccattacaaggacaacacaaacgccgcaagcaactacaagactcaggcttacgcaagttatttcaagccatctcggaccaacaaggaagcagcaaggccaccacaaaggccatcgaggaaagccgaaaagtgcagaaggcaccacgtcatgaaaagatcgagcatgaacaacgaatggtgaagaaaagtcaacaagaagcaaatcgacatcttcaacccgaaaagcggcagcaaaaagaaattcaagaagtgccacattcaacaacagaagagcaacaacgagaaaccaaacgccaacaaatcgaaagacaacaaaacgacgaacaacgtgccatcaatcaacaaacacgcagtaaggcttggcaagaattggcacgacaatttgactacgatcttatggatcagccggatccaacagagaaacaaccggaagaaacagatcagccaacgaaatcaaagcagcaatcaacaaaggacaaagaggacaaagagctggaacgacatcgcatcggcagaaaaaagacaatcgacatgcaagaaaaacggcaacggtcaagagacgaatggccagaggaaaacgaaacgctgctcagctacgttcaacgcatttacgggccggagaattggacgtcagcatggcaaagaggacgtgttctccgagaactccatgaactggaagatcaagggcgatggatgattcatcacaaatccgatcgcctacaactcagcgtctcgcgaatgtatggaggaaaacgaccatttgctgagttccgcttcgtggaaggcagatactactcacacatggtgccagaagatgtgatcttccttcaagcagtaccaaccgaagaacagccggagatcataacaatcgacgacacaacgacaccggcaacaaatacggaacaaacgaagcacccaacaaaaccgcaacgaccacaatcgccaaaactcgaagaataccgcatggccgactccaaaccaaacacgcacagccaattcaacctgtttcagccatgtgacaacacgcacacaacttgtgccaaaacagcgacttacggttccaccgcaggcaaccgatttcaaatggaagaattccaaaacttccgtgccaacaatttcttcgaggcactgctcttcaactggctgacacgcaacatgaacttgccagcggaagagatttgggcggcgcacgaaggctacattcaagccgacacaacagtggaagaagtcgcgcaaatgttctaccaacaacaagttgcggacagcggacgacaaatcgcacgagaccagcatttggccgaggtcatcaatgtctggcgcaactcatgcgaccgatttggcgaactatacaatcaaccggcacacaagcaagtgaagtttcggccaatcacaacagaaagcgaataa

SEQ ID NO: 52297 - DNA, 3733 bp, Heterodera glycines
atggccagttatcgggcagattggatagtcaaatctatccgtcgagccgaatggaagaccggaaacgtggaaataaccgatgaggaacccgatttactcattggtatggccgaattctggcgattcttccagcggcgcgaacagataaatcggaacttattccgcatttacacttcagtgggacctatcgtatgtggaaaagatatcccacaggagatcggagaaacgagacaaatttgcgcagtcatgtcagcaaaagctgattgtgaatttgcagaaacaggcatcgacactgcaaaaaacttttgggacctacaactgataggaataaaagacgacccaaaagaaaatgatgacgacacagcgatggaaatcttcgaaaagaaagccaagagactcgctgatggacgttatagttcgggatggccatggaaagagttcccgcccgatttgccatcgaattacaatatggcatataggagattggtcaacctccttgaaaaactgcgcaagactcccgagttattggacaaataccacgagtcaatctcgagagagttcaatctcggattctttgaacttggcgaaagaagggagggttttcctgaacacttcctgccacatcatggagtactaactcataaacttcgaattgtttttgatgcttcagcacacccacggggagagaaatctttgaacgagtgtatgttcagaggacccgtgatgattcccgatctcgtgggaatccttctaagattccgtctcccaataattgcattatgggcggacttagaaaaggccttcaatgccatatctttggacaatgaagacagggaatttgtgaaattcctttgggtgaaagaccctaagaagaaattgtcgacagacaatttacagatcttccgttgggctcggattcccttcggagtaatttcttcgccatttattttggctgcagttgtccagaagcatctgaaggagaaagcttcccccttggcgttggaattcgctgggaatgcctttgtagacaatctaatgacttcatgcaaagacgctggagaagtcttaaagaagtatcgagaagggaaagcattgtttgctgaagcacaaatgaacctgagggaatttatttgcaactcaatgaaagcaatggagcaaattcccgaagaggaccggcttaataaaccagggactaaagtacttggcatcccttgggacattcaaaaggacgaattgagcattggattcccaccgacgaatgaagccgggaagatttcaaaacgcattgttttgaaaacattagcaagcatatttgacccattgggaatggtcgcaccttgccttctccaagcaaaattgttcctacaacgattgtgggacagaacccttggatgggacgaaatcttaccagctgatgaaacagcagaatggtttgctgtcattagagaatggaagaccgaaccattcaaatttccgagacgatccgtgctgcaagatgaaatggtccaactccatgcatttgtggacgcgagcaaggacgcttatgcagcggcacttttcataaggtctcagaaaggagaagaaaccaatgtacagttactctatgcaaagagtagactcaagccccggaaagctgaagtaacaattccaagaatggaactcttggcaatgctaattggggcgaggatgctgaacatcaagaggatgcactccagaagagctgagatcccatcatctttggtggaatggaccaacatggctccgagaaccaatgaaaagttggccgatcgacttcgaggtcaccccaacaggagccatgaatgatggacaagaaagttcagaattggacaatgtagttgcagtgccagcaacaacgagtgaagacaatccatggattgacccttgtcgatttagcagttggactaaactacgccgcactgtggtttggtttctccgtgcaataaacaagatgaggaagactcgaatattcgagatttcagagggtgttcctatgagcagtgaagattaccagtacgccgagatcttacttgtaaaaatggcacaaaaatgttggccaatgtggaaaaagcaatcacaagaacttgtaaagacatcgaggaaagatggtcttgtccgactgtcaacacggctcgcaatgagcaatgcatctgaagatatggttaatcccattatccttcctgagaattgtccaataacccgactaattgcacagtcggtacatgagtcccttgcccattctggagttgaatccactttgacagaatttatgggaaaatattggacacccagagcgagactgcccataaagaaggtcattcgagcatgcggtcgttgtcgcaggatccaatgcccggcatataaattgccgacgatgtctcctcttcctgaggaccgcgtgaggcggacggcaccatttgaaagcattgggatcgattatcttggaccaacgaataccaaaattaatggtgagcttcagaaggcatggattgctttgttcacttgcctaagtacgagggctatttatttggaaccagtgcttgacttaagcgctgaggcattccttcaagtgttccgtcgattcactagtaggagaggaactccaaaaagaatcatcactgacaacggcacacaatttgtactggcagctaaagtagcggcagcattagaagctgggaagacacccacatgtccgctcgaagagcaccttgccaacgaaggaatcaaatggcgatttaatccatcactaagaccttggagtaatggatttctcgaacgccaagtcgctggagtaaaggcggccttcaaaagagtccttgggcgtcgaattttgccctacgaccaattgagaacgtttgtcgcagaagttgaagcgacaataaatcaaagaccgatcacctacgttgatgaaggaccaaatgctgtccagccattgagaccggtcgatttcataatgccaaaggccatattgagtttggatgtccggaggaacgaacaatcgtcggacacggagttcgaaaatgaacctaaaaatctccagaagcaattgcagatgcgctgggaaggtactctagccacattggatgaattctggaccagatggaaaaaagagtacctgttaatgctccggaacagattacaatgggagcataaaggaccaagaagttgcctggcggaccaaccaaaaatcggagaggtagtaattatcgaagaagaaaaaactccgaggaactgctggccgttgggcagaattgttgaactccaaggatcggacaatattgtacgaagtgccaaactcaaaataccaaaggcaaatggcgagcgaatttcatggcgttaaatttcgcgtccgataaaccgtctgtataggctcgaagtacttagactaaacttgtcacacattttagtccccggcactaatgtggccacgccctctttcggtgccaaagtgacttccggtgatcttcgtacggctttactgtcgaacaaagtcggtgaggaagatgcttcctccgtcgacccaattgatcgctcttacgcaaaacatttgataaatcaagcgaattccgggataacggtgatattttcaatttttctttttcgaaataaatatattttatgtttttagatcgaattaggccggccgttcattctcaataacatcaaacttcatctgatggaccgcgaccagcgaacctattcctattttgttgaa

SEQ ID NO: 52298 - DNA, 397 bp, Heterodera glycines
acaaccacttattgccaatctaatttcttgcagatttaaagccatccattgcctgccggttctcggcacagcaaagcactaatagggtgtttgactcacttcaaaaaataattccttacattctcggcacagcaaagcactaatagggtgtttgaagcacttcaaaaaataattccttacccaaaagttttttacaacaatttatttccaatctaatttcttgcagattgaaagccatcaattgcctgccggttctcggcacagcaaagcactaatagggtgtttgactcacttcaaaaaataattccatacccaaaagtttattacaacaatttattgccaatctaatttcttgcagattgaaagccatcaattgcctgccggttctggcacagca

SEQ ID NO: 52299 - DNA, 433 bp, Heterodera glycines
atgaacactgattttgtttctacacagcgtcccgaaaatgagcatctgtacaaaaaaaaaaatgtgtgggtaagtggatttgtaagataataaagagaaaagcggtggatgttcgactccgttcctcaacaccaatattttaattatttcttccagaaaatgggaaattgactttttacaaataataattttgtaaggtttttgccaacaaattggacaatttggtagcatttaaaaactctttatgagaaaaagctttttctaagcaaaatattcattatttctaaaaatctaagtttgatctcatattttcccagtgtcacattttcttaaaatgaaaggctttctatcgatgtcgcattttcagggagccttttagtcaactcctcaaagaatgaaatgctttcatcattttgttaaacattatttttca

SEQ ID NO: 52300 - DNA, 85 bp, Heterodera glycines
atggctaatttcttcaacattccccgtcgacaaacaattcaacttttactaattattattttatttaaaatgacgcttcaacaag

SEQ ID NO: 52301 - DNA, 729 bp, Heterodera glycines
atgtccaatggacaagcggagagatttgttgacacgtttaagcgtgccttcagaaaattaacaggggagggaatgtcatcagtgaaggaaataattgagacatttttggtcacacatcggacaacccccaacgattcattgccggacttgaaaagtccagccgaaatgctcctgggacggaagccaagaacaacattagacctactgaagccgcctccaattcagccgatcgaacgtgatcaggcaatggagaagaaattcaatcgccgatttggcacgcgtccacaaattttcgcatcaaaggacgcagtttgggcccgacatcgtctttcacaaagttggaaagccggaacgatctgcggatgtacgggtgtcatttacaatgtgaaatttgaagacggatccagcggtcgctatcatgcgaatcagctgaggttccgaaaggcgacccaaatcgtcgaggaccctttaaacattttgaatggagaattcaatttgccaattcaaatggcaccaatggtaaatggacaccaaaatgggcaggacatagagaataggcctgacccgatcaatgctcaaaacgaagtggaagaacagccaatcgaagaagagcagcaggacgtcattcaagccgctcaatcgccgacgcctgccgttcgatcgccgacgccacaacgacgctacccttatcgccgacggcaaccacctgcgcgatactcgccccgttag

SEQ ID NO: 52302 - DNA, 1791 bp, Heterodera glycines
atgacgggtacatgtcaagaactgtctatttatattgttgcgatacccggtgccattactcttgctggtaaaatgctgacaaattcaatacatatttatatatatatataatttttataatagtttaaaaatattttattatacttaggtttacacctgaagcaatgggctcctgtccgtttaaatgtggaagtgaatggaatggtttcaaagttttgcttgataggtgagaaaataattctttttccttaattggatggtttgattttttgtaaaacttttcttatatattgaaaatattttaacaagaacaaaaagaaaaataaacccccaaaaagcgacatttggctatttataaaaatccacgttgaatttggttaaaattttctattttttagctttaaatctactttttggtagatttatcgatttttaagttattttttaagcaaattttgaatatatacacatttttaagaatttatgaggatttaaaagctttttttcatccatatttggccatttctgagctttttagtaaatgttttatgtctatattggaccattttttataagcataataataataataatgaagcataaataatttatttaattcataaaacagaaaagtttgttgcgttactgcaccattggaccctgtgtttattgatgaagagcgtaaaaaatgtaaactcaatggaaagcattttgaacctgtttttgcctcaatattaccggaaagcaataattttgataccttttcaggtaaaaatacgcaaataataaaacaaatatttaattacaattaaaaattatcctaaaatattgaaatatattttttaaaattagataataatactaatttctgattagagtaattaaatattattttcatttaaaataaacgcaaaaaattcttttataaatataataaagtattaatcgaatgcacccatttattaatttttgtaaaagtacatacatatttttcggcttaacaagcatttaataaaaaattgtaaaaagtataagcaatttaaatggaaagctttttcgttgttttggtacagtttttaaagtttatataattttttcttcaaaatttcaaaaaaatctcaactattcatttaattttattctaaattaattcttataggaatgttttttttaaatatattatttcataattattcttaaaaaatccgaatatttaagttgtattagtctgtcactctacaattcaaattccgaagagaattgtgatgccttgcgcgctctttatgtaaagactctgcgcgcaatgcttgaagatccggaaaaagccggcattaacatgacacatttcaaaacaaaggacaactttttgaaattttctacttggttttggttgtctacgatgacttttatgaagccttttgtttatatttcgagttttggttttaatgcctaggcacctatttttgtgcctatttcgccatttttggcacctatttttagggttttcgaaaaaatccatttcagagccgattatgctgtaacagaattagaagctcttctaacaattagattttgagcaaaatgaaagtcgagttgaacaatctcaattttgccatttttcatcaaatatttcgatttaaatatcttttaggaagaattttttaattatgcataaaattaaatccaaatttgaatggatgcgcgagtgggtcaaaagtgagcttcattgccgaaaatcttgacaaatttttgatttgcaattgcaaaaacaactgacaaaatttatgatga

SEQ ID NO: 52303 - DNA, 137 bp, Heterodera glycines
atgagcaacatccgaattcgcccttcactcagccaagaggaactcaaggcccgacgtgtgctgcaagaagagtgtagcaggaaaagaaaggaagatggcggcgagtgggtggtgtacgcggacaaagtgatgctgag

SEQ ID NO: 52304 - DNA, 1023 bp, Heterodera glycines
atgcagagaataattgggaagaaaagtgagaaatttattaaaataaatttaataaaaaaatcatttagaaattttttaaaacgaaagtttttgggtttaatttacaaaaaaaaaaaacattatttaaattagacgaaatattttaattgcgaatttaaaataaaaaaccaaatatttttgaaaaacttattttcataattttgtcgttccatataaactaaaaatagtggaattatttatttaaaatttaaaaatattattaaaaaacagaaaaagcgtatgatcgtgccgatgaaatgttggcaccgccagcgtcgccaacatctgccagtccgatagaacggccattgaacagcaacaatgccaatctgatggtgcgcggatgggcacgaatttcgggacggaaacggcaccgtcggaaagtgccaaatttggagagcaataacaacagcagcaacaattttggcgtgacaagacgtgaatcaggcacaatgccgtacaacatacaggtggaataaaaaataattgttaatttactggcgccacttgcaaagtccttttgcattttgttatttgacaaatccaacctcttcagatagatgccaaattttgaatttaatattattaaatatcaattcaatcttattttaggctggcactatgtgtggtccaatccgatttagctttttatcttaatccatcagcccctatctgacaaataaataataaaataaatagtctactgtaaccgtacccccagatcaaaaacacattattttttatgtttttttttttaaattttaattttaaaagccaaaaaatctgtgtttaattatcttaaaaaatttttaattgggaaattaaaccaaggacgaattgaaaacaaattcagaatggacgtcgtgaaagtgggttctctgtcgaaagcacttggccaatgattagagccaattcgaatttgtcacgagtggcgcatttgtcggaaaacaccggcagaacggaggatgaaacagaaaggaaacg

SEQ ID NO: 52305 - DNA, 1192 bp, Heterodera glycines
atgccagcgccgcacgacaaaacgaccctccgttcatttttgggagcgctcaattattacggacgttttgttaaaccaatgcgagaaaccagggcgccattggaccaactcctcagaaaggatgaatcctggagttgggagatgaccaacagtccgcgttcgagaaagcgaaggcaattatggtttcagaacttctgctgacccactacgaccccacacttccgatcgtcgtagcggcagacgcgtcaaaagatggcatcggcgccacaatcagccacattttccagacaaaaaggaaaaagtcatcgagcacgcctcaacagttctgaccaacgcgcagcagaactacagccaaattgagaaagaagctttggcgcttgtgttcgcagttcaaaaattccaccggatgcttttcgggcggaaatttacactgttcacggaccataagccattgctggccatcttcggctccaagaaaggcatccccatttatgccgccagccgactccaaagatgggccctaatcatggccaattacgattttgagatacggtacatcaacaccgcatcatttggccaggctgacgttctctcacgcctcatcgcaaattatccccgaccagaggaggatattttgatcgccaacatctgcaccgaaactgagtgctacataagcaccattctgcaaaccaaaacggaacaacttccagttacagcagacgaaatcgcagaggtgacaccgaaagatgagattttaaagaaaattttggcattcacccaatcgaattggccaaagaaatgcagcgacccggacatcgcaccgtattttccaaaaagggaaaacattttggaaatcgagggctgtttgctctaccaaaatcgcgttgttgttccccaatcgctccgcaaccgaatgctgaagtccctgcacatggcacaccccggaattgtgcgcatgaaggcactcgcccgccaacacgtctattggccgggcatggactcggaaattgaacggattgtccgtcaatgtgaagaatgccaaaaggctcaaaaagcaccgataaaggcaccgcttgccccttggactccaaccgacaaggtgttccaacgggtacacatcgattttgcgggaccatgccaagacggtcacgtctatttcattttggtggactcattctccaaatggccggag

SEQ ID NO: 52306 - DNA, 2305 bp, Heterodera glycines
atggtcaatcccttagagaatttgccttacgaagatatcgtcgcgattgaccgtcgcctcttctcaggtagaaacccatccgtccaagcaaaagttagtgacctcgaaaatgtattaagtcaagtttctggctttgaggatgcctcaaacagaaaccttcgctatcttaatcgtcggattaatgcaacaaatgaggcaatctttaaactttctgaggaacttaatactgggctggcaaccatggcaacccggattgattcccttactgacccgaacccatttcacttcccttttcctatccccaagcagaacaagcagaacagaagcaaatctcaaactccatcccgtcaattccctctcaatgtagatttgaatgctcagtcttcaaattccatcactcctaatcttgcccaaaattctgacatccgaaatcgtggactcactgacagttcaacccctccccctctcaatcaagtcatagttgaagaagaacagcaggatgattcccatgtctgggctgatgaatcttctgacagaattaatggattaacatttgagaatcaatcatcgggtgggctcaattccttcactggggaatcttcccagacttttgagtcttggtccagaaaattcatggactacatcgaagccacgggtaggcgcatggaggaaggtgacaaaattggtcgccttaaaatgatgttagaagggaccccgcgcgacatttttgaggacctcccagctgaccgtaaggcaaccctccaagccgccatccatgccctcaaaacagtcctcgatactccctttaagtcccaattagctaagcagtcattggcctcatgtagacaaaaagagggagaaatggttgaaacctttgttgagcgcctcatccccctagttaatgccgcttatcaagaattagaccccaaattccgcaaagatatgcttaagtccgcttttctcgaaaaacttcgggatgaaatttccttccatgtccgacttggtagtagtgcctcccaaacctttgaagagacccgaattaaggccttagaagttgaaaatttattggccactcgcaaaccccgagttgaccccgattggattaatgtcatgtcctcctcttcttcggcccgatcccctccaaatttactccaaggaaatttcacaacctggcaacccccacccccacaacaaaaacgggtttccttcggtccatcacaatccgctaacccaaacccaaacaattatactaatcaattccggccccctagtccccctcgatttcaaaatagaaactggcagcaaactcccaaccagacccccacatgttattattgtaaaaagcctggtcatgtaatcagtgaatgtcggatcctcgcctataaaaatcaaaacagaaattcgcaaaattggacgtctcagcctcctatgttcacccatagcaaccccaacagtattccaatctcccgaccccctccctataacagtggtagaggaaatcaacctcatcaaagaggcacatggcggaaccaacagtcttttcatcatgatcaaaggggtgcatggagaaatcagcaacccttccatcatgacaatcggaattggaatcgctacccaaatcccaaccagccttatggccgaggacgacaaattaattcccttaacacctatgattcccttcccccagactcattccaaaatctttcaatgtctgataatggtccccacccttcatttaacactcttacattctctgaccaagtccaacaacccgttactgcctcaccatctcaaatcaaagaacagctcgtgtgctctggctctgctgataagcaaccaaatctcacggatgctttaaaatccgaaccaaagcctgtttcccccactcctattgtcacaaattgggaatcacacccgcgcagctcaaatttttcaatagctccctttctaactcgttttaattttatcctttgtatcattactctttctctaagtgcttctttggtctcatcctctcatagtcaatcatccttaaaagtcctccctatggtttgtcagacacacgttgagggcacaatttggtctcttcccatttggctaccatgtccaaaattaaagcatactccttctgacacccctatcaaacaacctattcgccttttccaaccgaacccattcgaacaaaaatccaaggcatgggtgtgcaggaaggtaaagaaatccctgattgagtacaccaatccatggaatgatttaatcattaagcaactcccgtccgaaaatctcccagtattattagatgaat

SEQ ID NO: 52307 - DNA, 1111 bp, Heterodera glycines
aggcctgccacatgtccattttgcgctcatccttgattgggacagagtacggagtggaggaatcatcatgacgcccgaagactacatggtccagtacatttcggccgaaattccggaaaatccgtctgggcgatcgccagaagtcatattacggcggcagttgtacaacacaattacaacaaagaatatccacacatgttcaattcggcgttgcattgttgacgggaaatgtacaaaacgttttccggttagatagaaatgtgcattaaatttttcaaccttactaattaaagaagcccttttcctatgacgatgtctactccgaaactgcgtaccctcggtacaagcgtcggccgccagcgttaaccgaaaaggaagcgtcaaaaaatccagacaactatggccggttcatccagtataaggacaaaagtgggaagattgtccgcgtcgacaaccgacaagttgtccccttcaacgcattcctttctgccaaatacaaatctcagttagtgagatttcaatagttgcacaataagttaacaaattaagcatcaacaccgagtttgtggcaggagaaggttgcactaagtatttgtgcaaatacgtgatgaagggagcggacatggcctttattgaagtgaagggcgggccggaaaagcaacagaaggtggattacgatgagttccatcaaattcgccttgctcgctacataacttcaatggaagcctatctctcgctaactggagcgaagcttgtgcgacgttcacacgaagtagctatattagaacaattaaaatgcaatattaattatgataaggtcgatgagctggacgtgcatggtccaagtggacaccggattgctgtggaatttggccttaaagatgaggaggaagacttgaatgcagtttgtgaagcagcacaagccgaagaagaccggagggcaagaggcgaagagcgcgtgactcagcttacagcgtactttgccttcaacaaagacaatgcaccgcttggcctgacatatgcgaagtgcaacaaaaagttgtggtacgacatcgcaaagaagcagtggaaaccatatgtgggccgagttttccgaagttctgccgactga

SEQ ID NO: 52308 - DNA, 1139 bp, Heterodera glycines
atgataagctatgtgttgtgggactacaatccgcccgaagggaatatgccgcaccttcacggccagctcttcacaattccgccggctgaagcaagaactcgaattacagacatttctacagagaattctctcgatgtaagcataggaaggtcctagcaaaaatttagttttttttttgaggactcggtcatggatgcgcttcacagaattctgcgtgagcatcacttgcttgctgtagtctacgagtctgctgctgaaacatatcggcaactaccagctgaagaacgtgtgcaattacggatgcttctcgtagacaccgacaaaacgggtgcagaacgaacggttgaaagtgatgtcgcgcaagcacctgcaaatttgcatgcagacgacagagcaaacgtgaagcaaattcatcctgggcgacttggcactgaaactgccgctgggagccgtcttgtcgcacaagtaggaatcaaaagccaatcaaattattcttaaggtagaaattttgataaatatttagttttacctggacactggtgcgaatgttattccagtcagcgaatacgacatcattttgatgggccgagacgagactaaagtgcgctcaatgaagtggtggaataggaacatcgatcctgctcttttccctcttctatttccgttcgggcaatttggctatggtgaaaaatggtttccttttcagtttttctatttccatgtttttagagtacggaattaaacttgtgctgttgaagaatgaacgttttgactcaacatacagacagatcagggacaaggacaatatgcttttggacgctgatgaagaccttggcgaggaggaagagttccttggggctgaacaagaacaacaattccatcgccgtgatcaagtgtcgagatctcaatggtttcgctacatggcgcacataagagggctcaactacaactggcgagatggtcattggctttgggattggcggacacttgcccagttgtacaccatcagctacaacaatcgaatggaagcgcaaaaagttcaattcatgaagcagcatcaagaacgccgacgtctaattctgccgagctccattatcaattggcttaaggctctccgcgataagaaaggcaaaaaataa

SEQ ID NO: 52309 - DNA, 736 bp, Heterodera glycines
atgcctctctctaatcaaaatcgcaacacaatcatcaaacatgtggccatttggtgcaagggaaagcaagatcaacgtcttgaggttgagcaaaggcgtcagcagctggaaggagaagtagctgcactggtaaaagcttgtggacgcctcaaaaggaatgcgcaaaagaaggacatcgcgttcaagttgaaaagccttgaaatggtgaaatggcctcctgcaaaagccttcgacaatccttacatcaaacaaggtatataagcaactttacaagctctaaattagtgttctattgatatgtcgcaagttttcctattatgtaaggattccttacatgtgaattgattttgccctatgtgtaacaaatagttacactacgcttgaaacttagtaagttggaagaatttttacatatgagcatgcgtacacacaggctaatcaataaatttcatgtaaagcctacggccgaggcaccgatcaccaattccaaaaagcagcaaccatcgctggccgcttccgcgcaaacttcttgggatcgtcgaccgcacggttggcgtcagccgcgtggtacgccacccgtggagtattcgtcaattcgtttttgaaacatttttcaaatcagcattctagcttttgattttcaggaattcagattcattgacgaatcttcactgtttgagacaaattttataaaagctaatttatttttatattgtatcattttgcacgcattaaa

SEQ ID NO: 52310 - DNA, 76 bp, Heterodera glycines
tagagaaaaaaagatattgtttttctctggcactctctatttattggtacacatctcgttttttgaaacagtgtgt

SEQ ID NO: 52311 - DNA, 75 bp, Heterodera glycines
caattcatctacaaagggcagggcggcaacacaaacaatttcccatcaaagaagctttgtgatcaagtgtgcaag

SEQ ID NO: 52312 - DNA, 738 bp, Heterodera glycines
atgaacatgacaatcgatgaattgaaacacaaactcacccagttcctctatcgtccaatcaatcgtcttcaaaattgtaagtttgatgtagatacatatatggatggatggcagtgacggcagggaactccgattttcgaaaaattattgggccttggaaatccggtttccaaaaaaattttgagcattggattccgattcgaaaatttttgaacctcgaatttctcaaaaagtttgggcttcggaattccgaatgtttgggttctcggaatgccattcctgataattccaattcaattttttcagccgtgaatttcttctgcaagattttcgcaaatgaagtgatccatcaaaaagtgcttgcgtcactgcgaccaaaggatgttggacgaatggaatcagtcagcgtctccttgaaaaatattttgctctccggatcagtggacaatgctttttggaaagtgcattatgaacgactttttggcaagggtatatatttttttttgtttattgttgatttatgggtttttgaatgacaaaaaatactttttcgagggtttagtaggggtcaataaagaaatatttattggtttcgtttccattttagttcaagatgaccgacaaattccatatcgtgagcgttttggtgaaaaaatgagatggcaagcgaatgctgcacgcatgcttatggcgattcctcttcgagagccaaaaaccgttgatgttcctgacgagtaa

SEQ ID NO: 52313 - DNA, 132 bp, Heterodera glycines
atggaagagtttgaggaaatggtcgctgttcttcagcttgatggcgtccttgactttgacgcggtgcgaagagcagtcagttctggtgcaatccgagtgcgcgaatgtgacgcggaaacgcccatggttcag

SEQ ID NO: 52314 - DNA, 239 bp, Heterodera glycines
gcatcggttcggggggactgcgccgaaaacaaaagaatcgattttttcaagtgtccgtttggggtactcaaacaggtcatggggagcaaaaatccaacgcagaattaaagtacaggctatagggaagctattccggaaggattcggtctccccataaatctgggcgcatcggttcggggggactgccccgaaaacaaaaaaatcgattttttcaagtgtccgtttggggtactcaaaca

SEQ ID NO: 52315 - DNA, 410 bp, Heterodera glycines
cacaattacctaatttctcatttccccggtttctttctcttagtaattccctttgatacgccgccttttctccgtccgatggatgtttccctcttccgtttgccttctcttccccattttttcccttctcttccgctgtgtcccttccttctcctttttcttttgtccaatcctccgattttcgcctccgattcggctgcttttccgacgtcttcatgccgtaacatccaacaagcttgtgccgctcaacttttcttcttccctccgttgccttccgtacaggagacggtgccggacgtgccgttggcacagcgactggaggaggaggaggaggaggaggggtccggtgaaggcgcgggtgctgtagacgccggcggatggcattttgtgccaatgtccgggcctttgtc

SEQ ID NO: 52316 - DNA, 373 bp, Heterodera glycines
atgccggacgcagaccaaattttgcagcaattggagcaccattttgtcaacaattggctcctcgacacgggcaaaattgatgaaatgaagcaggtctgtatgtttggagggggtgattgcgttaaacttgttttattttaaaatttatatataataattcagagacaaagtgatcagagggaagagcatgatgagttcgatcaaacggaagaagaaactgacgaaatttcgcttatcaatgtcattgattgatggtgatttagcaagaagaaattggtggtcgacgggagacggacgaagaaaacaatggagaaaacaattcgattttgaatagacacagttcgataaaggtttttattcgtttttacaggaa

SEQ ID NO: 52317 - DNA, 2415 bp, Heterodera glycines
atggaaatgccaacgaatcgggaactggcacaaagaaaaagacgcgccgaagaggcggaatttttacatagcattgacgagggcgaacagttggatgaattgacgccgggccgaatttgcctacacgaggtgggccatctgaagttcctctgggacgacgtggattgtgttgacgagtttcgcaaggttattttttttaaataaaaagcaaacaaccgggaaagaaaaattgtaacagggcccattggacttggcccatttcactaattttttcaacaacacaaaaaaacacattcaccctccagagttaccctatcaaatcattcgatagctctaagtgtcttattttgtataaatggagatcaaaaaaaaaatgttaagcgtgaaaaaagggtaaaaaatcccaaaatttgttgggttcagatcacggcagccgctgacccgagagatggcagtgcaggcgcggtccatttccaaccgccggcccagcacaaatacacccgggcgcaattgaaggcgaagcttcaattgtcgctaggtggccgtgcggcggaagaggtctacttcacgcgttgcgtcggagatggctttgacagcttggaatggccggagctggcaccaaggttttttggaaatgaacgaatcgggcccgcccagcgaaaaaaagacacaatcccgactcgtttagtgaaaaaaagcaaagagtcgggccagcccagcgaaaaaagacacaatcccaactcgtttagtgaaaaaaaaagcaaagagtcgggcctagaccaccggaaaaaaagacacaatcccgactcgtttagtgaaaaaaaagcaacgagtcgggcctagaccaccggaaaaaaatgagtcaagcccctaattttaacttatcatgccagtcagaccccgtctgtcggaaaaaacttaaattttaagaaggggtaggtgcatcgtatctccgacaagcagggattagcaggctcaattatgcaaagcttagggggaggggggtggtttctgcaggcgtcgcctaaggcggactcattctggttcacaaaactaatagaattttaccagattgccgaaacgagtgaccagtggagagcgctgccactcgtaagacgcacgaggggccgcaagaagaagcttaaaagggtaactactttttttgtgtgccaaacagacatgcaacaaggggtgcgcgacgcacccgggtgcaccatttcccccacccctgggtcgtttctcataaaaaagaagatgaaattcaaacctagaaatttcaaaaaatctagaaacaaggaaattttacggagaaaaaaacttaataatccatcacaaatttttattaaatcgcatgcggtaaaaagtgagagattttgtcgacgaaggggaaatttttgaaaaatttggctacaatagaaagtcaaaaaatttcccaagtggcgccacaccgccggcctccttgttccccaaaaaagcgccgcaaaaaagtggtgtaaaaatcaaaaaaaaaaaaagtttgtcgcccagagcggtggtactccccccccccccaagccaaaatcctcggaccgtccctggtatacggggaactgttcacaaataaataaataaaattttaaaaataaaaaaattaaaagtgtaaaaaatggagcttttagattgatgggacaccctgaagcgagcaagcagtttgcggcggaagcgagggcgaatgctgcgaacgcgatggagtgggaccaaatgagcaactcaaacgcaagcgggatggaggaggacgaagaagaagcaacgtatgaaatgatcaccccggggcttattcgttgaaaaagggtttttatttttgccaattcttttttgcccatttccttttggccatttccttttgcccatttcaatttctttttggaccatttccttttggctcatttccatttggcccatttcaatttttgctcattcttttttgtccatttcgatttttacccaattcggttgtaatattttgttcaattcgcgcaaacaaaaaaaaaacaatttcttaaccggtggatatacaaaagtgaaaatgtaaaaaaattttgatatagaaaaactgactaattttctccccttattccgtttacaatgggcgtgttcagtgccagaaacgcgatcagagggaatcaagcaaagggtgcggcacgtggggatggggaaagagtggaagagaagggatgtgggatgaagtgaaaaaaactaattttgcaacacggcggccagggttgccatgccaaaaactgcatttaccacatgtgcctgcccgttctggcctcctcccctgcccacctcacactcacaatcaattggacatcgcagtttgccccgttcgtcggttgggagctgttttcttgaaaaaaagcaaattttgaaaataaa

SEQ ID NO: 52318 - DNA, 70 bp, Heterodera glycines
aaaacgcagccaagaattcgtccgctgctgttccttggtgcgcgttcggttgaactgagcatttttggag

SEQ ID NO: 52319 - DNA, 1037 bp, Heterodera glycines
atgcctggacctggacctggacctggattccatgttggacctggacctggatttcctggacaaaaatccaggaaaatccaggtccaggaaaaatccaggctcctcgagacctggatccaggcctggacctggattttttgaaatttattttaaaaaccaaaaaaatgtttgaaaaaattaattatttgcgtagaagcatctaaaaatatctaataaataataataatgtgtttttaaatttatttaatctgttttttaaaacttgaaaaaacatcggtctgcacgagcgtctggaagagcaattttgccctatagcggcgcccaaccgctcgttccataaatcccgatctctggcacttttatcgatcattttttgacattttgtttaatttaattcgaaaattatttttgtctaattagatagtttaatagttccaaacaaagggggggggatgagggcatctaatttattaccaaaaacaagttttataatttaaaaatgagcaacagtcatcagcagaaacgtgaagaatttcaaaaatattgcaaaaaaaaaaaaatttttttttttgattggttcaccatgtttctttttaatgagtggattttttctcattaattttgtccaccataccctaaaaaaacggtattgttaataggtttgtcgcaattaacagtgtgcacaatgtttttaacatttactgagttttttttgttcaaattgatcacatcatttgggccaagaatttgatttcaaaggaattttgcgctatatgttaaattttgaagcagtaaattcattttgatattcttactttaatgtggaaatgagttaaagaaataaatgctaattttattttacattttacaaaccttttttgtatgacgttcttcgaatatacataaaatattttgtttaaattttcttaatttaaccgattttcattttattttaagttcggaatcagcaatcaaagcctatgaaaatttccggaatcattgtaatcaatcaattatgagcatctttttattttcaa

SEQ ID NO: 52320 - DNA, 345 bp, Heterodera glycines
atggcattaatcatccgcgggtctgctgactgcttccttccgcccccggggcgatgctgggaaagtgagtagggaagaagtaaaagtgacggaggactttcaaaatgaattttggaaattgctaaaatgtttaattggattgatcgatcaatggcaaaagaaacaaaaacatttcaaccggcaaattggtacagagaaaattgttaaataatttatttgaattcagaaaagggaaccaaaatgtgatcaaattgcaatgagaaaagccgttcttctcggatatttttgaaattagtttgttaaggatctcaaatttgttaattaatgacgcattggtctttaaaa

SEQ ID NO: 52321 - DNA, 1265 bp, Heterodera glycines
atggaatgccatctcagagccaatgcaaagagtggttggtgggcacgacacacggcacacacaccccatggggcgaaaagatagagatcggcattttgaaaaaagcctggacctgtatttcctggacaaaaaaccagaaaaatccaggcccctcgaggcctagacccaggcgcaggtcgatctcaaaaaaacataggatttccaattttcccaaggatttcaaacagtgcagcaaaaacctacagaaaatggataaattgacaaagaataaatttattttcccctcgccttaaaaaggtgaaaaatttgttggaaattcgacgcgcgcatttcccaacggcgcaaattgtgcgcagagattgtgtggagccgcgcgagttggacgaattgccccggcaaatttgcagggggttcagccattgtcaggtgggagaggagggcatcaaaaaatttatttttatttcgaaagtcgaaatgccccccccccctccaagacgcttattctcactgatcacggctcgggttccgctttcacaatgcgcggctgtgccgaacgcttcggcgccgtggacgcggaagtgttggcacggcgtggagacaatgtgtgcaaaaggtgccaaaaatgaacgaacagtcggtgaaattcgcctcttctgatcacaactgtttgacatttttgacctaaaaaacaaaaaaagggtagaagtattgcatggctttagcaattttaggaaccatatgacgttatgccaaaatggggcagaaacgggaaacttttaaatagtctcatccttaccaagtcccttaccgtatccaaatattaaaagaccgtgaacatttcttctattttcattttgaagattgcacgaaaaggtggacattcaggagtgcatttgtgaggtatgccttttacaaattgattttaaataaaatttttaattgaattttagcgccgaaagtattgccacgcgggctccgaccggtcgtcctccgtccgcttcacgccaatgtccgaatggcaccgccgccgggcagtgccgtcctccgccgcctcgtcgggccaaccacaaaaatccgttgggccatccgccgaagcattgcaacggagcaaaagcaacggggaaaggggcacgaagaagcagacaatgcttctaacgctgattgggatgatgacagcgattagtgcgatgattaggacaataattggcacgggcattggccacagcggagcaattaacacccattaatatttttggcaaaataaa

SEQ ID NO: 52322 - DNA, 1201 bp, Heterodera glycines
acaaggatgttcttgaatttgtggaccgccttcctctttaggtgcgccggataagctcaaggaaattccatttgcctggaaggtatcacagttgacatttgcttttgagtttttgagctaacaatttaaggtcgtactcattggaggggactggaagcagttgacccctgtcattcccggagggaccgaccggcatcaactcgaggcttcagtcaagaattcgtcattgttcgtcaactttacaactgtgcgactgcgtgccaaccaccgcttactgcccggccaacatcattatcgagcatttttgaagcgcgttggcactggtaccatcaacgacagtcaaggccgtgtcaagttgccgtctttgatggttcagccatcccgggatgagctcatcaacgagatttttccggcggacctgctaacaaatccaaccaacaactggaaacagcttgcggaacgagcaattctgtgccctctgaaccgcgacacgctgacattgaatgaaataataatggtagaaaaagtcgatagattagttgtaagctttttccgataaaggaacgactcaacacggccgagcgtgtctaccatgcagtgacccttccgttggtggatgagacgggggagaacgaattggagaatgttgccgccgatgcggaccacgaaaatctgagccggatgactcctccggggattccggaacatattcttcgcgttcgcgtcggtgcagtgatgatgatcatccgcaacatctccttggaagaagggctctgcaatggaacgcgggtgcaagtcactgaacttttcgacaacatcatcagatgccgtattctcacgggaacacatgtcggcaatgaacacgatctacatgcggcacgcttcacttttggtggtgatccgaaggcacctcatgaaggtccattcaagtgcgagcgcatccaatttcctctgcgtcctggaagcgtgatgacaatcaacaaatcgcagggttaatatattgatttttaaaatttatggttgaaaataatttgaaggacaaacattggcaagagttggtgtgctgctcgattccgcccagtgtttctcccatgggcagctttatgtggcattgtcgcgggtgcgagacgctaacagcatccgagtctgcaccacccgcaatgatcggcgcgtcaaaaacgtcgtcatgcgggaattgctc

SEQ ID NO: 52323 - DNA, 132 bp, Heterodera glycines
atggcacattgtgcgagtcttgtgcagatggatgaggatgtgtatgaagagatgaaattgtggatgaagggattggtggcgatgtggcgggacgaaaaaggagaggacggcatggactgtgtatttgttgag

SEQ ID NO: 52324 - DNA, 8108 bp, Heterodera glycines
actataaaaacattcattgatagaaatggattaattagaatggacacaagaattaagaaatgtgaaatggaattctcttttaaatttcctattgtattcccaaaaagagcaccaattatagaattattaatttggagagctcataaaaaagcaaaacatggaaaagttgacagtactttaaatgaatttttatcagaattttgggcaccaaatgttagagcaactgttaaaaagattataaaaatgtgcagttcatgcaaaaaattgaatggtccatcatttgcattaccaataatgccacaacacccagaagaaagagtaaaaatttcaaatccattcgaatcaatagcacttgattatttaggcccatctttagtaaaaaatgatgggaaaacagtaaaattttggattgtattaattacgtgtctaattacgagagccgtttatctcgaaccagtacttgatttatcaacttattcatttttacaagtcttaagacgatttgcaagcagaagaggaacaccaaaacgaattatttctgataacgcacagacatttcgactggccgcaaaggtagccggagcatatgaagcaagaggtggaaaaacaagagacgaattagaaaattatttggttaaaaataaaataatatggcgatttataccagctttagcaccgtgggcaaattctttagccgaaagattggtaaaaatttgcaaagatgcttttaaagcatcccttggtaaaatggtcttacagttggatgaattacgtacattcacaactgaggttgaatggacaatgaataatagaccaattactcatgtttcaattgaaccagaaggagaaagagcccttcgtccaattgattttataaatcccggattgaatttgggattaacaatgccaaatacagaaaaagaggaggaaaacaatgatgatgatgatgatgattataatccagaacccgaaaaattagcagatcatttaaaaagacaatggcaaaaaacaaacaaagttttgcagtggttttgggaaagatggcataaggaatatttattagttctaagagacagaacacaatggttccataaaggaccaaactcacaggaaaaacgagaaccaaaaatagatgaaattgtattaattgaggacgaatttcatcccagaaatacctggaaaatgggaaaaataattaaattaaatggagaaaaaggtgctattcgaagtgtacaaattaaaatgacaacaaaaggcaaagaaatgactggaagaataatagaaagaccaataaacaaaatatactcccttgaagtgaataattccttagaaccaaaaagttatgatgaaaataaaaaagaagaaaatataaaagaaaaggaaatttgcgaagttcaaaagaaaaatacacaacaaatgacaacaagatcaaaaacaagaaattatttattaagaggaggcataggattacttatgacaatattattaatgagttcaaatttatttggatttacaaacgcaaaagaaaataacaaaacgaaaagcatagtcaaattaaaatgcaaagattgtgaaattaaatgcggatcaaaaggaatagaattaaatacacccacaaaaataaataaatttgaaatttgttgtatgggtcattgccgatcaccgacttttagaaataattatctatttgaattaagcaaagaaatattgattacagaacactattgtaccgtaaattactggacaaagaaaggaaaatcttatagaaataaaattatttgcccaccaatagaaatatgcaaattaattaaatgtttattttgcctagaaaaattggcaaatcctgaatgtatgttgaccgaaacgctcatactaataggaatcggcctaacttgtattatttcttttattatttgcatagcaagttttatcataaagtttatcataaaaatatggtggattattaaaatttgtttttatgggccatatttggcgttaaaatgggtcttgaacccaaaattagacaaaaaatttaacgatgagatacagaaaagtttattaaatgaatttgaaaaaagagaaaaaaaattcaaaaaagaaaaaacagaaaaaacagaagactatatagacttggaagcattgtaatattactatttttatgtttgacaatgcctgatttagtgcacagtggtgccgaagtaatatcaattcagtcaacttccgaagactgtgaaagacaattaaatggttctgtatgtagagtcagtggaacaaccgaattaacaatattactcgctggacaaaaagtttcattagcattaaaagatgataaaggaaaaataatgggttcattagaattaattttacaatttttacgattacactgtaaccaacaaactttaaaatggttacgatcatataaaataaatgttatttcaaaaagacgctgtccaacaatgggctcatgtacaaaaagtaaatgtaaaaacattaaaatggatgaaaaaattccagaaatggaagattatgaaaattttccaggaaacaatttctgtaaaaaaggagacgcaatttggggtcataaatgcgcactcccatcatcggaatgtttcttttatagaacttacgcagaaccaacatcaaacacaatttgggaattaattagatgtaccggatgggattatgaattaaaaatgagtttaacattaacaatcggaaacgaaacaaaatctaaagatttgaccatgtttcctggtcttacagttaaatggagtaaattttcatttacaccggaaggattaacacctccaatttcaccaattttcaaaattaccattcacaaccgcaaaattaaatattcgaaaagaaggtaaaaaaatattaagcgagactgaatattctccagttaagttagcaataagatttaatggtataaaaattgtaatagtcacagatggaacaaaatgcaacataaaaccaactaattttagcggctgttacaattgcggcacgggtggaaccctaaattatgtgtgccaaacagaatttggtcaagcagaagcagaaataaaatgccaaaatgggccaatatttttagcaaaatgttcagaaaatggacatgaacaaaaggatattttaccctttgaaatggccgacataaacatgaattgcattgtcgaatgcccagggggccaaacaaactttaaacttaaaggcacacttcgttacgtaccagtaaatgaaaagaaatttcgaaaaataaacacagaaaaaattaatgaagacgaatccgattggaattttgaaaacattaaaataattgattggaaatatttgctcaaattcgcacttaattggaacaatttattaataattttaattttttcaacattagcactgtttattttattaataataatttttatatttataaagttttcaccattttacaatgcataccgtattattagcagaaatttaattaacaatattatttttattttattatttaatcatgcaaattcaaaaacatttgcgttcggagggtcacatgaatgtgacaattcaaaattaaacattatgaatgaaataaagaacaaaattttgtggagtgaaaatgaatcagcatttttcataaagagaaaaattttatggactgaaaatgaatcagaaatgattaaattaaataaaaaggtgaacattaagaataagagtgatttaacaaatttacaaaaagaacaaaaagcaattggtaatagaaatgctagtacattaaaatttaaaggcaaagattgccataaaatttatattaaatatagtgattcatttgtcaacatttttaaagcattgtcaaatttaaacaaagacaaaaaaccaaaaattgaagataaattaaatggatataaaaggaataagaaaaagcctattttttaccttaattatttttctccaatccattttaacccaaataaaatattcacaataatgaacaaaatttccttgctaaaattagcgtccgaaatattcggaataaaatccgaacaagtggccaagacaattaaagacgattggaaaaaattccagcaactcgaaaatgaggtaaaaatcctggaggaacgaggtgcgcgaatatacagcaccaagaatggaaagcggaaaccgcatataaataataaaaattgggttttgtcaatggacaaaccagacgatgttatttttggaggaacaaaatcaattaaagtattgaatagccaaattttaaaaattgaaaaattaccgtggtcccaagctggaccaggaatagtagttgatgggaaattttacccgttaatgagcttagaaattgggggcatcatcgaccaatttgacatatttaatgaattttggaaaggcatcgaaagggccaacaaaccaccaaaaaatccagaaaatttggaccaaaattccgaagaggaaaaaataaatatttctgaaaattcagtaaaaaaatctgtagaaaattcataaacaatccaatttgaaattattggagaaacaaatgaaattgaatttgaaactatgtgccaaatttttaaggaagagcgaaatgtccatggtaaggacatcgtcaaaagaggcgacgggcttttgaatttgaaggtaaaagggtcacaaccccaagttagaaaaatgtcccttaagggaattattaaatggacaattttggcaattttcatcctttttggccatgtcaaaggcatggacaacaccaaaaaattggatgagagcatcatcgacgaattaagcgatgatggtgccattgaagaaaaggacgaaaaatcacagatacacatgagcatcctcaattgcccgccttcaaccagcaatgcgcctcaaattcaagccgaaatcggcacactcatacaaacccaaataagcgcaatggccgaaaattggctgcgatcggcttttcagcaagggccaatgaattaagcaacaaataaaaaaggaaatggcggacaaaaaatgggaaaaaaagggcatttcctttttcccaatcaacggcagaatcaggcgaaagttggaggaaagttggaaaaactggcgcatcacaatggcagcgaacccatgagctgacaaccgtcgcagcagatgccgtcgaggctttggccgaacatcttcgcgactacaatgttgccgtgtccattctcctggtcacaattgccgccggacttgccgagatgaacaatcactacaagggcaacttcaaagggaacagaaagtgaattgtcggccgccggagtgtcgctaatttcatccttagcgacgaaaatttaaaattttctgtcagcccgcctatgtaaaattgccgtatttaaaccattgtaaaatcaccataattcttattgactatctgaaaagagagtcaataaaaataatcaaaattaaaataaaaaatattttttcttcaaaacataaaattgctaacattttatccgaggcatagaacatgtttttgtattaaaggtggactgaatgagctgttcggaacgattacaaaattttgcgctctgcacctgctgctcccggtattccacgttccccgagaattttctcatcaaaggggtcggggctgaaccttatttatttgtggggcaaaaattttataaatattaactcgcattaaaaatttgaccaataaatgaaaacaggaattataatagaacatttgagaagcaattgatgaaatagaaataattttagtaaatgaagcagatgatggttcggacacattatcagttgaattaggtgcgcaaggcaaccaacaaaaaataaatcaaaatgaaaatgagcaaagaattggaaatagagaaagagttgagactcctccagtatattatccgaaacttccatggccaaatttttatggagacacaatgtcttggccagttttttggcaagcatttcaagccaatatgggcgataaaccgattcccgaagcacaaaaatgtacttatttattgttaagcctaaaaggcaaagcagcccgagcaatgagagggtatcaaccaacagcagaaaattataatttagtaataaatgcgctaaagcgactttacggtaatgaaaaagtcataaaagaagcactacagaatgaattattgaatttaccgcaggccaatgaagctgctatttcactaagaatttgtttagaagatgttgaaagagttgtgcgtcaattaaataatttgggattcgctggagataaagattatgtgatgatgacaataaaaaacaaatttccgagaaatataattttagaagcactaaaagctgaaaaagacagcggaagagaatggaatgttgaagacttgataaaaggtctagaggaaataataagcatgagagaagaagctgcaagatgcacaaggatgaataaaacagcaggaacacaaagagaaaattggaataataatcaaaagcaatttagacagtttggtaatcaaaataataaatggcaaaataaccagccgagaaataaccgaaacgatgaaagaaacccacaaagagtcttttttacgcaagattcaaataataaacaaaactcacgtccacctataattaatccaaaatgttttttatgtggcggagcgcattggccatcaaaatgtagacaaataattggtcaagaaaaccgattgaaaataataaacgaacaaagcaggtgtcatcgatgtctcaaaaaaggacatgaaaaaataaattgcacaggaaaaatgtgttttaactgcaatggagaccacaataaattaatatgcatgagagaatttcaaggaacaggtgcaaaccgaacagaaatccgattgccctttaatagaactaatcagaagcaaaatccaaggtcaaatttagcagctactgcaataaaaaatacattggaagaaaaagaagttttactgatgtctaaaagaataaatagttatgatggattagaccgtaagaaaaaatcagttctagtcttttttgacaatggaagtcaaatagctatggctacagacgaattaatcgataaattgaaaccaccaaagataagcgaaggagaattagaattattgtcagttcgaaaaagtaaaccaacacatttgaattctccaaaatatttaataaaactcgaaacaacagaaggaggtatggaagaaataattgtcaaccgagtcgatctgataacaacaaagattaaaagagcgaatataatttctggcaaaattgaattaattgaagaaaagccagacattttaattggaatgagagaattttggagattctttaaaaaagttgaaccatttaaagaagatttatttaaagtacatacagttttcggcccaataatatgtggtgaaattaatggaaatgacaaattatgtgctctcacttcaatgggattagaatgcattgaaaatgaatccgaaaaaatttgggatttagaaacaattggtataaaagataacccaatggaaaaagatgatgaagtagcattaaaaatgtttaaagacacaatttacagaaaagacgggcgatacgtagtaagttggccatggaaaggtccaaaagaggaattacctacaaattttaccttagcttatcgtaggatgataagcataattgaaaaattaaagaaatccgaagaacacctcaaacaatacgacgaaatttttaaagaacaattaaaagaagggattgttgaagaaagcgaaattaaaggatatgatgaacattttttgccgcaccattgtgtattggtagccggaaagaagccaagagtagtctatgatgcttcgtcaaaaatacggggcaaaaaatgcctcaatgatttattatttagaggccctatttatatgcctgagttaccaggactgttaatgagatcaagactttctaaaattgcactttggggagatatccaaagagctttttggacattagaattacaagaaaatgacagagataccgtaaaatatttgtggttgaaagatgttaataaaccaataacaaaagctaatctttgcgcatttcggttcaaaagagtgcctttcggtgtaatatcatctccatttttattaggtgcaaca

SEQ ID NO: 52325 - DNA, 1015 bp, Heterodera glycines
ttacatcgaccaaaatgtcatcacatttctcggcggttttcgccgtcttttccccgtcagttcgatcaatttggacattgtcactgaaaatcttcgaattttggaatttgtgctgttcacaatttggccaatgctcggcaattcgatttgtctcctgaaattaaacaaaatcgttcttcacggcttgcgtcagttggccccgtccattctctgcgattctccggcacttctctacacaactgtagaccgtgttatgccgttcgtttttccgctcggtgacaatgctaatgcgtcggatgaccaagcgctgaccaaatggctgttgacgcctcgtccggacggtgtgccaaaattgcttgattgtaatgtcaattctgttggagaaaactggtttgcggcgatggatgaactccaaaatgtgagtgttccttttaattggtttttctgatttttgtgtttcaatgattttttgtcccattttaggcatttcgcattgcttcttctcctgtttcttttcgcgtgtttcttgggtttccaaagaggcaaattgacatcgctgtgccatttgagttgaacaatgaagtcaccggagaagaactgactcttcgacaaatcgttccgcgtcattttgtgctcacccgttgtccaattggatgggatcatcgaaattggcaaattgtgagcgctctaatcaatgctcgaccgaacccaattgacattgtgatcaaagatggcgaattcgacgaacggtgaacaatttaaaaaaaatatccattttgtttatgaatccaatcaacaaatgcttagacttagtgctttcaactgataccaaaactgtatggtttattttaaaatggacagaaggactatggtgccaaaaactaaggcagttgattggactcataaactaaatgcactaataaaatgccaatgagttataatttgcaatacaattccttttttcagtcttctcaacacagcttctcccgcgccgggtggtcagcaacaacagtag

SEQ ID NO: 52326 - DNA, 270 bp, Heterodera glycines
ttgaagaacccaattgcattcacagcaagtgctcgtcccatttgtttaatggaatatggttgccaaataattttaaatacttttttaaaattaaaaatattttgcttatattttcaggcaccaatgatcagtcaacctttgttgttgctggttggggccgtacttcaccatattgttcgaatgacagtaagccaggcccaagcaaacaattgatgtacggtaaaatgaaaatcagtgcaccagagaattgtcaaagtgcatcaatcaaat

SEQ ID NO: 52327 - DNA, 105 bp, Heterodera glycines
  unsure (1)..(105): unsure at all n locations
ccgggactcaaatgtcccgctcaggccaaaaattttttctatttccgggaaaaaatcgaaatttttccgaanaaataccagtcgatagagctcgaaaaactatgt

SEQ ID NO: 52328 - DNA, 1405 bp, Heterodera glycines
cagcagaaggtcacgctgggcgttgaacgctttgcactgcccgaactgctgattcggcctggcgatgttgaagtccagcaaatgggcatcccagaagcattgtgtgctgtcattgaacggctgccaaagggtgcggcggggggcaggggtttaaccgaaggcttttacttaaaaaaagatgtgataccaccgtgtgtgtgctgtacccaatcccgcattttttgggaattgcgggatttgctggattaatcccgcgggaccccgtctcacgcaatgccgcagcgggatctgcaaatttaaaatttcaggctctaatattcactcgccgtagggggcggagcaggtcacccccgcctcgaaattttttaaaaattgttagaattttttttttgaaaaaaactgagtttttaaaaatttttagggctgggggaaatgaagtgcacctcgtagcggaggagaagaaggagtacttttgcttattgctttcagaaatgcagctgttgatagcgcggaacattgtgctgaccggagggaacgccctcttcccgggctatcgcaaaagaatgtaaaaattttgaaaaaaacaaagactcacattttaccaagaaatagtgtaatactgttgtttgtcccccctttttaaataaaaaattttcaataaaaacaaatttcctatggtttccgagggactaggtcgtttcggcgccgccatttcggcgctagcccatgttttttgtgtataccttttttctttgtaagcaaaatcaaacaatcttggtatcattcgaaagtccttcacatgctctactagccttacaaaaaaaaaccaacaaaattctagcctttaaaaaattattaagaaaaaacttcaaaaattttgacttttttgaaattttcatgtatatccgaggttcaccaattcaactgattccgatcaaattcattcaaattgttgaatttcgaaatttctttttttattgcagaattgttggttttcagtaaaccgatttagaactcaaaaactcgaaaattgaactttcgacttagtgttcgaattcggacccggagtttggaagcggtcaaaatggacgccggtttcgtgatcagcgacctctaaaaaccacaggaaacttgtttttatgaaattaaaatttttgaacgttttcaaaaaagggcggggacaaactcaataatcaaaaattgtttcttagccctttatttcaatttttattttttatcatatttattttttgctaattggcagtgagcaggaattgcgttccatgatgcccgaacagttcactcttggtgttcagcaaccgtccgacccgatttgccacgcgtgggaatgtgcacgcgacgcaatccaacaacaacagcacgatggtgcggaaatgcacaaaaa

SEQ ID NO: 52329 - DNA, 734 bp, Heterodera glycines
atgaggcaaattgtgctaattgcctcaaaaaagaacaaaatgtaaagcaattataattttaattgttccaaattcatttaatttatttaccaaaaatagtttccacattttcagttggttttgtactgattttttgatggacattttccccttttttgaccatgccgaactcggcctcaaattggcactgatttcgccccatttcgatgttttagtggacaaacatttcgatggcaaatcagaattgacactttggagatcaatcacaattcgtaaggacattgtcgcaaaagtgccaaagttgtgtgtgtttcttagtgccaattctgttgaatttccattgcccgaccattcgctgcctaacaaaattcgctttaagaacctacggattgagtaattcaaatataaaaagaaagaaaatcacttcttttcaccattttcagatacattgatcattccgtcatcgcttttctccgttccaatcaccaaatttgggacaaaagaggcatcaatttgcgaaagttacggtactccctgcgggtgcatatcaaggctggccgtgatcacggatcacggaaatcacggggtttctgagatgccgtgatctcggatcacgggtcacggattttttcaatttttccgtgattttgatccgtgattggcattttatgtactgaatttttattgaaacgaaaataggaaattattgtgaaaagagaaattgtttgagaaaa

SEQ ID NO: 52330 - DNA, 1932 bp, Heterodera glycines
atggagactggtatattatttttcaacctcctcagaagggggtatataattggaggccggcagattaatggagactggcatataaaaagagtatatacggtattttgcttaataaaatttatttgctttgcttgattgctgtggctttgtgtgtatacggtttagggccgaaacacacataataattaatttaaattatttaacccaaagagacaccgtactgatgaggcccggtctctttcggttaaatttgcacgtttcgcgaagtgcccacttttattgatttttatttttgcactgtcgcgaaatgcgctgcccgtcaaaatgtccctgcgtcataatgtcccagcgtcataatgtccctgcgtcataatgtcccagcgtcgaaatgtcccagcgtcataatgtccctgcgtcataatgtcccccaagccaaaatgagtcaaaatgtccccctctaaaaattagtgaaaaaactgaaaattatataattatatgccttcatacgatctgcttttaaaatttatgctttagcatcaatatagaccgtaacaaaattgaaattctccaaaaaagtcgtaagcgtaagtttttggacaacaacgacaatgagaacgaaacgacttctgagcatcatgaaccaaacgacgaaaacaatgaccgcgacgacgattttgaagaacacgccatcgtgaacttcgaactcgggaaaactcattccatattggaacgtgcactcacatgcggcttctgccctcgcgagaaccaataatggcctcgaagcaacgcacctccatttcgctgtattttttcacttatgaaacctcccccaaaaacttcaattttagaagggtctttgtcaccacccggccctttccgactttatttatgaagtcagcagaagtatcgacaaacaagtggacgcagcgagatcagctcggaacttcatacacaaacgacacaaacgctacgtgctgcaaaacgcagtcatcattcgaattttagcggacgccacatacgacaatgatgccgaaattcacgatgttatgacggctcttggtctgcaggtcaaaggatatgcaggaaaattgaaggactatgaaaattttgatgattcgaccacgcatgtcccttaaaattgttcatttcgtttttattattccttcaattaattagaaaatcccattgttgattgatttttttgttgtttacttgattttgatcaatttttaatgaacatagtatttgcgaaatcaaaaattatataattttcagttttttcactaatttttagagggggacattttgactcattttggcttgggggacatttcgacgctgggacattatgacgctgggacatttcgacgcagggacattttgacagcgcgcccgcgaaatgacatagcaccatgaaaataactgaataagaatttaaaaaaatattcattttttagaatattctctaatttcttaaatattttaaaaagaaaattcttatgtaagttctttgttgagtgttgccttaatgtgtaatatttattaatattgttgatgaaatatttaattaaattatatcagaaaataatatatatgaaagatttatatgtttaaactttcattctttaagcattctaagccaaaattactattttcaataactcgatataatttaagtgcgagtacattaaatttgatataattctcaatataattcacctctaatatattttcattttttagggtagaaaattaaaattatttttggatataattaatcaatattgtgtatttgttaaactttaatttatttatttgaaatgaaatacaattttttattgtgggttttatttattttaactattaaaaattgattatagatagttaaaagaattgaaatattaaattacatttttaatctaaattgagcaa

SEQ ID NO: 52331 - DNA, 269 bp, Heterodera glycines
cgacttttttggagaatttcaattttgttacggtctatattgatgctaaagcataaattttaaaagcagatcgtatgaaggcatataattatataattttcagttttttcactaatttttagagggggacattttgactcattttggcttgggggacattatgacgcagggacattatgacgctgggacatttcgacgctgggacattatgacgcagggacattatgacgctgggacattatgacgcagggacattttgacgggcagcg

SEQ ID NO: 52332 - DNA, 817 bp, Heterodera glycines
atggcacatattaaaagggtggaactgttgttgagaagagcgatttgtgggggaggaaggaaaagtgaaaagggaaaagccaaagggaaaggacgggggacggaggaggagaggaagaacccattcataagccaacggagcagcggggacaatgcgaagcagagaatgccaaagggagggggcggcaacggcaatttgtcagaagaatcaattagcaaagaggtgggcaccgatgacggaaaagcgaaccacccgaaaacagcgaccgaaatttgcacccctttcaatttttcgcatcgcttttcgttttttgcgctttttccctttccttttctgtttcttttccttttttagctgacttcttctgattgtgagactcattcggcggctctttcgcggcttttcgaccttttcagttcggacattctcagtttgctgggaaaggaggacatcggaagaatgaagagaatattagccgaaattgaaatacaaatgccaaaagagagaggcgaaagtgagcaaacgcagaaaaaattgaggtgcgtaatcgaaaggttggaaatggcgacggaggagaaggaggaagaggaggagcaggaggagaagaaggaggaggaaggagaggaatgagagaagctgaaagagattgatggtggatgactcatcggaaaaatgtgaactaaatgtaaaaaaaggaaaaccgtttaatctcatttgccttttaaaattttttttagtttttcgagttaaattatgtagctcgtgtacgatatttaaagctcttaaaaagaaatagtttttatgattcgacattaaa

SEQ ID NO: 52333 - DNA, 1744 bp, Heterodera glycines
tgtgcttctgccaattcgattccacgagaagtgaatcggagggccgttgacggagtgaacgaagtgatcaaagcacttttgcaattggaatggccaagtgatcagccgcgtatgacagtcttcggatggaattcgtttcttttctccgccttctctcaaattgccggttcggactcactttgcgtgtccgaaacatttctgcaagtcggtcaagtccttctcagcttcgtgggccaaaatagcgaaatgatctgttccgcgtgggaccctttgtttggcacaattcaggcaatgaattcttagcttttttgtacgattcgctgttctatttcagcagcttatacgaagaaatgtaaaggaaagtccaaattgtccattggtggcactgattttggacatttttgagaaattcttggctatttcgaagccattcgttctactgatcgcattttctggttttgtcgacgctttgtccctttttctgtctttgtcaattgacgacaattcatcaatttttgagcaattggtctctcttttggaacgttctgaatgtgttctgatcgacttcctatttactgctccaattgaacttcctttggctttcattgaaatgatcaaccgaaaatgggaggacaaacggaaaataacaatggctaatgggcagagaaatacggaggaagcggatgcagatggttatgtcaatcagttgacggatttgcgaacgcttttgagtgatcagcgggagggaatggccgagggatgtccgataatgtcaaaatggttggacgaaggtgaaggcggcgccaaggttggaagcggacaacggaaaagcgaaggtgggccaaaagcaaatggaccaatcattgaaagaaaaatgacggcactttcagactccacttggccctccaatttgcccatttgccatctcagtccgacttccccttgtaaagttgttgccctgcactccttcaatcttctgcagcaattgctgaaggccatgctgaacaacagaaatgacagcttcaacgtgaccaatcagtcgcggctaacgcttaattttggcaatttccttggggagctttcgactaagttcggtccgtccgttccccccccccttttcccttttttgatcgctgtttatctccttaaggcactcctttcgcctctttttgtttttgtgccgttctgtcgtccgatgttggcaattcgctggcccttccgctgagtgcatccggcgtccgttgccttaagcttctgctcgtctccctcctcgcccatcgttcggttgttcttctgctctccccctcccctctcccctctctttggcgcttcttcctccttcggcttctccttcggctgtccgtccattgcgtttccaaagggggcgtaagctttgctttcggttgtcactctttgttttccctctcagaacctttctttggtcggttgcgcgttgcttcgcaatttttgcgccctctccactgattgtccctttttcgcctctctttgtgccgatgccatttggagttccatgtccgttcttcatttgcctttttttctttcaaaatgcttttccttcagtcattacactcttttccccgtccgtttgctcatctcccaattcttcgtccattccaccgatttctcctctgaccttggcaaaatgcgcgtttcttatcggttgggattaaacccagcagaagtggaggaatgcgttgacaaagtgaacaaattggctaatcag

SEQ ID NO: 52334 - DNA, 245 bp, Heterodera glycines
ggtcccttggtatttccacggccaaaccagcaatgtcagacattacaacagttaccgcccgccctccttcactccgcgtctgtccacctattggaaaagttatttctgaccagcgaccgttcagaatggcatttcgttgtccttttgaattccttgccttttcattttccctttgctttagtccctccattatcattctgtgcatagaaaatgagcgtaaagtgtcaataaatgtgcacaaaagc

SEQ ID NO: 52335 - DNA, 997 bp, Heterodera glycines
agaaaaagttaaaagaaaatttttctctttttcccgtcgggacaccaattccgaaggattaccgaattgagaagccactgatccgttggagttcacccaacctttcacaacgcccacgctcctaggcatacttttaacaatgttttgtctattttgaatttttccttcagtgattttgctgagtcaatgcattcggttgcccgccttccgtttcaggtttctttttcagtagaataattttatttcacaaattttcaattatagaccaaactgagttcggctggtctcatttacgcccattacggaaaatcgttgatcgctaacattttgaatttggcggaggatgacgcggacatggacagactatacgagcacgtgtatcgtaaatttgttgagggagtcgacgcaattgacaacggaattaaacagtacgacggaacgccgaggtaaaagagcggagacattcacttgggcaaaacattcaatttttggggttttaattgaaaatggttcattcaaatcccatcgtagaaacgacggttttgaatttgtcaggtaccaaatgtcgagcactttggactcgcgagtgcggaattgcaacccggcatggaatgaccaaaagccggacccggaaaagggctttcacaatgccatggcaattgtcggcgcggaattcgaggagcgcattcgttacctccacagtgcgtggatcccggccagaaacattgtcatagaagctatcgaaaggcgaaatgaggcaaaaaaaggggtgggacaaactgaaaaataaatttaattaggcccatccaagcggaaggataattttgttccccaaaagcggtgtggttccgccatggaaggaacattttttccaattggaaaatgaattgggcctggagaatgtcggcatttgcttggtggtgttcgccgacaattctaacaacacttggcgggtgcaggccatccccgtttcggacgtgagctcttttgacaacag

SEQ ID NO: 52336 - DNA, 270 bp, Heterodera glycines
atggaccaccgctataaggccattattataggcaaatccgaccagcatctgtccgacatgtgtctgaaactgtggctcatcggcgagtggaaatgcgtggacatcaaattcggccgatatggcgggtacaatctgctggacccggtcgatgtcggcgactttgtcgagctgtacgacggtggtggaccaattcgaaggcttcctccgggaccggcactgcccaaaacgcgaatcctcgacggaagcaatggcactcgcagctgcttgaag

SEQ ID NO: 52337 - DNA, 393 bp, Heterodera glycines
atggggcggacattcattttttggttggggaaagcgacgaaaaagaagcgagtggttaaacatttaatactaatttgaattttaattgaaaataaggaacatggtctaatttgtttaataacttgtctattttttagctaattcccgcccataaaacaattctggcctcggcctccgacgtgttcgaagcaatgttccgttttgacgccggaaatactggtcgaaaaagtgtgcataaacaaacaattacataaagccttaaaacaatgcggctcgcttgctgcacgaccgaaaattttgggcaccagaaaaaaaaaatgccgcgggttttctataaaaaattaccaatcatttgttaatttgtgggtttttttggctgttttaaaaaataaa

SEQ ID NO: 52338 - DNA, 1479 bp, Heterodera glycines
atgggcggcaaggattcatcaaagaaagtgtgttttttatttgtgaaagtatttgctgcagcagcgaacaaattaattctgttgtgagaaggaaagaaaggattgggcaaaacgaatgacgaacgaacgaaagaatgaacgaatgggtgggcggctgatggaatgaatccatttttaaattgaatttcattctaatccaagttctcatcatcaccgatggtggaacgaacaaataacggtaaaatatagtggggacaaggggaaaaacgaccggcgaaatgggcgccatgggaaagtgaggtgaatagaacaaatgtaaatgtacagtgtgaatatggacaaatccttgaacaatatgcgtatatgccatatttatttgttctaaaaccaccctcttgggggtgggaccaagaaagtttggcccaaaagtaaattgacattttggccgttctggcgttcacaatttttgacaaaaaattattcagctaaaaagtaacataatttttaattattgatatcattcaatggccatttattttctattagccttcaaaatttcaaaaatttctgtttgactttaaaaaaagagttatggccagaagaacctaaaaacaagatttttggacattattgctcataaatagggcagggaatatatggatataaaatcgcaaaatatggccataaaatatggaccaaaaatcgcgaaaataaaattgcaaaaatatggacataaattttccgaattgaagggtaaattttccaaaaatttcttcaaattaattaaattttactaaaatacatataaaagggctaatattgtattaaaaatcattctaaaagaaaaaaacatgataaagctaaaatttactaatttttactgaaaaatcaacccgaaaagcgaaattttcgctttttttagtttatttttgatacaaatttatcaatttttcagaaaattgaaacttattcaatattctcgtgaaaatttgctaaaaaaagattttttggaaaatttccggtttttggggtccaaaaggccaatttggctgatgggggccgttctaatagaggtttttttggaaaaatctcaaaatatggacaaaaatgcgaaaatatggaaaaatatggaaatatggatatggaactccatcctagaagcttcaaaccaagctaaaaacatgtttttcgtgcatttcaggcctcccacagtccaggaaaaaaatatggatttccatataattacaaaccctactcataaattatttaaaacttaacgaaattttttgaaatttggcaagataatagatattagagaacatttaggttttcagatacttaataacaccataatgaacaacagacgtaggacatgttgaagaatagtggagacatagcagaaaatataacgaaggtaatgaacaaaaaattgaggagaaaccacgttttaaagaatactctgtgttaatttaaaataaa

SEQ ID NO: 52339 - DNA, 285 bp, Heterodera glycines
atgacggccaacatcaacccgactacggctatgaacagaaaagtgcgcattgtgcaccaatactacttactaaggaagaaataaaattggggaatgtgcaacaattagtgagagagagtagtttgaaaatgaagtgtcattggctgagtttggcaccgcttttatattggcactttcagcgaaaagactgcacggcatgcaaatgcgaagcaatatcgcatggaagacggtcaaacaaaaaatcagatagcacatgccaatgaagagagtgggcagagaaataaa

SEQ ID NO: 52340 - DNA, 731 bp, Heterodera glycines
acttcattttcaaactactctctctcactaattgttgcacattccccaattttatttcttccttagtaagtagtattggtgcacaatgcgcacttttctgttcatagccgtagtcgggttgatgttggccgtcatcttggagaatggtattaaaaatttaaaaaagattttaatttgtcataaatttatttatattattttagtaaatgcgactgggaaaaattcgccgtcaaagggtgatgacgataaattattatttactataattaatgtaaatttaaaagcaaattatatacaaaaatttttgcgaatcttaattcttagtgtcggtgggaggatgcaattttttgaaaaattgaatatctgaaacaataataatttttattattagatagtagtccgagaaaatcgcccttctaaattattatcattagggctgctaattttatttaaaaaatttgcgaattatgtaaataaaatatgtataaaaaatgctaaaatatgtatgaaatatgtacaaaaacccccaaattgtactaaaatatgtaaataaaaatttttaaatggtcatttttttggataaaattcttcgtaaaaagtgaactaatcacaaaatgccttgaattttcaaaaaacaataaaaattggttgttagatagtaaacatatttttcacgattttaggaaaacagtcgctagacagtccaaaccataaaaaagaccctaaaaatg

SEQ ID NO: 52341 - DNA, 1312 bp, Heterodera glycines
atgcctggtggggaaaacaatatttcacattcactccatacctttgtgagttcggcacggatcgagaccgggataagaccatggaaagagcagctcgagctctacaagaaggtatggaaagaaaaaatagttatttctgggactttttcagaaatcagaattaattctccaatgtgggcccaaattttaggcccccagccacagccccttgcttctcccagttttaagtcttggatttgtcaaataaattcaagacttcaaaataataatcaaaaattctcttaaaatttttttgaacccaattcaaaaaaggaaaaaaatttgcagtcaaaaaattattcgaatttctccaattttgtttccataatttccgaaagttattcggtatcataatgccaaaacaaaacgaaatcgttttaaaatattcctttctggacttgatttggtttcttgatatcgaagctgttttctacgctatttctaaaacggttgtaccaaaccccagatttttgaatccggttttcagaaaaaatgccttgtggtgaaaacaatatttcacatttcactccataactttgtgagttcggcacggatcgagaccgggataagaccattggaaagagcagctcgagctctacaagaaggtatggaaagaaaaaatagttatttctgggactttttcagaaatcagaattaattctccaatgtggcccaaattttaggcccccagccacagccccttgcttctcccagttttaagtcttggatttgtcaaataaattcaagacttcaaattaataatcaaaaattctcttaaaatttttttgaacccaattcaaaaaaggaaaaaaatttgcagtcaaaaaattattcgaatttctccaattttgtttccataatttccgaaagttattcggtatcataatgccaaaacaaaacgaaatcgttttaaaatattcctttctggacttgacttggtttcttgatatcgaagctgttttctacgctatttctaaaacggttataccaaaccccagatttttgaatccggttttcagaaaaaatgccttgtggtgaaaacaatatttcacatttcactccataactttgtgagttcggcacggatagagaccgggataagaccattggaaagagcagctcgagctctacaagaaggtatggaaagaaaaaatagttatttctgggactttttcagaaatcagaattaattctccaatgtggcccaaattttaggcccccagccacagccccttgcttctcccagtatgaagtcttggatttgtcaaataaa

SEQ ID NO: 52342 - DNA, 94 bp, Heterodera glycines
atgactttcccctttttgttgctgcccgttcatcttctgttgatgctcgtcagcgctgttgtgttcatcatcttcagccaatgctgcggttgct

SEQ ID NO: 52343 - DNA, 1106 bp, Heterodera glycines
atgtcggacgagccaccgccaccagcaacgccggagacgcccaaggagccgccaacgcaagcgtcagaagtgccgtcaccagcagcgccggagacgaccaaggaaccgccaacgccagcgtcagaagtgccgtcaccagcagcgccggagacgaccaaggaaccgccaacgccagcgtcagaagtgccgccaccagcagcgccggagacgaccatggaaccgccaacgcaagcgtcagaagtgccgtcaccagcagcgccggagacgaccatggaaccgccaacgcaagcgtcagaagtgccgtcaccagcagcgccggagacgaccatggaaccgccaacgcaagcgtcggaagtgccaccgccagcagcgccggagacgaccatggaaccgccaacgcaagcgtcggaagtgccacccgccagcgccgacacgtcttcagccacgctcagcgcccatcagcagcttcaaggatgtgcgcccggtgctgcgggagatgctcgaccagttgcaccatccgatcatcgacactgtggagcgacagaccgggatggaccgcgagcaggtaaagaaagggaaggcattccccgctctaattttacaatgccattcagctgttcttcgccgtggtcgccctgttgacgttctacctgctgtttggctcttacaacatcttcgtgagcaatgtgctcggtgggtttttggctttttttttttgtcttcactgcctccactaatttttgtcattttcagtcaaatgttacccggtctaccagagcgtgatgaccatccgatcgcaaagcaaaagtgagtttaaaatttttccaatttttgattttaattaatatcccaatcccattttcagcggacgacacccaatggctcgcctactggtgcgcgttcgccctcttctcgctggtcgaccacttcatcgcgccgttcgggctgtatctgctgctgaagacggccgtgctcgtctacatgctcctcccgcagacgtacggtgcgcacaactgcttcgtcaactatgtgcagccgatgatggagcgatttgcggagcgccgtgtccgacgccatgctcattgatgcgcccgcccgcaagctaa

SEQ ID NO: 52344 - DNA, 48 bp, Heterodera glycines
atggcacgccgacgaagaaagaaggagccgcgaaaggtgtcgtacaag

SEQ ID NO: 52345 - DNA, 1008 bp, Heterodera glycines
atgcgtgcgttgaacatcatgaactcgtgagttgcggctgttgctgaaagctcaacaacaagtaacatccgttttccccatttttttcagcttcgtcatcgatgccttggatcgcattgcaacggaggcgacgcgcatggcccactacgaccggcgcaagaccgtcacgcttcgcgacatggagttttcgtgccgactgtgcctgcccgacaccatggccaaacatgcgaaccaaaaggctcagaagacggtgaccaagttctacgctgcaaaagtgcgggaccggatgagaaggacggagatgcgacgtggcgaatttgcgatgatgcagatgggagcgctgtgagcacactcaacttttggacgaccgccggatgataccgcctatatattgttgatgattgttcctatatcccccgcatgtgtatgtattatgcaatgtatcccccccccagtattgtatgtgtatgtattattcaatatgtgctttgtatgtgtatatccggtatataaaatatggcatagtaagccatcgataaaatctgacggatagactttgattttgtgtgaatttaaattttgaaacttctatagaataagagaaaaaaatcagagaagggtagaaaaccaactcaactgcgtctgagagacaactctaagaagaaaattggggacgaaacgatcattttggagtgtatgggtgtataaattgcaatacaatagtgaataagtatattaaaatttatatattcaagcatctttcgactttttcacgaatttttagcttggcggttgtctcagacgttggcggttccgaaaaccaaaggatggacacttgctttggaaaaaatgtaggacgttcctgattttaaattttttgaaaaattcggttgggggcaaatttacgattagcccgatttgtaaagcacatttggactaataattattttttgatcatgaaacacggttgtcctgacaaagacctaccccacaagtaaaatctctcga

SEQ ID NO: 52346 - DNA, 1784 bp, Heterodera glycines
ttctgagtcaaatcaagacacaatttcaactaaaaatggagaaactgtgactgttacaactcaaaaaccgacaaaaaacggtgttgggaggccacggaagagaaagagggtggaagatgaaaagaggaagaaggaagtttcattggaaaaaaagaaaaaagaggaggagccattggaaagcgaagaatcggccaaaaaatgtctgtcggacactcaacaaaaagctaaacggacaccattttacaaacataatgtaagcaattcaaccaaagaggcagaaagcgtgatcaactcttcactgtcacatgtaatttttgtcataaatttaatcaaaaaagtttctaaattcagcccatttatcactcaaacaaatcattttcaaaatccttaccattgtcgtcggcagattacccgacttcttcctcccaacttcaacactgtcataatttgcctattgggccaaataacgaagcgaaatgtgactttatcaaagaagaacaagcatcgaatttcgatcatggtcttttttttttttttttttcaaggccttgaaatttaaaacaaaaatatcggacaattaaaaggcaaaatgtagcaatttcgagcagtattaaccataagaatccaatgagaactttcgacttatatatcggctattactttgttttgctccccccccccctatttttcgaaaaaaaacccgaacaaaaagtcggaaatttattttcaccaatgacccaagagatatagaaccttctttatgtgatctatttaaacattatttagggcttaaaagtgacgagacacggaggcgagagaatgacgagacgacttttgtttgtgcgcgggtgcgtccatttcatagggcagttcagccgaatacacgcgggactgacaaaaggtagccatttttcgtttttttttttttttttgaatttctgcatgttttcttggtttaggctaaaaatcagttcgcatcttcaaaattctcacaatcagaaatgttattctcatttccgccaaaacactaaatattgtggccaaactcccattcacatggccaaaaacgaaaacaattttggaaagaacttacactgtggtaagtgttggatgatcaaaaaaagagtcaaactcgtttctcattagacgaggtttcaaaatggtgcaaaaatcactttgaagaacgacgcaaattaaatgacgccccacaaacacctcacggttcaaaagaaaggtgtgccatgtgcttaaaaaatattacatacgcttttcagtgtcctctcaacaaaaccttcgcctttggtttctgcgcattatgtcgcccattcgtcacgtcaaattcttagggcatcaaacgaaatagttgaagcggaccatgcttatgagaaggcttcttcatcattaccaattgaaaacaacgtcaccaatgccaatgtttcgtcagccgtaccagcggtcattggaaattgcgctgctccgatcactgttcaggcggaaaacggattggttgtgagcaatggaacatgtgacaatggaacgccttccaatcatttgtacttttaaggaataatatccagggatgttgctaccaaaataaatgagagaacgagaaaggcgagaaatgagacgcaacatccctgatatattccatttatcttttaattgaaaaggcttacatttcaaattttacagaacaacacttacaactcttgacctactgaggaccaaagaatttattgcgaatcagtcaatttctatggatgaaggtcaaattttaaatgaaa

SEQ ID NO: 52347 - DNA, 1281 bp, Heterodera glycines
atggttttttcaagggcacaacaaatcagcgacaactacaaaaatttggaaaatttttctgtaagaatttaagtaatttaaatcatattgtcagtttttaggcaagtagtcatggatggttggagaaatttatgagccgccacaacttttcgttgcgcaaaccaacaacacttgcacaaaaaccacccgatgattacgccgaagcaattgtcaattttattgtctatgttcaaaaattatggcatgaaaaaaagtaatgattagcggaaaagttttcacgcatattctaattttagttacactgctgtctttgcgtgcgatgagacagctgtttggcttgatccaactggcggaaattgcgtttctgagacgggtgccaagtccgttacggtgctaacaacaggccatgaaaaggcaagggtgacggtgatgttgacggcaagatctgacgggacgaagctgcgaccatttgttttactgcctaagaagagacctgtgccagacattatcaaacgttttaagaacgatttagtgttgtgctggtgttgccgtacatggataaacaacgaactaacgacaaagtttttagaggaagtgcgaatgcttatttgtctttaaagaaattatgtaattaaggtgcttggcggttttgcattcgggacccggcttctcgtttgggacagctttcgttgtcacatcagtgacgataccaagcagacactccggcgtttatccatcgaatctgctgttattcccggtggtacaaatacattcaagtagtagacaattcaatttaaacccaaaaaaacattttagccaccagacgtgtgttggaacgcaccgtttaagaacaaaatcaggcaaatttacgatgaatggatggtgaaaggagagaaagaaacaacgtcgtccggaaatatgaaggctccgccaatggagacgtatctgcaatggattgtcaccgcctggaacttactctcgaaggaactgattgccaaatcttttttgtcatgtggaattacggatgaaattgatggaagaaacgatgagatgatcaatgtttttaaggtcgcctatttggagtattttgtgtatttttcaagtgttttaaggcggacggagccataccaaatgggcttcatcttctgaatcaacgtcgaaatgaagaaaatgttgtgaaagcacttgagcaagatgatttgggacaagacgaaagcgatgtctctgtcgacgttgctaatgaataatattttgatcaaatttattttcttttttaataaa

SEQ ID NO: 52348 - DNA, 428 bp, Heterodera glycines
ctcccatcaaagccacggcattattatgggaatccggccctttgatatgtctggggacgaaaagtctgatagactgtgacaatgctattaaaaaatttatagaaataattaagggctcggggtgtccgggggcttcttacaccggacacacggttgaaaatattgtttcgacctttaaattcggacgtgaaattgaactgaacgagtttcgaaaaaatcgtcgtgcattttatgaaccggaaatattttgcggtttaaatttcaagcggggtaaaagcattacagcgttaattttctggaccggtaaagtcgtaattacgggaactaaaaacaattctgaaattgaggaaatgtatcatcatattctcccctatttgaaaatggctcaaaagaagttagggagacgataaaaaaatttcatttattgg

SEQ ID NO: 52349 - DNA, 1858 bp, Heterodera glycines
atgcaaaaaaataattttatgaagatttttttaataataattttattaactattttatttattatcattaccgaaggaattgatgaagatttatggaaggacttgaaatcttcgacttcgagaaacttaaaaaaacaaaaaatcaccaaaaatttttcaataaacgaagaaattgctgttaaaaatgaaatttatcaacaacaaaatgccaacaaaattattattaaatctgaaaattgcgatgaacatgaaacggaaaacataaagccaaaagtatcgcaaaaaatcaaaacggaatcattggatggatacaataataaattgaaaataaaaataaaattgccaaaaattgaatccgaccaatggaacggagaagcattagaaaatgaaaatgatgagcaacaacaagctggtctttgcaattgttctgctgatcagagtaattcttctgctgatcagagtaattcttctgttaatcacagtaattgttcaaaggaacaagaggaattagattacaccgaaacggtaacaacagcagggcatactgtaatacgatataagggattgatcttttacgtgttgttttgtagtgaacttttttttctgaatttgaattagagcgaatttttaaataaaattaatttccaaaattggaatggatcaaaaatttgctcaaattgcaattaaaaattcctcacaaatttttcttttatttataaaatccgtaatttctcagcctgaaaacaacttgaaaattacgggaaccaaccgaactatcactcggaaaaggtatattagtttggtattattgaatagagcaaggtcgatttctcttgagatttttaattttacacgcccataggaaaaaaaaatcaaaaagagagggcctcaaaaaccgaagttttcgtgtctgagatccattcactatcttgttcactttatattaattcccgaacctttgcagtttactaaattttcattaaagaaaattatcaaagatttttttgtaaaataaaaatggtttttaaattgtttagttttcttatacattattaagatttatttattttaatgttcgaaataaaacagggacatccaaaaatgcgaattcaaccaactgaacaaaattttgaacattttctcacttgaccaccatcgctgaagcgaaaaccgagtcaatatttcggttttttgaggcctcataaattttttatttatttttatgggggcgtaaaaaataaataaaagtcgaccctgctctatcaaatgataccaaatttatctatgtttaccgagttagagttcagaatttaaatttttaatccatacaaacgatgacttaattacaatataaattcttaaaaatatattacaaaaaaaaagaaattaattatatacttaagaatgtaaaaagaagaaatggattggaaaaaaatgccaaaaaattgggcaaaaaccacaacaaaatttgtaacttaaagcaaaaaatgggccaaattaagaagaaaaagcgggaaactgcagaaacaaaaatggaactgatcagaacatttgatcaaatgagaaaagaaaaaatttatgggtttaaatatgaagcgaagaaaaagtttcaaattgaaagagaaattgcgggaagtttgggagttaagcgtgacgaaatttaccaactgaagaatgaatttggtaaaatttcttaacaaaaaaaaaatatatatctattttaaattttcgatagttccatgtgtacgctagggggttttgggattttacaaaaaattttcttaaatttaaaaaatttcaaacattaaaaaggctatttttgacaatttttgcgaaatatgaaaatattttgaataaa

SEQ ID NO: 52350 - DNA, 1248 bp, Heterodera glycines
atgaagctcatccttcagctcaatgtcttgtttgcgtgcttttggagcggtaattatacaataataatgattgatgatcaattttaatgacttttaaatgttcgtaatttaatttttacaaaactgttttagcaaaattgctcatttgccgtgtgggactgtttggctccgttgataaaccctttgttcgtaaagagctcaattattctacgattgattgccctgcaaaagctaaattttgtgtgaaagaagtctgcttccaagatggcaaaggtagaaaatataataaacaacacacgagaaatacaatacaaattcattgaaaaagagaagtcaaattaaaagttttgaattttagtggaaaaagtatcaaaaataattacctatataataattgggaaaatttcaaaaataattataataacatggaaaatttgaaaaataattaattaataactgggaaaatttgaaaaaaattatttaaaaactgatttcaaaaatgattatttttaaagggaagatttcaaaataataaatcaataactggaaaaatttcaaaagaaaattccatttatttatcgaacaaagtacagagtttttttttaaaaaaactctccgctcttaataaattctcatttgaatggcaaaaaacccgcatttaacaaaaaataaaaataactttcatttttaattattaaatattacaaataaaacaatttttgtttgtttttttaagccgaaaactatgtgaacatttacgcatgcaccgatgttataaaagattgcaacactgatggtactagcttaatggcatacagggagtgcagactaaaaaataaaggaatcaaaaacgcgtgtaaaaatgagaaagaaaagaatgaggccgcttttgtcaaaaaatatggcagcaattaccggtgcgaacagtgccaatatggcaacgaaaatgaagacaaaggcaacgagaatttcgcgccgtacaggccagacggtatgtagaataaaaattggatgtttttttttaactaatcttttggggaataatgagaaaaattgttttcttatagcattaaaatttaatttgttgtctttaaacattttttcaacggacaaaattggtgaaaattttgtgaaatcaattttaaatataatttacaaatgtaaaaatttgaaattttgttagtgtctcttttttaattttagccgatttaattataatttagattaatgaacttttcaaaaacatta

SEQ ID NO: 52351 - DNA, 330 bp, Heterodera glycines
ccgggactcaaatgtcccgctcaggccaaaatttttttcaatttccgggaaaaaatcgaaaattttccaaaaaaattaccaatcgatagagctcgaaaaactatgttttggaagtggtcttcgtttttctgggaaaattcgttaaaaaatcctaaaattcaaaaacccgaaaaccgttttttaggcctagctcgaaaaattttgaaaattttcgaaattttaaaatttggaaaaatcgggcttttaaagctctacaataagtctgctggccaccctgcgctcagctcaaagcctaatgagttattcgcctggtactgaagtgggaaaaaa

SEQ ID NO: 52352 - DNA, 153 bp, Heterodera glycines
atggtcaacaccaaaaatggtcatggtatctctcatatggtagtgttcttctgtttggtgctcaccattggttgttggccttcaaatggtggatggacaccatttggatttgtacatttgggtggtcttgggctcaaaaatgcggacctgctg

SEQ ID NO: 52353 - DNA, 966 bp, Heterodera glycines
atggaagggcaaattcggaatgacaagcgagcacgggacgagagtcagtcaaaggagcccgtgcggtcccagcgacgactcaaagccagagatccgttggacgaacagttgaaaagaaggaaaaaagggcaacaagctgaagagaaccctggcagaataaagctggcaccagcaagtcccggctaccgacgtaccatcaattattcgctgtttacgcgatgtgagcctggtgtaaaaagacatgaaggttgtcaaaggaattgcaccatgggaagtctgtcccacggccggctaaccaaaatcccgcaagccgaatcaaaggcggtctgcctggcccaagccttcgcatttgattggctaggacgtatgcacgccaagaaattcaatgaaaattggtgcgccttgctgggaagcggaagcgagattgaggattcattgaagaattggtggacgaaagtgctccaaaacaatgagaaaacgataccacagaagcaactcgagtgtgtgctgacggcatgggacaattcgtgccaagtttttggacaagagtggaaaggaaaaatctatggaccagttggtctagaggatgtgccaatgaaaacgaatgtgataagtgcagaggagcaatttgagaattggctcaggaatctcacggagagattcggccagaccttgaccaaactgagagccaaggagtactggaaggactgtcatctccaaagcaagagggtattggttgtgagtaaccaagaagccgctgagctggtggccaaggaatttgtggaagaaggctcgagctggttcgtccattttggtgacaaaccgttgcgtgaaaagatgttcccggccaattggaatatcaaaattattttcaacagggatgataatgctgatcatgttattgatcacactgttgcaaccaacggtgatcaacggacaagtcattcggccggaacgaaacgatag

SEQ ID NO: 52354 - DNA, 350 bp, Heterodera glycines
tagagaccggaaatttcaaatttgcggatcctgttgcaggattggaattcaaaattttttacaggacaggatccggcaggattaatcctgcaaatcctgcaatcctgcaaatcctgcatttaaaatctgcaggatcctgcgcaggattgcggattttaggaaatttcaaaaaattctgtattaataaaaaatctttcaaagtataaaaaagtattcaaatatatttttaaaccaaaaaatgatgaagatgaaaaattaataacgtttttttgcttacactccaagcaatcgactgaatcttctttaatgcgtttaaaaagaccgatttgccaaattgggtggctcataat

SEQ ID NO: 52355 - DNA, 878 bp, Heterodera glycines
atggccataaaatatggacaacaaatcgcgaaatatggacataaaatagcaaaaatctcaaaatatggacataaatttttccaaattgatggtataatttgtcaatatttcttcaaatttgttaaatatatatgtagtaaaatcttcaaaatggttaaatatggtattaaaatcattttagatgaaaaaaacatgataaagctaaaaattaatcatttttagcgaaaaatcaacccaaaaagcgaaatttagttttttctgcttatttttgagaccaaaaataacaatttttaagaaaatttaaatttttccaatattctctggaaaaattttgtaaaactgattttttgaaaaattttccgttttttgaggtcaaaaaggcaaatttatctgttgggggccgttctgttagaggttttttggaaaaatgccaaaatatgggcataaaatatggacataaatgccaaaatatggaaaaatatggaaatatggacataaattgccaaatatggagaaatatggaaaatatggatatagaaatacgtcctagaggcttcaaactaagctaaaaacatgtttttcgtgcgtttcaggcctcccatagtccaggaaaaaaatatggatttccatataattacaggccctacttattatgataaggttgagaaaatttaactacccctttacaccaatggccataatgaattaatgtttagtgaaataacattaaacttggccagtttgtcaaattcaatatgttctttaagattaagcaaaaagagaaatttttaaaccaaaatcgtgagatttcagggcagacccttatggctaaatttcaggtgtccttggccaaacttaaattcacggaaaatttcaaa

SEQ ID NO: 52356 - DNA, 1599 bp, Heterodera glycines
atggattatttccccacagaagtggtggatttatgttattttgagggggagactgaaattccccaacaaataaaccgtccattacgacaggacgatacggatcctggaggggaccggaacctccgggaattctcagagccaccagtggctcgaggacagactcagttaaccactgaccagaattggaccgaacaacgggaaacaccaaatagtcaaaactcggattttggtctgagtcaaaacgaaggatcgggaagcctgagcagcattccgactatttacattattttttcaatatttctcgtgcaaaatgtaatggcaattgcggacagtttggaatgtccgtttactcattcaaaaaaggagaagggagaaatcacttcccgcgtattcaataaaattactaagtcgtcctcttcctccactgagggagaattgtccgacgcatcattttcgcaaatgacaagattctcctttgtcaaaggggagtcaaaggaaatccgctggatctggtggacgcggtacgggcggtaagcaatagcacccggagaaaggggaaggatcttcggattctgatagactccgaagcgaaggaggtggcacaaaagccgcctacctgctccgactgcgggagggaaggccaccgaaggggcgataaaaagtgcccctatccgaaggaggatcgggcggaatcccgatccgtcaaaattttagatttaattaaaatttatttacgatttatttgagcttttacttaattattaataatataataattatataaacgatacaaatattttgcagaatttttcattgtttttgataaacttacaatattttttttctttgatttttgtcgtgaaaattttttttatttattaataattatattagtatatttttctattttagtttaataatttacttaaagagttgttcgcggaaaatttggtagagtatcggaatatatgacaatttaaacacaatatatttacataatgaaaacaacggatttataaagtgagtataccgggtaaataacgaaaagtcagatctatacatactcggataattttcactgattattgttttattttttattgacaaattaatttaaattttacattgtatatttatactaatcttctattgagaccttagcttaaatttttagatatcatagctattatatttctttgttgctacttcaggaagtggagaaaaatattattagaattattttaaatattaaaaattatttttatttgttcttttcatagaatatgcgtgtttgatttaggttgcctgtttttttgcaatcacgaatttttggatttatttatttgtaaattgctctctaaaaactgaattaaaacaatgctgaattatacataccttaaaaatatttcaatatttttaaagataattttatccattaaacattttttatttttttaattcaaattagcaatttaataattagaaattatttttcttcacttttcagcgaccttgaaaacccctaaaaacatgttttccttgtaatttgtgaatctcggttttttgttcgaattcgggttcggaatttcggaaaataaa

SEQ ID NO: 52357 - DNA, 1743 bp, Heterodera glycines
atgaggactttccaaggagagcaacaacagcagcagaaacagaagttggagcagggcaacagcaggactttccaaggagagcaacaacaaaaactggagcaagacagcatgaggactttccaaggagagcaacaacaaaaaatggagcaggacagcatgaggactttccaaggagagcaacaacaccagcagaaggagcaacacgaaatccaacagtttgagcagcaggaaaacaagcaacaggagcccagccttgcgctggagcgtgctcgtcttgaagagctgcgcattaaggagcgtgcacgtgttgccaaactcgaggcggagagacaagcgcgtttagtcgaaatccaggtaagggaatttttaaatttggaaaatttaaaagggaattaaaaagaatttttactccgtaaagcctggatgctgatcgctgatcactgatcagattaactgtcctatccaaaacaaaaaattcacaggcacgcgagcgccaggcaaagttagaagcggagatgcgagtgcgcaacgtggagaaccgtgtccgccaagccaaactggaggcagaagcgcgtgccaaccaagcaatcctggaggccaaggtgcgccaggccgagcgtcgcgcacgtcttggccacggcggcggattcgcagatgcatcagaggagttgcagaaagacgagcaacaagcacagcaacgtcagcagcaacaactgcttgaacagccggtagacgtcgtgtgaagaattgtaaattttaacaaaatttttaacactcaacatcatcagcagatcaacactccgcaacaactgcgtgaaaatgtcgcgcagcccattgttgccgcccctgttatcgccgtcgctggtgttcactaaagaacggagcggagacaatgaatgaagaaggatcaaatgagcaaaattattgggtggtacatattttgtggttgatcaatgatcatttctgaatatgcctcagggaaaatcacattttgtcatttattaacggctcagggattaatttaatgcatttgttttttttgaaatttttcattcataaaaatttcaacggcagacaataccaattaaaattgatgacataataactcgaaaaattggtagcttaatagtcataaaaatcgatacactaaaaataataatattattattaccgaacatcattgaattggtatctgtttttcgcaaaaattacaatttttgactattttggggtggaattttcttaaaatattgaaaatggggtccggcggtgccgacaaacgccaccaggaaaaatttgtaaaaattattaaatttttaaaaaatttagcaattatttcttgaaaaattaatcacgtaaagaattttatcataagaacaataatgagaaaatttgtttataatattccttattgcacgtatgcagaaaatgtacagtatccaatgcctaatcaacgcccagaactactgtaattgttcattcattttgccaaatgtttgcccaatcatgtcttttttgagcacaatggtgaaaccgatgccaagcttgtcgtccgcttctcgccaatccgccactgtccagttataatgtcggcacagctcccagcacatcttccgttacccacaccgagtggtgctcatgtgcagtgtcattgcccgcattggggtgctggtgccgttcaagcagttcggccaatgttgtcctgttcggatggggtcgaaagtcttcgatagagaaaataaa

SEQ ID NO: 52358 - DNA, 324 bp, Heterodera glycines
atgcctgacgcggagcagcgagtgcccgtcccctgcacccgcttcgtgcgtacgaagcgtgccgaggtgttcacgcgccgcggcaccaagctgtaccagcccgtgtacaccaaagggctggtcgttgcgcttgacgagagggaggctggcggcggcgccggaaatgcctacttcaccagaccgtttggctggtacgacgacgacgacgacgctgaccgtgacgatgctgaggaggaggaagccgaagatggggaactcttggacgaaagcgacactgatgatgatgatgatgatgatgatgttgattttttggtacttggatga

SEQ ID NO: 52359 - DNA, 1236 bp, Heterodera glycines
atggattcattcggaaatgtcgcctggattctgcgaccaacggctcagacgacaggcactgctgtgggctcaatggagtacgaagaggaggaaaacgggacagcaaagttggtccacagtgacacagctactgtcaccacacctaccaccgccgagtttagactggaaaaagaagccccctcctccgagaaggacggtgctgaagagggcagcggcggccacggcgcactgctgttcatcgaatccgatgatggggaggaggaggaggaggaggatgaggacattgaagacacccccgtcgccacagactccccctcggccgcgacggcaaccgttgtggatgactcctccgacactgttaaaggggtggagcagcgctccagtgagcacagcgacatgacgaacggtacgggcggtggcggtggaagcgaaggcgcaaaactgctcggcgggggagaggaagaggaggtaggtggaggccagctaattttctaccccccccccccccaccactgtttgtagcctgttcgaatgccgctgctcaactacctgtgcgcgttcaacgactgttcaatgaaggagcttcaactcctcttccacagtgtccacgcgcgacagcgtatggtgtcgcacctgcaacaacactgccgacttcataccgcgtatctgaaaccggcggagcgtaacattgcgctccactgtcacgacctcagcgtgcaaaacgcgaaccggacgttcgcctgcggtggctatctggagcttaccgtaagtcggtgagtgtgtagaagcagtcatggtgcggccttctgtccaggttcgacaatacttcttcgccaaacacgggctaaagctgaagcacccgtacatgccgtgcatgatcgagttcgggggcggcacgcacgcctcctactacccgtaagcgggggggggggggtacgcaaaaatgggggaagtgagcgttaacgccttcagcctggagctcgtccatgtcgtgctggagcgtacgaagcgcgctaaacaggaggagacggtgaagcaagaagagccataccgtcgtgaatccggcgacatggctccgacaaagtcgatggcaatgccggaacgacattgttgccgctgttgctgtcgatgcgctaacaactagctttttgagagacatggtcattgtagatttgcgcgcgtgatcacgtgacttattgtgctgttatagtgtttgtgcactttttttaaaataaa

SEQ ID NO: 52360 - DNA, 1240 bp, Heterodera glycines
atgttcaagcacccgttcaccatgtgcgtcgccggatgcaccggtagcgggaaatcgcagtgggtggaccgccttctttctcacattgacctgatggtcagtgaaggccctatcactggcgtgctctactgttatggggaagtgaacgacaatgtgctccggctacaacgtatggagaacaccgccaccacttcaagtgacagcaacaccacggagggaaaacattcgatcagaatgtgccatggagcgcccgaggagagggatgtggagcgggaagcacgcgctacgggcggacggctcctgttggtgttggacgacctgatgtccggcggtctacgctgcagctttctggacacggtgttcacccgtggctcccacaactggggcgtcagcgtggtgctcatcacgcagcatctgttcactcgtgagcttcggatagcgcgcaacaactgtcactatatggttttgatgcggaacccggccggcgcacttcagatccgcaacctcggcgcacaactgtttccgggcggggcgctacgctacttcttggaagcgtacgaggacgcaacggccgaaccgtttggctacctgttggtcgacatgcacccaaccacggagcaacagttgcgcctgaaaacgcatatatacccgggggaaatgtgcgtggtgtacatgccacgagcgcgcgcgaattttaatgcaaacgcttagcgcaattagcaaacagcagtcgacaccgaaaaaaattgaaaggggcggagccaacaacaacaacacattgaagaagaggacagaagggtctggcgaggaaagacgacccagcagccgcaagctcgccccgtctcgccccccagtgctgagcgaacacgtgaggcgccacattgatttcttccgacaactaaaggcagcacgcagctctcctacccgctgccaagcgctggtcgccggagccagcagcgagcagcttctctgccttgtggagagcgcactgaacatcttacgagcacgtgtgcccatccaacggcgtcatctggaccgcctcaggcagcgtgcgagcgacgtccgcacactgagcagggtgcgtagcacacgctccgcccgtcgccttctgctcaacgcccacgcaccgtcaacagcgcaaactggtcgtggcataccgcctctggtcgggttgctcgccagcgtgctggtgcccgtgctcgtccaacgcgtattcgagacaaccagcagtagtagctga

SEQ ID NO: 52361 - DNA, 2297 bp, Heterodera glycines
atgacgttgaagcacactgtacgcatgctactcatccccgaggatgtttatcgacgtctgatggacaaccccagtgcagcggcggcgacgtcttctaccacgtgcatgaacaagttgcccacgcccgcaactcccattgagcacacggcacgcaaaatggtggcggcatcgagcaagcacacgaacgacgacgaacgcctcatccactaccaacaggagttcaaacgctaccagaaattgctggaagatgaggcggaacgaccgctcaacgtacagctatcgcaacggacaacaaacgcactgcgtgacactgtgctgcagaaggcttcgccggcaacagcgacgccgccgccagctcgcccccaacggaccacacctctgtccagacgacggggcttacagcatcaaaaccaagcgccgagcgcgtcttcctcttcttcgacaaggccagcaaaaagtagcagcagtaacgagcaacaacaaccgctcccccagcagactgctgctccacaaaaaattggcgatctgcctaagcaagctgagccgcgtatacatgccgcgatggcgtacgcgcaacagaacccaggcttgcttggcgtcggcggtgaagacggtcagcaaattttgcaccttgcccagggcgcttatcgccccatccggggcagcaaccttgacacgctgctccgctaccactttgtgggtcgtcatcagcagcagcagccgcggtcctccactaccacccccaccgccagtgtcgctaaggcaccaccgggctacaaaaccttcgtcaacaatgcgcgtgacgatcttcaaatgtggcgtctgctgtttccggatgaaagggcggcggcggcgggcagtgattcagcgtcaacagtgggcggacaacctcggcgccaccaacctctgcgcggacagaagaaaactggcgcgggccgcttttccctgagccgcctactacagcctaatcatcatcatgcacataaatctgttcaaaaaagtgcgacgagcaagaggaagcccaacactgtggagcattccactgccaaacgttttaagcctcaattatggtgattggaagcaacgccgtccgctcactgacggtggaaagtcttttggacccgatttacaaggacgaacggtcgccagcatgcttcaccagcgtagagcccctgctgcgggaggcgaagcgccggcacccggacgcccgtcttacgcgcgctgagatcagccgctacttggcgagccaacgtgtctacactcttcaccgacaagtgcgacgacgcttccgccgtctgccgactctggcctccggtctacacaccgactggcaggccgacctggccgatttccaacgtctccgcgcgcaaaaccgtgggtacgcctacctgttggtgtgcatagacacgctgagcaggcaagtgtatgtgaagccggtcaagagcaagcgctcggacgacatgatcgcagcgctcaagcgcacctttgcccgctgtggctacacgccgtggcgtctgttgacggacaagggccgtgagttcaccgcctccgctgtccaacgctacttgcgcgacgaggcggaggtgcgtcaccactgcatggaaacatcgccactgtggcacgctgggatggcggagcgtgcaaaccgcagcatcaaagagcgcctgtaccgttacttcacgcaccgtggcacccaatgctggacgcgggtgatccaacgcattgtcagctccctgaacgcgtcgccgaacagcagcatctttggcatgcgccctaatgaagtgtgcttcgacaatgcggagtcgctgcgccagcggatcgccgaccgtgcggaggcggagcgcggtggacgtgcctctcaacatgcgcggttccgccccggtgaccatgtgcgtattgagcgtgcgaggggcgcctttcgcaaaggctacctgcctcggttcactgacgaggtgttcaccgtggatcgggtgtgcacaggcagacgacccatcacctacaagctacgggacatggacggtgaacccatcaccggcttgttctacgccaacgacatgtgtctggtactggttccaccctcgctggacgacagcagcatcagaagcagaggcagcattgataagcgtaaaacgcggaagcgtctacctggtggcatcgacaacaacaacaaggtgtacgccattgaacgcattctggagcgacggtaccggaaggacggcaccgagtgctgcctcgtcaagtggaagggctacagcacgcgtcacaacagctggattccggcccacacaatcatataa

SEQ ID NO: 52362 - DNA, 533 bp, Heterodera glycines
atggtcgtgtgtgttatcaatggaatgacttcaattttggccggttttgccatcttttccgttcttggccatttgtccgagtctgcaaaaaaaccaatcgctgaaattgtgaagcccggttggctttacttggcatttattattattattgtttttaattttaaggtgttggacttgcctttttggcatatcctgaggttgccagtaacttgccgttcaagcagatttgggcatttctgttttttctgatgatcacaattctcgggctggacagccaggcatttaaaaatcatttttgcaatttatttttcagaaatttacaggtttgcatggtggaaggacttttcactgctcttgaggacacttttccaacacttttactaaaacacaaaaaagtaaaagtatttaaagtatttttttatgttttcattaagctttctcttcttgttgcttgcataatcttcttcattattggcattccgatggtcacttatgccggggcacattggcttacgctggtgaattataattaa

SEQ ID NO: 52363 - DNA, 4983 bp, Heterodera glycines
  unsure (1)..(4983): unsure at all n locations
tagtgaagaaatagtggcaaaaagtcaaaaatagtgacataattttcagccaaaaaataagccaaaataatttttattcaatgagtaggactgggatttttaagaccaaaaaagccaaaatagttacctaaaaaaatttttaaaattaaaaatttttgccaagaaagtaaatttttgagaacattttttttcatttcataggagtatattttgaaaaattttaggtcgattcttaggggtgtattttttggttttattgcatttttgttagtaattttccaaaaaatgtcgaaatagtgacaaaacgccaaaatagtgatttttaactattttagtgacaaaacgccaaaatagtgatttctagtgacgaaaagtgacgtccaaatgaaaaaagtttaacgcagaaatgcgttttttgagctcctttcttcaaaacaattgagcaaaaaaaaaagttttttcactaaaagttgctgccctactgatcatatatggttgcctcactcaaaaaagtgcagcatttgatcaagttcatcaaaatttcgaaaaatctaagattttcaaaatcatgataaaatcaatgatttttgcagctctgatatcatattcgtgatcggaagccccgtaaaccccagggttggacttttcctagcagaaaaataatttttttgggtggagcccagattctccagtattaccattttttgaaagcttaaatttgagaatgttttctaatcgaatgcttataaatttaaagcttgttcttcttttgtttatgtaatactcttttggtttgcaaaatttgtttatcttaaaaacagttaaaatttgctaatagaggttttcaggattatgatcaggattctgacatcaatttcaaccaattctaaatccttcccaaatattaaagttgtgggcacccgaaaagccaaataggataggtcgaaccctagttaggtgaattttaggtctccagatcactatgaaggagtgatctgatcgagttggtgtaatttacatggatccttctcctttttaaaatttgaattttctgctcgatgttttgttattttttgtttttgacttggcgacaaaacgtcggcgccaaaacgaacagactcacttttctcaattacatttcttttctctctaaccaccggcggagtgtataaatagtgaccgtgcccttcacattttgctctcccttcattcattcctacaatttgttcattcgtgatttgcttctctctctttcattcatttctcctcagatttattatttatttatttgtcgatagatatttgtgttcattattcctttggacacaacatgcatggcgccgaatcagttgaccgaggccaatggacgggtaaactctgataatttgaactttacattttaaattaaaattatgtaaatactaaatcattgacccctattaactgaatggataattgtcactaaaaactggaaaattaaagcaacaataagcattacaaattaaggtgaaaatatttttggatgggtaatttgttcttttaccttaaattttanaaaggttgcgtgccttgttttagactatttggaattttgactggaaaagaaagcataaaaaataaatttaaaaaatgcaatttaaatgtattaattttcttacacaccgattttattaacctacacagaagttttggctctactgagtttacgcgtctaatcagtgaccatccttattttcttagtccacaacttttttctaacttacaattagtcaaatcttacattcttggtatcaaacaaaagcttgaaatttcgggaatctataacaagaaaagagaaaataaagacattaagaaagaattacaatgagaatatccgaaattcagtttttttcaacaatattttggaaaattttttgtttatagtcttgagcacaataattagttataaaaaacataggctttaagctttcaattgataccaagtaagaaataagttatggcctatgtggtcattgatttgacgcgtaaactgcagtagagccgaagttttattcatttaaaatatttgtggcttctgctggaccattagttacacacagcgtccgggaaatgagctcctgtgccagaaaagatttgcatgcgtggctcagtggtttttataagatagtaaagggacaacgggtggtggttcgagtccgttgtgcaacatgaatattttcatttatttttgtccaaaatattaaaaaatcacgatatttgggaattatttttgaaggtttttgccaaccaaattggataatcttggtatctttcgaaagctcttgataatgagaagctttttctaagcaaatgctaagcgatttggtgtaccagagaaaagttatgaggctttaaaattttgtttttcttataacttttgaaatagagcattaacaaaaataaattcagcattaatcgatgcagaatttttttctctaacgatatgcaaaatttcctgttgatctaacatatagaaaagaagctaacatagcgaagtaaatgttgtttttcctaataataaaaatattagatagtacgccaaaaggagacaaaaaattagagaaaaaaagataatgtttttctctggcactctctatttattggtacacatctcgttttttcggacggtgtgtacagacaacttgacatttctttggacagacaacccagctgttgaaaagttaatatttaaaaatcaaaatgaacaaggaaaatacactacattttagaaaaattttcaatgaaaacctaaatttttattagaagataaatttaatctgtttaattttcatcattttttataggacggtttgattttctgatgagtatgattgcgtacgctgttggcctcggttaattaattaattgattttgattttttttcggtaaaaaatattatgttaaggaaatgtttggcgctttccgtacctttgttacaaaaatggcggaggttaattaatggatttaattcgaaaaatattttaatcaacttttaaattgctcataggttcctttctcgttgtttatgcgcttttcttcacttttggcgctgtaccaattttcatcatggaagttacgatcggtcagtacctacagaaaggtaggttacagtatgcctttaaagcattttttgttaaattattttcaggagcaatggaaatgtggaaaatgtgtccaattttcaaaggtaaataaatttttgcattgaattttaaaataaaatttataattttttttaaataatacttttttgcctttccaggtgttggcattggtaatgtggtcatttcgttcatgtgcattgcctatttttgtgtgattgtttcttgggccgttttttacatgatcagctccttcaattcaccatttccatgttcgttttaattttttttaaataataaataaataattatttttgcgtgttttaaaggggaaacgtgcaacaattggtggaacaatggccaatgtgtgtcggggaaagaaaatgagacggacatacagcaactttcgtcaaatttgtccgtgtacggactgaccattgagtcatccgttgaacaattttgggagtaagcggttaaaggaaaaagcaaaaatataaataaataaataaaagtagtttttaaataacagacttattttttattggcattcaaaaaaggcttttggattttaaatcaccaaaaattaattagagcattctggaggaaagcacaaaaaagtttcattttaaaaattatttggagaaacatttagactttctttggaatttctctaaaaagtgtcaattttctccaataaatcccaataattgtttttttcaggcgtcgtgtgctaaagcaaactgcgtcaattgacgacattggcggcatccaatgggaattgctcggactgatgtttttggcatgggttgtcgtatatttcgctttgtggaagggcatcacccaggcgagaaaggtgccgtttcatttcacatgccattgatttgtgaccgaatacaaaaaatgcggcaaaggtgcagaattgtggtcccgatgggaaaaattactaaaattttaaaaagccttttttctggggtagaaaaatacgctgatcacgaatctgaactcagattttgaaaatcattgattttgtctatgactttttatcaagtgctagattttttccaaaaattttaagaaaattaatgggcgtaaaaaactcatacacagatgttgtagagcttaaaaagcgctttccaatgagctattgaatctattgaaaagtcaagtatttaattttctatgattttttgaaatttaattattaatccctatgggtcttatgagacgaggactgcggttcgagtccgcttggctgcgatttattatttttatgattgctgttgaaaaatcacggagaaaacgaagattcttgcaaaatcaaagcccatattcgtgattagcatatttttttatcccaaattcattgaaaagaaaatttttacagaagattaaaaattaaaaaaaaatcaagtacttgataaaaagtcatagacaaaatcaatgattttcaaaatctgagttcagattcgtgatcagcgtatttttctaccccagaaaaaaggctttttaaaattttagcattttccccatcgggaccacaattctgcacctttgccaaaaatgccaaaaagtttttgtttgaattattttagtaaattttttgatagtcacggggactgaattgggcacaaaataaaatgcaaatttctttttattaaaataaaatctcttgttttttcactttaaagtttgtatacttctgtgctctgttcccatattttctgatccttgttttgctcatccgtggcttaactttggagggtgcagggaaaggcattatattttatctgaaaccaaatatcacaaaagtgaccgacacgacaggtccatattaataattaat

SEQ ID NO: 52364 - DNA, 1898 bp, Heterodera glycines
atgaatgaagggagagcaaaatgtgaagggcacggtcactatttatacactccgccggtggttagagagaaaagaaatgtaattgagaaaagtgagtctgttcgttttggcgccgacgttttgtcgccaagtcaaaaacaaaaaataacaaaacatcgagcagaaaattcaaattttaaaaaggagaaggatccatgtaaattacaccaactcgatcagatcactccttcatagtgatctggagacctaaaattcacctaactagggttcgacctatcctatttggcttttcgggtgcccacaactttaatatttgggaaggatttagaattggttgaaattgatgtcagaatcctgatcataatcctgaaaacctctattagcaaattttaactgtttttaagataaacaaattttgcaaaccaaaagagtattacataaacaaaagaagaacaagctttaaatttataagcattcgattagaaaacattctcaaatttaagctttcaaaaaatggtaatactggagaatctgggctccacccaaaaaaattatttttctgctaggaaaagtccaaccctggggtttacggggcttccgatcacgaatatgatatcagagctgcaaaaatcattgattttatcatgattttgaaaatcttagatttttcgaaattttgatgaacttgatcaaatgctgcacttttttgagtgaggcaaccatatatgatcagtagggcagcaacttttagtgaaaaaacttttttttttgctcaattgttttgaagaaaggagctcaaaaaacgcatttctgcgttaaacttttttcatttggacgtcacttttcgtcactagaaatcactattttggcgttttgtcactaaaatagttaaaaatcactattttggcgttttgtcactatttcgacattttttggaaaattactaacaaaaatgcaataaaaccaaaaaatacacccctaagaatcgacctaaaatttttcaaaatatactcctatgaaatgaaaaaaaatgttctcaaaaatttactttcttggcaaaaatttttaattttaaaaatttttttaggtaactattttggcttttttggtcttaaaaatcccagtcctactcattgaataaaaattattttggcttattttttggctgaaaattatgtcactatttttgactttttgccactatttcttcactattttgggatttttactcactattttagttaactatttcgggatttttcgtcactaaaagttgctgccctaatgatcagcactatttattaaccaatgagatggtcatagaacaattgcataaaaacataaacaatcaatatttaaatttcaaagatctattatttttaaaatcaatgttaaagtcaattatttttgcaaattatgatatcatattcgtgatcagaagcactaaaaacgccgggttcatttcttcacaaaaaaaaaattttggtggagccagattcctcccagtatttacccccaaaatataaaaattatatttcgataagtattacaacggacactcttcacattaacattatcactcattggcagtttaaattttctttattttataacaaattggtgaggaaattgaagagggttttatggaattgatttggatgtgataaatggcacaaatgttttccttcgggaatttcaaccaatcgactgttgggcaaattcttgagtttgttcgcagaatttatgcctaaacggaagaactactaatagtttatcatcaaaaacttggataaccaattgatgtgtcgaaagcgcctcggatgatcagacagggactaaatttggtttctgttcaaaattttttttggtacttttacagttctgtggctatgtataca

SEQ ID NO: 52365 - DNA, 140 bp, Heterodera glycines
atgtccggcatttacctcattccgttcctttctcgtggaattaagaaaaaggacattcatttccacgttaaagcattcattgcaattggcgtgtcggacactcaccgactaaaagtggaagaattggtcaataacccaat

SEQ ID NO: 52366 - DNA, 1389 bp, Heterodera glycines
  unsure (1)..(1389): unsure at all n locations
atttttccttttttcaggtcaaacatctcgagccatgggagcgtggcacacgccgaacgacggggatgacgggaatgtgtggcgggtgagcggaagcaataggttacattcaatgggccccttttggccctatcctttaaagagatgttcattgtctgattttacatcagaattcaagcaaaaccaggcaacaaaattattatttagtttctatagcaaaatacatttttgaaaagatttattaactgtattcattaatccattatttagaagggatagtttctaaatttcatgagtaattttaaccatttattccgaactgaatcattatggacggttcgtgtgacatttagataataattcactaatgccaactccattatgccctcccccaaaatttagggtccgtggtgtcggagcgggaggcgtaatctctacagcgttttgtctgctgtacaaactcttcactttacgagtcactcggaaacaattggtggccatgataaacagtcgtcagtcgatttacttgcgaggaattggctttatgtacatccgatacacgcaaaaacctgccgatctttgggcttggatggaaccttatttggtctgctattagcatttgtttgtttaaatgtgcactttttgcaggacgacgacgcagagattgacccacgttcgggaggaggtgacacaatgcaaatgggacagcttgtcaggatgatgctcaccaaggtcaacaggaaaagtttcgaaggcaaatgcacagaaattctcaaaataaataaaatttagagcgttttattcttcaaaattcctactaagttttagaccaattggtgccggggagcaactcgtcctctcacatttttaccatggacagaaaatttagttttcgaaattaaaacagatttgtttattatattttttatcagcaaaaatagggaaaattgagctccacttttaaattttaaaggatattgcgttaacattgttgttttttagtatgttttaaaaataataatgtcttcgaattgtttggcgaaaaaatcaatgaatggcgactaattattcctaaaatataacttacttttttttatcaaaacgtatgtttttagctggatttctatggcacgctttttcctcgaattcctgtgccaatccaaaaggacattgaaagcaaatttggcgaacgtgcaaaattgtatggctatgaggacgaacgatacggtggagggacgagacgaaggtcgcggagtcgcgaaagaaggcggtcgaggagcaaagagaaggaaagggagcagcgacggtcgcgcagcagagaaaagaggggaaagagtcgaagncgagacagaaacagacgaagccgagaccggaacaggtgggcgaacg

SEQ ID NO: 52367 - DNA, 699 bp, Heterodera glycines
atgaaatttgcaaagaaaatgttaataattcccgaggccgaatatttggctctgcggagtgcgatgaatagtggtgattatctccaaaatgaaaaagcgagtttagacgcaaaaatttctcagaatttacaagatcctggcataagcgaggacctcaaggcgaagagacacgattggctctataaagaaagacgtacggtaaaggggatacttgaaaatagaccacagaaggtagtgattgagaatcatgtacctggtccgaacgttgcaccatatctgggcctcaataaccaatccaaaccacaggagaccgatgaaccccggaaaataattattcctaggaaaagacttaaagagcaaactcctgatcttgaatcagataatgatacacttgaggagttaagtccggaaccccaaacaacatccacattaaaaacacccattccgatcaaaactattatacacccgacccttttaaacggtctttttaggtatgtaaaagaaaacaaagatttatttaaaattacggcggctggaaaggtacagtcgaacatgaatttgccgattgaaaacagtaattatagagatgttttgttgtatctcgcggggaagaaagatgaaacaccccggggtgcaaaatttcttaaagatcggttactgaaggatccaacagtaaaagacatggttgataaatcaaag

SEQ ID NO: 52368 - DNA, 841 bp, Heterodera glycines
atggatccgtccgccgtttcttcttcgtccagcaccgatcagcaacaaaatgcggaagaggcgcaaaagggcgatttgacattggcacagcaaattgcggaggacaaacagaaaatgtttgaacgctcccagcagtaccaacaggaaattgaggacgaagtaaaaaattgggaggagaaaaacgaattgggaagcttttatgggttttttctggacagaaagaaacttagtcagcaaatttaaatcactttccttttcctttcagattcgcaagactcagccgttggtttcgtccaagcaaaacgtcagttttatccttaaaatttcactcgtttgtttaggggtgtattttatacgaatatttcgatttcaccactaaatggcaatgtttgttgtcctttcattttctttgctttttctccctccgccctttcccgtggcttctccaattaactgttttcattaatattcagattgtccatttggttggcgaatttgatgagaagacgagctctcagtacttcaaaaaggcgacggtatcacaaaaaagccaacatttttcttattattctctgttttcttttaggagcttgccggcgtttactcggacattcggcgaatccgtggcgatggcaattgcttttaccgcgctgtactcaccgcccaactcgagcgctgttttgaggacgccgaggagctgaaaaggttggaaatggcagacaacagcagcagaacatcactggttctgttcaaaaagcacttattctgatagaaaatcttaggcattgggccggagaatggcgaaaaagccattttttgatagttttttaaaagtaaatga

SEQ ID NO: 52369 - DNA, 505 bp, Heterodera glycines
atggattttgctgttctcgttgtgagtgattcgtctgacaaggaccacaaaatggacaaaagtggtcctttgttggtcgaacttctgcagaattcgcttttaatcagaagagggcaaaaagtgaccgttgcaaattacacaatagtgccggacgagaaaagcaaaatcgttgaatatctacgtgaatattccaccaaagttgactgcattttgaccagcggtggaacagggtacaataactaattaattaattgaatggactaattggattagttttagccggattaaatttagcaacaattaattaaggttctcaaaaagggatgtgacgcccgaagcgaccaaagaagtcattgagagggaatgcccagggtaaagtgttaaaagcaatgccgggggcaaccaaagtttatgcatgtagaatcgctgtggcacttctgaagaaagggcttgacattacgccattcgctgctctcacccgtctcaccgcgggtggactcaaatt

SEQ ID NO: 52370 - DNA, 61 bp, Heterodera glycines
ggattatttttcaaaacacctcttagactgggggataattggagactgcgggattaataga

SEQ ID NO: 52371 - DNA, 1437 bp, Heterodera glycines
atggtttcattgacaataattaatttgaaaaatacattttgtagtaaatttggtgccttttggacccgaaaatggcgaccttgaagtgtcaccagggttcctgacgtccggtcagaccattgaccttcatctgttcttcccattttacgggggcctttacaactacacaacagtaagaataagattattattatataatttatttttgtaattacctaatttcatgtttatttttaagcaaatattaattttattttttgcatttttttatattaatgctctaaacatttaattttgaaatttatttttcaaaagttcaaatatgtttatttataaaaatttcttttaacataatcgtaaatttttattttagttcgtaattcaaataaataattttttctaatttttatattttaagcaaagatattataattttattttctttatttaaataaatatttatttataagaaaaaaatcagtaaaaatttaaattattttagtgtaaaatatattttttaattttttaaaattattaaaatataaagatataaataatgctcagatttctgtgaatggatatttgggctttgccactgtgttggaccaaggcccaaccatcaatgttggcccggacagcacggattggccacgggtacaagacccagcaatgattgctccatatttatgcaaacagcaggtcacaaattagggcaataattaattaagtattgaacctaatgctttaaattagagccattatcagggtaattaggcaccaatcaagaggcttcccttaatgatgagtcaagcaacattaaaacactattgaattttttagaaagcaaaaagtggttcggttgacaaaataaatcaaaaaaccgaaaaacttgaattttctcgatcgttttttgtcgattaaaatttgaataaaaccaaaaaatcgagtgctggtatctaaattgtatccttttttggcccccgttcagatcactcaggacgcaattcctggccttcgtgccggcgttttctttcgtctgatgatgcgccaaagtttgtttggccgtggtgttggcacaaatttgaacgcggatggcacaattatgcaatccgctttctttggacaaccggcaaatcaggcaaaaccatttaatttttgttattttttaaaaaaattttacaggcttgtccaagcacagcaggctcttatgtacgatgtgatgcgaacagtgactattttttggacgaaatgatgcgatggcttcagggtaattaaatgttttttttatttttgaaatttttttattttagagggtgtcgctggtgcttcggcatttcgtgcagatgccgctatggtatttattttttgtatttttttttattgttttcattgaaaaatttttagaattacttattcaaattatttagggggattaaa

SEQ ID NO: 52372 - DNA, 289 bp, Heterodera glycines
  unsure (1)..(289): unsure at all n locations
atgtcaataatatttctatctaatagaaaatacttagagctacgaaagatatcaagtattaaaaatttggttattcttaagaaaaatagaataatttttcgtcaaaaatttcctttttggtgttttttcagtaacgactaggcaccaataatcagccattttcagaataaattcancaaattaactaagannaannttgatatgataanntacagtaaattntttacttttattttagatatttcctgaatatttttttcacagtcaatttttcatttattattgaaaa

SEQ ID NO: 52373 - DNA, 1335 bp, Heterodera glycines
atgaatttggctttgaaccctgaaaatggcgatgaacctgcttacgggcagattttcatcgttgatgctgaacaagcgatgagatcaatgaggcaaggcaatgtcgatgttgaccctcaattgctgataacagtgtatgaagtgatcagaaatatgaatgtttttgctgaagcatatatgatgatgaaagatgaggaagaagaagaagctgagagagcaagaaatgagatgcgagagccgaccgagatcaaacttttgtttgataccggaagacaattggacagacgtttggggtacaatgtacccagagcgaatgaagttgcagctgtttatgttcctggggcagatggtgaagtacctaatgccaagattgtgattagggaacgtggaaaggaattgaagattttgaagagtacagattcaatggtgactccaatgacttacccgttgttttatccgcgtggtacgcttggttggaaccctgaaatgaagcatagaaatagtaacagaagagtaacgaggttgcagtatgtatgctatacattagcaattagagaaagagagtttaacccgattttatacggtggaaagctctttcaacagtattgtgttgacgaatatgttaagattgaaggagatcgaatgaattggataaagtgtaatcagaaaaagattttggctgatgcatataagaatgttgataatatgttaatgagaagagcacaagaaagaggtttgccactgggaaggaaggtcattcttcctccaagtatgacaaatagtccgagatatgttgagaagcattttcaagatgcgatggccgttgttagacggtttggtaaaccagatatgtttttgactatgacatgtaatccgcaatgggaagagatttcagagaatttgtttcatgaacaaaagtcaagtgatagaccagatttggttgtaagagtttttaacttaaaagttaaagctattatgaatgagatagtcaagaaaaaggtttttggcgaagtgattgcatggatgtatccggtagagaaccaaggacggggactaccgcacatccatttgcttttgacattggcggagcaagacaaattgattaatggtgaagatgttgaaaagaagggaattagtgcgagaataccggataaagaacatgaatatggtttgtttgatttggtgaaaaggtttatgatccatggcccatgtggtaatttgaacccaaattgcccatgcatggaagagtttgttgacaagaatggtattaaaggaaggaaatgctctaagggatatcctaaagcatttcaagaagagacagttgttctgaaaatg

SEQ ID NO: 52374 - DNA, 840 bp, Heterodera glycines
atgttcttcagacgcttcttccgactcgataaatacgcgaatggccgaccattcgttggtttatccatgcaaataacttttcttatttctcttttcgtgcatttagtatttgattggggcaataaatgcaagttttgatgaacaatgatattttcgactttttgttcgaatttggagttcggggttcggaattggcgagaaagggtgtcatattcgtgatcaatagggagtccaattatatggaaatccgtatttttttcctggactgtgggaggcctgaaacatacaaaaaacatgtttttagcttggtttgaagcttctaggaaggatttataaatccatatttttccgtatttcgcgatttatgtcaatatttccatatttgtcctttccaaaaaacctctaataaaacggtctccatcagctaaatttggattttgacccttaaagacagggaaattttccaaaaagtcattttttaacgaaattttgtcgagaatattgattaaatttatttattttttaattggtaagtttatgtcaaaaataagcaaaaaagccaaaatttcgctttttgggttgatttttcgctaaaaaagagtaaattttagttgtatcatgttttttttcttctaaaatggttttaataccacatttagccattttttgtaagttttacaatattttagcaaattttgaaaaatttatttccatattttgcgattttggtccatattttatggccatatttcgcgattttatatccatatttttggactccctaattgatgacatggaaaatgtactcattcatataaatgtatttattccgcaatgata

SEQ ID NO: 52375 - DNA, 118 bp, Heterodera glycines
ttgcgtgtgacccgggcggagccactcgttttggaagcggagatcgaacttggctctaaacaccttaacgaaggcggcacaatgcatggcggattcgtcgccacactcgtggacatcg

SEQ ID NO: 52376 - DNA, 127 bp, Heterodera glycines
aaattgtacaaaacttgctagttttttgaaaaaaaaaattaaaaaaatttccgacttttcatcaaaaatttcggaagtcggaattccgaccccaaaaatgtgaaaccggaagtctttccgtgccata

SEQ ID NO: 52377 - DNA, 801 bp, Heterodera glycines
atgctaaggcatcatttggtggtgccatcggtgccgactgattgggcacgggacggagaagaagcagaagcggaagagcatttgaaatcctcgccgactgatcaagaagggctgagatgggcaaagcgcggcagttacccctacaaaagtaagggtttggctatcgtgcttttcagtacctatttagccacgaatactgtaggtggcactgatttagcaagtatatatgctttagcactgaaatttctggcaccgtattttttgaattagagcccccccccctcacctgaattagaactgcatcggcaatttctggcatttgcatatgccttggcactaacatttcttggcatttatatatgccttggcactgaaatctcaggcgcttatctggccattaaactttatttggcgttgcgtttattagtataatttgtggttaattttttgcaattttacatatttttcagtttttggcaccaccaaaaagagtggaattgcaacggagtgctgctcgaaaaggtgacacaaatttaaaaagataatttatttatatgtgtgattttattcgctttactcacaaatttaattatttaaaaggtatatatgtatatctaattaggccatggacaagagttcgtgggtgtcacttttttgctcttccgtacaaagaatatgactcaaatttcaattgttttgaatttaataaaaatattttttttaatgaaaagattaaattattatttttttttaaaattttataatgaaaattaataattaattttttcaggtgcacattaa

SEQ ID NO: 52378 - DNA, 1331 bp, Heterodera glycines
cgtaattttggccccgtccgtcctcagcccgtgggttctgtccccggccgcgcccgtgccgtacattctgtccccctatgttttcggccctttcattctttcgccgatggcaatggcaccatttatcgtaaaagttaatccaatgttgttttaaatagcaatgttttcagcttactccttatgtgttgtcgccaaatgtgctcaatcctttcgctttgtcccctttaattttgagcccaacggttaccaatattaattaattaattgcgtttgctttctatcgccaattaacccaattaattaactgtctgtcattgttttaaggtgctcagtcccgacattctgtccccacagattttgggcggtggcattttgtcgcccaccgtcggctcaccggcggtgctcacagaatcggctctgatggcctccgttctttcgccaagcgttctgtcgaaaaaataaaaataacatttctattttatatattttttaaattatttttatttttttcattatttttttaatatttctctttgaattggcaaaatatttctttggttttgttattattttcgtttaccaaaatataaaattccgtcgtaaagtttaaaatgagagaaatgcgatgaaaaggagcggggaaatttttcttctgagcaaatcattttctgttttatgtttacgatgtttttgagtaataataataatgaataagaaataacataaatgaatcaaaggaataatatttaaaattataatattgtaacaataattttattttatatttaaatttaaatttgttttaataattgatcaattgagattcagaaaactttttaaatgatcttttacactttaatttatttaatacctaatcattttttgtctctttgagtgaaacaaagagataaatgaaattcgcgagaaaagaaacgcgacagattcggtaagagagaaaaactcacaaataaaaaaggaaaaaaataataaatctaattagcctattttttattaatatgaaagtaaaacgcacagaatattttgattttgcatccgaaaatgtaaattttgctcaagaaaaatgttgtgcaaattccaacgaattgtaaaacggaatgcgaaactcaatccgatggacgcactcaaaaatgcacaacgaaatgccaaatttcaatgccatttcgaatgcttagccaacagcaaattcaaattgtaaagatttccattaaattatggcaatttgcttaccaaatttatacctttttcagccaaacacgcaaataatcagcagaatgagtgaaactcgcgaatttttgcagatggacgaatgt

SEQ ID NO: 52379 - DNA, 2146 bp, Heterodera glycines
  unsure (1)..(2146): unsure at all n locations
atgcggcttcgtcttcggctttccccgtggtcctttcgcggtgccgtccccggagtcgtttgggtcggtgccgacgaggttttctccgtgtccgatgaccacagtctctgccgctggaccgtctccaaaacggaggccaattttctgtctaatgcgttgaaagagtgcgttttgccgcctttcctcccaaaatcactcttttttcatttccggtgccattttcagctccattttccccacttctctcagtgccgcgtttcccttcgccgccgggcgttctccattttccggaggactgtcaattcgctcgggcaaaaagcaacagcgtacttccgccattcactcgtctcagtcagcagggaatgagctcattctgatgactgcctctgatggtccatcctctcattgatcagataattaattttgacttcgattatctcaggcaaaatccatctgatcactccggcggggaaaattgaacgaacaatcgaagcccaccaaggggcggccattttggcccggtggagcacttccgagcccggaggggcgggcggatttgtgagctgtgagtgaacgatgggtgggaagcgcaaacggaaaagcaaaatgttggcacaggcggagaggacggactgttgaagatgtggtcgcgaaacggaatgttacggtcgatgttggcacaacttgggaagccaatttatgcgatggattggaatgggaacggcacaaaattggtgtacagtgcgggcgaagagtgtttcatcaaacagatgaaggcacaggtaaacgcagaaagtcattaattgatcgaagagatctttttagaaaaactgccctttatcaaatagattcaattaaaatgcaatcagaatgcacccaccaaatggcgtgcccacaccggactcgtcctctgcttgagttggagtgcggtcaccgatctgatcgccagtggaggcgaggactgtcgttaccgactttgggatgggcaaggtctgattggcaaattgccaatattgagggtataacactcccgcctcttttgctgcagggcgccctctgtggtcctccgcttcccatggccatccgttgtgcagcgtcagttggagtccaagcggagagactttcgcgatcggctcctacaatttgctcagactttgcgacaaatcgggggtaaagagcgattaaccattattaataatacgaaaattttggctttatttttttttctgtcaaaattgttcaaaggcatctccgatttttctatgccaattaaatttgatcattctgtttcttgactacagtatcactgccttttccgctcattgtgccaatgcctttcagtggtcccattcccttgagcggcctgccagtggcacaatttactctttgaattggtccgccgacggtgttcaactgattggcggatgcgccaatggacaaatccttcacgcgcacgtcgttgagaggtcgtcgttgggggggcgctgtggtttttgccgtccttgtctgcctgcgttcgggcgggttgtgtgggcgcccttggcggccgtccaggcccgccncntggtcgttnnccttcggggtttgagctcggtggtcgcgcgtgntcgtctggttccgcgggtcggcgtggtgcgtttcgtcttcggcttttcctntttggtggttgcggccctctcgctttgctncgtcttcgggtctttgccggcgtttcntggctcgtttttgttttcgtttgtgcctttgtttgggntgcgccgccgcttgtcgtcctgncggtggtctcggggcccgtgtcgctggtccgtctctgcgctctgtgtgccgttttggcgtggttttctgctgcctttcttttcggggtggctttntntcccnccgttcccnnttctcggnggtgttttctgctggtgggtggctctgccgtccgtgtgttctgcttcgtgggccggtttctcggctctcttcnttttcctccctccgccgcgggcgggcccttcgctgtctnttcggtggccntttcctccgctttgctcgttcttcgggncccttcccnncnttccctaaaggatcttttcgccccncngnncggtcgnncggccccttaaggaaagaaacacacaatgttagcgggggggcgggggcg

SEQ ID NO: 52380 - DNA, 1213 bp, Heterodera glycines
atgtgtggcacttttgccgagcgtcgagtggcttttgtggaccaaaagggcgactgtttcttggcattagtcagctgttatgggtcagcccaaaggactgcgaagatcggatcgctgatctcctgcctgagtgccaacaatttgaccaatatgttggccgcactgcaggaaaatcagcgcctgctcgtttggacccttccgacggtggcatttttagacagggatttgcttccctccacccaaatggaactcggcaatagtgccgaattgggcaaatcggcgacgattatcgggtgggttggacaatataacatgtgtgaaaacaacaaattaacaaatggtttggtggaatattcagattcatcgggaacaccgtaactgtgcgaagatcggacagatgtttaatcgcccattatgtgccccctttcgtcgcgggactgtacgagattaaaattcaaaatatattttaaataattaacttattttatttgaaaggattcgttgtgttcagcttgcccaatgggaacaagctgttcgaatttgccgaacaacaaatgtgagaattttagggcataaaaaattgaaaaccatcgctaatcaaggaggaattcttgtgggcaactttggccggattggcatgcattgaaaagaattaccaaattgccgaaatgtgttatggacaattggaggaggtgactttcagggagcgggggggagggggaggggggtaaagaaaataaagagcatggattgattgttatcattaaatgaatctctctcaagagtccaatttcagatggagaaggttctgtttttgagtgagcttcggtcgcaaaatgtgccgcaattgcgcgacgcaaaagtggcacaattcagcggacaaaggcgcgaagcggacatgcttttggtaaacgcgggaaggaccttcgaggcactgatgctcaatctcggcacttttcgatttgataggtttggagaaagaggaattaagtgattaaaatgattaagggcgttggaattggcgacaaaaatgggcaggcatttggacacggtgctcggctatcgccagcgatatttggagctaacaggacggaaggagacagatcagcgatatttgaagcatctttcggaggtggaaattgactggacacacatttttgagaagatccaagaggacgaggcaaaggccaaccaacagaacaaatcgccgtga

SEQ ID NO: 52381 - DNA, 1895 bp, Heterodera glycines
accgtgaatggattactgtaggtttttcctatatcaacttacgcgtaaaaattataatcattccactatatatgtacaatatctcgtttcaaagtaatactttgccactgacgcattttccgatcacacacatccggtcggtactaaatggatgtgttgccctcaccgttttccaattctgtgccaatttcccccgtccaaaggtggccatttgaacccggccgtgtctctcgccttcgttagccttggcaaattgccatttgcgcactttttgctgtattccctcgtccaaactgtcggcgcctttttcggctccgccctttgcttccacgtctacagaggtgtgggttgacttgctatttttcgaaaattttgaaaattattatttttttgccagaatcattcgagaaattcgacgcgggcattcgaacggtgggagggcccagcggaacgggcgcaattttctgttcctttccggacgaacacatcggacattacacaggtaagcgaagcaaatgctaatgtaatggccacactcatctcattcatgcttttccttcaggattttctatttttttctccctttctcctttcctctcgctctcgcctctctctcctttgtctcacatttccctctctctttccacttactctccaccctctttttctttctctctctactcctccttctctttatcgtctctctttattttcttttattttaacaattattttaattaattttgcagcgtttgtggatgaaattgtcggcactgcgctgctcctctttttcgtcaatgcgctgatcgatccgcgaaaccaagtgccaaaatgggtgcatccgatcggctttgggctggccatctttctgatcacttcctcttttggcatggtacgtttgtctttggcatgatcactccctccctcgtctattggtaatttctgcttgacagaatgtcggctctccgatcaatccggcacgtgactttggtccccggctctttcttctgtttgccggctacggatgggaagcgattgcgtcagtttttgtcaacagttcaacagcaacgttcaatggcgcagaaacgttgcgcaacacaaccgccgtcagtggaggaagtggggacaagcgaaagtggaagcgagtcggcctcggactccagctattcgttttcttccagtggtgagtttgagtgcggggcagggttgttccgggtcgagaaaaatatcgggtttcgggtcgagaaaaaggccgggtttcgggtcaattgacaaatttttaatttgtttaaaaatcaaatggcactgcaatatttgcagcgaattgcgccatttataggacgatggaaataaaaccaaatggaatcaggtttttcagccatctgctttgcttaaattcaagaaattcatacaaaatatctttagaaaaaggataataatgaacaaaaacgaatacaaaattttcgattccattgaacacaatcgtttcaaaaaaaattctcaattcccttatcctcagaattttcacccagaccccattcttatcagtgcgtatttcgacccgaaaccggacccaaaatcatcgggtcgggtttcgggtcgagaaaaaggccgggtttcgggtatcgggtttcgggtaacccggaacaaccctgatgtgtgtttgtcctcctccgccggtcttcctcttccctttccccttcattttcccatttatttcgtttttaaattgtttattatttccgaatctttttgcgcatgttcaattttaaatgccatttctcgtcattttcacggcgatttgttctgttggttggcctttgcctcgtcctcttggatcttctcaaaaatgtgtgtccagtcaatttccacctccgaaagatgcttcaaatatc

SEQ ID NO: 52382 - DNA, 768 bp, Heterodera glycines
atggatcgagaaccggacccggcctgggagatagcccatgaaaaactgaacaaaaaattgttcttaaccgggccggtccgggttccggatcaggcacttttggtgccccgaaagtggtgcgatcggcttccggaaaatgaccaatcaatcactgagttttttttcgcatcgtctcagcacgaaaagcaacagcaatcgttgagttcatttgtgacagacagcatctattggaagcaaaaaagcatcgtttaaggaaaatctgagaagattttttggaaaattctattgggaatttatttatttatttgtcgactatttcagttggatttgtactgatatttggctggacactctcccctttacaccaactacaactcccacaaccacaacaacaagcgtaaagcaatatttgttcggcattgacattggatgtaagaaagaaatatttaatgggttgaaaatgattgaagaacatagcggagaggggagaaaattgaaaattttaaataaaattttggggaaaaaaatttttaacaaaatgtggaactatggaaataattaggacaaaaaaacaaataattcaattcattcagccaaaaaatttgagaagccatgtgaaaagaactgctttttggcatcagaattaatgtatgtttattgtttacaatttataatttgaataataacttaatttagcaattttagagcaaaagtggtggaagcgattgactctgaagaaaagaaataatggcgaaaatggcatttaaa

SEQ ID NO: 52383 - DNA, 453 bp, Heterodera glycines
atgtgcaaaaatgaagtacataacaagtacaattcgggaaagttttcaagtgctaagacgcaattcaagaagaaaacggccaatgtggtcactgaaaattgcaaagttgtcagcgttgcacaagctgattgcaatttagtgtcagttccgcctcaaatgatcgcgttgcaggtccataaaaagactgcaaatttcgaactggacacaggcgctgatgttactcttttgagttatgaagattgggaaaacattggacacccaaaactggacaattacaaatgcccgacagttcttatggcatttggtgggattccaatcaaaggagtgattggatcattcaaagtctgtgtggcctacaaaaagcaaaagatggaggccaccatttacgtcttcaaaggcactagacgaaatttatgtggccgtgatctgataaaaggacttcagattgattga

SEQ ID NO: 52384 - DNA, 540 bp, Heterodera glycines
tttttaactgactggcacaaatggctcaacaatgccacaagcggtgggaaaagtcggaaaaggccctggtgcctattccccagagatgagatgtcttggtacacctgggaggaacggttcgagtttttcattaaactccgaggaatcacggatgaaagcactaaaaagctgctactcttcacggagattggagcgatttatgaggagttgcgaatgatggcacaacccgatgatgtccgaactttgcctttcagtgaaattgtgaagctaatgaaagagcgttttggtgaatcaaaaacgctcgctgctaaaaggcatgagcttttttcggccacacagtcctcaggtatgtcaattcgtgattttgcaatccaattacggagcttaatcgctaaggccgagtgggacagaaacagcattgaaatgtgcttatgcgcgttatttattaacggcattagcagtgatatggtccgcactgaactgatcaaagggaaggcaatggcattcaaggacgcagtagagacagcagtcttactgtaa

SEQ ID NO: 52385 - DNA, 513 bp, Heterodera glycines
atgaccggaagttcagctagagtggtccctgctgataaattaaaagctgatccaatttctgtgccaatcgaaagaatgattcgtgttccccctgggatcccaaacaattcaattttgccaaaaggaaaagccaaatttaagaatttaattggcttaatttgtgtctcggaagaaatcaaaaatggcgagattaattttgaaaatgagactgataaggaagtggtttattcattagggacaatgaatttttcaggggcggacggaaaagaagcggccaagtgcgacgagtactgtcttggcgacggaacttgtttttggaccacaatttgctctggggaaggccatgagcactgcacgcagttggtcgttgccgattttgatgccgtcctaaatcgcaaaatcggaattggcgctaaagaggtgacaacgccgcttcaagcactgttctgtgcatttctgctcaaaaaatttggttcgacaacggcatctcgtcgtttggtggaccggccatga

SEQ ID NO: 52386 - DNA, 1173 bp, Heterodera glycines
  unsure (1)..(1173): unsure at all n locations
atgaccatcttttcatcacaacattcatttgtaaattggacttttaagacggatgatgggagcgatgcgatggatagcgacgacgaggaccaatccgacgaagatgccaaccgaagagcagacgcacttaccagggaacaggagaaacagttttggtccattgtcccagtcgaacaactgaaaaccgaggacggaaactcccaatcgtcggacaaaccatcgacttcttacgccgcttctcaggccgggcttcctccgtctcaaaagaaaaaccaagcgtcgagttcatctatgcgccatcccaacgtttgtctggacgactcctcaatgccgtgctccatttgtttgagtgacatgcgcgaggagtgcgacgacgatgttgttgtgcagctgtctctctgctctcacttattccacaaggaatgcataaaggtatttccgaggcgtctatttttgtaactaaaagcacatcaaatcgggagaagttggggacgtacctcccccctttcgaaattcgcccacttttacttctcttccctatttttattgaaattatctcacaatcagttgattcatgtgcaaaagtcacactttaattagtttcttttttcttcagtccgcctttgctgtgaagcgacagtgtcctctgtgcatgctttggtatggcgaatgtgtcggttaccagcccgccaatggtgattttggttttaatttaattaaaaagcatttgatgatttaagctactatgacggtgaagcaaatcccggggtatgtcgccggacacagagacgcaaagggattccatgaaatcacttaccatattcctgctggaattcagattgtatgtcttttcccgacccgtatttgttccgtcgcttatttctaaatgttaaggatggacacattcgccccgggcagccgtacagttcgaccactcgcatcgcctatctgccgaataacgcggaaggaactcttgtgctcaaaatgctccaattggctttcactcgccggctgatcttcacaattggcgattcagtgactacgggtcgcaaaaatgtgccggtgtggaacaacatccatcacaagacgaacaagaagggcggcccgcaaaagtgtgcctttgttatttgaaangggcaaaggtgtagaattgcggtcccgacagaaaataaa

SEQ ID NO: 52387 - DNA, 788 bp, Heterodera glycines
atggaagcgttaaaagcaaaaatttctttaaaagaaattttggaagaacaaagaaaagtaaaagaattatcaaaaatatttaacatactgaaaacggggaaatttcctgagggggagccaaaatggagaaaaataattgaaaattatggcttaataaatgacgcaatttactacaaaaaaggaaaaacaaattctgaaaatcctaaactgataattccttacccactaagggaacgaattttccgaatttttcacaacgaaggacattttggctttgaaaaaacatggcccgaaataaaaaatcgattttactgggatggaattaaagaagacataaaactgctaaatgaaacctgtgaattttgccaaaaaagaaaaatttttcctggtcaagttaaagcagcaccaagtgttccaattaaatccacggaaggaccctttcaaagaattcattgtgatttgatgggcccattgaaaaaaccgaaaaaggaaatcagtacattttcctagccatagacagtttttcaaaatgggtaatggcaaaggcaatttccgaccaacgtgcggaaacggtggccgagacattcatagaaattgtaattcaccaacattctacaccagaaacagtggtcacagaccagggaaggcaatttatttcacaaattttcggaaatttgaaaaaatttatggatttgaacatattatgtccactgcttatcatcagcagtcaaatggaatggccgaaggttcaatgagaatattggcaaatatatttccacgacaataaa

SEQ ID NO: 52388 - DNA, 1367 bp, Heterodera glycines
atggatttatatttggattttgatgatgtgtatgacaacaacggcattgtccagtcaatttggagtgtttttgcacgcgaattttggcccatttttgcgccaaacattcgccatttgactgttcccattggccatcaactggacgatttgcgtcatcacatttcaccgagaattttcaccgattgcaatcaattggattcaatcgattccgattctcggttgctcgatgcaattggtgatgatgggccaaatgcaactgttggccaagcattgtccaaatggttgcgcattccgacaacaaatgggcagccgaaacaatttcgtgatgatgaatcgtcagaaaccaatgaatgggtcaacaatttcaagaaggtatggtgccaatattttcgtaaaaaagattgttaaaaacttggactggcggcgcctaatttcgatcaattgcgaatcccggacccgaattcgaacaagaagccgaaagtccaaattttaaattcgcatttttgcttcaaaatcggtttaaacaaatggaaataaactgaaagccattattctttcaataaaagataggtaatttaataataagccgtttttagacaaaaaaaaaatgcgaaattcgaaaatttgaactttctattttttgttcgaattcgggtcaggggttcggaattggtctaaatggaagccatattcgtgattagcgattccaaaacccccatggttacatttttattgtcttttaacatcaacaaaaaatccatgtggcctaaactgtataattaccgactcattttggattgattgccatttgggttttaatttaccattttttaggaatttctccgtgccaacacttcttcggccagctacataattcaattcaaaacatacaccacctcagttgcgcagtttgaattggtgaacgaacggactaatgaaatgctgacattgaaggcagaagacgatgttgtatacacacatattaattgtgagttgaagcgatgccaaattgggcagacaattcaatgggaggacaaaaagacggacaatttgaacaatgtcgacatttcgcttcatggaaattgcattgggtgaggaggagtggcaacagcttttgcttttatttgtctcgtcacatttaaatttgcacttcgtttaggccattgtttccgccaaagacgggccaaattaacgcaaaaaatctcctgcaaatgaatcccgggcccagctgagaaatgattgatcattaggaatggaaactgattggataattgctcctcacatttgatacttctttcgtttgaatacattttatttgactgggtttttggcttttacatcagaaatgtatttgtttaccaaatcca

SEQ ID NO: 52389 - DNA, 1391 bp, Heterodera glycines
tgcgtgccggcgaaaccatcactttcacgctgccgtacagctcgggagggctgaagccgaatgtggacgtgctgaacaacggcaagacaatttttgaggacgaccgcaccaccattgaagtggaggacgacaaaattgtgttcaccacccgtgactcaaaacgcaacgatgccggaccgtacaaagtggtggcacagaatcggcacggcaaagacagtgccaagctgaacgtgaacgtgctggacgtgcccggcaagccgagcgggcccattctgttctccgagcttgccgcagacgcgtgcacactgcactggagtccgcccaaggatgacggcggttcgccgctgaccaattatgtggtggagcgcaagtcggcacgtggtggtgactgggagcgcgtcggtgcaccggctggcctgtcgctgcgtgtgcgcggactgaccagcggagaacgctacgagttccgcgtttgtgccgagaaccagttcggcgtgggcgagccgctggacgcggaggatccgctgctggccaaggcgccattcgatgtgcccggaccgccaggcgcaccagagccactgcacaccgcctacgactcaatcacgctccaatgggcacgcccgttgcgggatggcggtgcgccgatcactggctatgtcctggagaagcgtgagcatggcaccaacgcgccgtgggagaaggccgcgtttggcaatgtgccggacacgcgttgcaaggtgggggaaacgggtgcctttcattcaacgcgtagtttcctcccgcctcgcattccccgaattttttgtttaaattttcaacttagaaaatttctaaaaaggttttaggaaatttttcataagaaacttaaaaaaatttttttgaaaaattttcagtgatgtttttaaaaattaaaaaaaaaatagtaggtcatcatcaaaaaaaattttttcttgaaattttcttatgaataaatttcctaagattttttgaaaaatttcaagaacatttttttcaagaaattttcgggatggggggggacgacctgctccgtggaaaattgttgaaatttgtccaaaaaaaaacactaaaattgccatcactgaaggtgaccggcgtcaaaccgcagcacacctacgagttccgcgtggccgccgtgaacgcggcgggccaaggcgagtggagcgaaaactccgtgccaattgtggccgcaccgtccgcctgcaagccgttgatcaccatgggaatgttggcacgcgacatgactgtgctggtgggtgagccggccaagctgctggtgccctacgcggccagtccacgcccggaaatcacttggagcaagaatggcgtgccggtggaagttcgtgccgacccacgcgctgaggtggaaagcagcg

SEQ ID NO: 52390 - DNA, 186 bp, Heterodera glycines
atggaaaaccctgacgcgaattcgtcgacgattcatcagctgaatggggttgggctcggtggacagaatggaagacatcggtcgagtgattggcgatacaaaattcgaaatcaaatggcggaaagggagggaagggacggagtcaattcgtcggttggattctctgctgctcggcgtcacatcaga

SEQ ID NO: 52391 - DNA, 966 bp, Heterodera glycines
atgactttccccaattcttataaaatcggaccatccgctagtaagggacaacgactgttttaagagatattgacatatttagaaactttttctaagctacatattgcttggtgattaaaccattaccaaaaaggttagaaacgaaaattgaaaaaactcgaaattttttatactttttcttaataactttttacattttggaaaagcttgacaaagtgcttacaatgaattacacttaattttatagaactgagaagtatttcaaattggcgttttgttgtttgtattttccagcattaacaaattaccgaaaatttccgtatcttttttcggcaagcgtcaaattcggaaagagcttgaagcgggactggatcccgcacgaaatccatccgaaatcccgcatttttaatttcgggattgcccgctggataccgaccgtcccgccaggcgcgtaaccagaaaaaaaaatttcgggaggggcaaccgtttttatgctcttcgggccagctaatttttctcaagagaaaattttcagcgccggagaaaaaaaacagggtaatagtgtactttgtaccagagatgtgccgagccagacaaaatccgattccgattaaatcgccgattccgattatggccaaaaatccgatacggttttaaaaccgattacgattatggcccaaaacccgattaattgcgattccgatttttttaaaataattttttcccaaaaattttattcataatcaaaatcataaatttaaagattgtgatgcaaaaataaaagtttgtccacattctcaggcaataaacgttttcagatctgtcacaatcaacccagcggtggagaatattcccagatatttgccatttttgctaaataacaaaaaacttgattatatcggggagaattaatccggcactgctttgtgagaaaaatttaatttcagtcattatgttaaaataaga

SEQ ID NO: 52392 - DNA, 133 bp, Heterodera glycines
aatcggaatcgcaattaatcgggttttgggccataatcgtaatcggttttaaaaccgtatcggatttttggccataatcggaatcggcgatttaatcggaatcggattttgtctggctcggcacatctctggt

SEQ ID NO: 52393 - DNA, 155 bp, Heterodera glycines
atgattgcacgtaattgccgaaaaaattcgagaccaatttccgaatgttgaccgactaattgcaaaacgaaagccgtctttgtcaaagcgccttaccgagtcaaaaaatttggaaatatatctcatatgcaatttaaaccaataaatttgaagaa

SEQ ID NO: 52394 - DNA, 709 bp, Heterodera glycines
atgaatccaacttttgtttttatatgtatttgtattagagatcgacattttgaaaaaagcctggacctggacctggattccatgttggacttggacctggatttcctggacaaaaatccaggaaaatccaggtccaggaaaaatccaggctcctcgagacctggatccaggcctggacctggatttttttaaactcattttaaaaatcaaaaaagtgtttgaaaaattcaattaattgcttgggaacatctaaaaatatctaatttacaataataatttgtttttaaatatatttaatcattttttgaaaacttgaaaaaatatcggtcacttgaaataataaattctaaaattttgtccaggaaaatccaggttttttcctgttttgcctggacctggacctggattttttttcacatttgacctggacctggatttcctggacaaaaatccaggaaaaatccaggttgccgaaaaatgacctggacctggatccaggaaaaatccaggcctggatccaggtccaggccgatctctagtatttatattaaaaaatcaaaaaaaaattcttggctttttaatgcgatttttccataaagaaggtttactctatagcataaaaatttttgaaaagatttttacttgtttgtagatgtaacagatgcaaaagctcacggacaaattccactgaaaataatttaaaatatta

SEQ ID NO: 52395 - DNA, 343 bp, Heterodera glycines
atgaatccaacttttgtttttatatgtatttgtattagagatcgacattttgaaaagcctggacctggacctggacctggattccatgttggacctggacctggatttcctggacaaaaatccaggaaaatccaggtccaggaaaaatccaggctcctcgagacctggatccaggcctggacctggatttttttaaactcattttaaaaatcaaaaaagtgtttgaaaaattcaattaattgcttgggaacatctaaaaatatctaatttacaataataatttgtttttaaatatatttaatcattttttgaaaacttgaaaaaatatcggtcacttgaaata

SEQ ID NO: 52396 - DNA, 1568 bp, Heterodera glycines
atgacctggacctggatccaggaaaaatccaggcctggatccaggtccaggtcgaactctaatttgtatagtttacactccgccgatggacaattaaatcctccccatttttgctcactgatcaattgctgctgcagatcaattagcgaaaagcaataaatattaaattatatttattaatttaattcaacttcttccgctgattaatgtccaagcactttcacattcattaattatgtgcaaaaaagaaacattgcaaattaagcacatttcaagcgtttccgtggtaaagcagaaaaataaataaatttttcgagaggatcgcaaaaggataaataaaactacgaacaaaaaaaataaaattgtcattttagccaaaaagggtgtgaataagttacaaacgaaaataatcatcaattacttaattaatcagatcttttttcataatagcctaaacgttgagattttatatattttagcttcgttagactcgctgacccacaaaatgtccaggccacgaaatgtccaagtctcgaatttgagttttttattattcggatgggcctaaggttaggcaacgggtaatataaaggttatattcgtattcagcgaccccgaaaaccctaaaaatcctaaattagactcattttgtttttataaattttgaaaaattttggacatttcgtgggtttttactcttttggacatttcgtggcttggacactttgtgggggcgccgttagactttgtgctttcgaatgctaccaaaaagataggggttgttcaaacatgaacaaagttattgtataaagtcaattgattggactcataagtgcactagagccgaaattttaatcatatgaactcgtggtttttgataattttcttcactttttaaaattttgtttatatatatattcagcgaaaaacatgttttctttttcttttaaagatttttcgaaaatttttaaatttaaatttgctgctcgtgtgtttttcgggtccactgcgtttcggcgctggcgtttcggcgccagcatgtttttggctataacttttttctatctaatccaaatccaacattgttgatataattcgaaagcttaacatgtttagaagctttttctaagcgattgcttcgcgattagacaattaccaaaaaagttatacatgaaaatttcgaaaagtcgaaatttttgaagttttttcttaataaaattttttacaggcttgaaaatctatccgctttttgtaaggctaatagagcatgataagagctttcgaatgataccaagattgttggatttggatcagatagaaaaaagttatagccaaaaacgagctggcgccgaaacgccagcgccgaaacgcgtgggtccccctatccattctctctctctctcatttctctccctctctcacttcatgtctcagtcaaattagtgatatataccttatgctaattatggttatatttaattacacttaattgaacctcacattttggtgttcatttatttgcgctccatttgtgccaaaataatataaaattgatgaaaacaaaagga

SEQ ID NO: 52397 - DNA, 157 bp, Heterodera glycines
atgattgcacgtaattgccgaaaaaattcgagaccaatttccgaatgttgaccgactaattgcaaaacgaaagccgtctttgtcaaagcgccttaccgagtcaaaaaattttggaaatgtatctcatatgcaatttcaaccaataaatttgaaagaa

SEQ ID NO: 52398 - DNA, 1545 bp, Heterodera glycines
atggattttgtgaaaacactacaaaacattgtgtctgttgatcaaagattgaagcttcaagagtttgaacaacgccaaaattcattttggaaagaaaaaaatatagcattttcggaattgcttttctcattggcaatccgtttgtgtgtacaaattgaacaacaaaatgaccaaattattggtaattatttaaaggcatttacatttgcttacagaactggttttaaaatccataggtaaaaaaaactacaaaaatagtactgtaggatcagaaatttcctttgatatattcaaaaagaacaaaaaatactgtagaataaaaaaatttccaataatcctgtgtaccaggaatggaattccgaggcaccaaaaaatttcggaagtcgaaattccgaccccaaaaatgttggaagtcggaactcggaattccgtgccatccctgctgtgtactggacactcaaaattgcatttaggtaattaaaactacttacagaagttaacaaattcaaaattggaatttctatttccaaaattaatttctaaatatgtttaacccttggaataagatttggtaaattattggcgttggaacatccccgggggtgtttctgattaccgcaaattttaaattattattttaggtcttttaacatgaaaatcaacatttcaaatgatttggtcgaaatcaatatgccaacttggaaattgccatataatgtgtacttggaaaataaaaatgagctgcaaattgaaaatgccaggggtaaatgtgtccttataagcaaggacaattgtttaaaagccttaatttgtttaattaattaaaatatttattttttcaccaggaaattatgagtttttgctaattttgacgaagccggcttattcgcccacagtttatgaagtgataaaaatggtgcaaattcttgaccaaatggacagtgatggagaatatattttggaagaacttgattacttaaaaatttttaaccatgttttgaattttcttttaacaaacgaacgaatttcgaaaagcccaaatcaaattcgaaataaatttgcatttttggcatattttgttgaagatttattgcaagaaattgagacaactaattatttactaaataacgaagcgattaaaatgctaattaaacgttttcgtgaaaagcaacggcaattgtgcgccaaatcaacgtaagattcgaattatataatagtttttaaaatttctaatttatattttataagtattttttattttacgtaaaataattaaaaattttaataaaattaattagtttatttgtaaatttttcaggttttattgctcattaaacccaaactttgttttaatttatgaaaacaaaaaagatgcatacatgaaatattttggtgagaattacgtgaattttgtcaaagcaatcaaaatcgattttaattcggacaaaggttgttgaattaatttaatgatgttgaaattaaaacattaatatacatgcaattttaaatacattaaaacttgaacatcaaagaattttgaataaa

SEQ ID NO: 52399 - DNA, 743 bp, Heterodera glycines
attttgagccatcacttccaccaccaacagcacaacaacaacaaccatcagtgttcaccgccgccactgcagcaacagcaaaaactgaccaccaccaccaccagcagcaacaacagcttcaacacttggacatactcttgcagcagcagcatattgggacggcacgcggtggcggtgggacgccggcaatgcgcggcggtgtcggcggagcagtacaaccatcaccaccccaccagcaacagcagcagtacatgcagcaacaacagttgttgctgatgcgagcagcggctgcggaacagcaggcggtgggtgattgttttggcgatgatattggggttttgaaaaatttaaaaaaaaatatttctttttggaacagcttattttcccgccgtcccccctcccatccagaagatttttttttgggtgtataaatcgaaatttttgtgtttgccgtcattaaggggtaaaaaaaattaccaaaaaaaaatatatttatttttcggtttgcgagtcgtcaaattgtagggggggggaaacgggtggggaccttgaggtgtttggtttttggtcatcaaatgggttaaaattgtgtgcacagatgctgcaacaacaacaacaacagcggaaacacgagcaacaaaaaatggcaccgcctctgacgactgtttcggctgccgcggtggcactaacgccggcggcgctggccattgacgacttccgactgattgcggtgcttggccgag

SEQ ID NO: 52400 - DNA, 752 bp, Heterodera glycines
atggcttcgagcttctcaatttctgtgtttatttccatgattgggctttgctgtttatttaatgaaagcattggaggagatgaatatgagtattataatgggctaagcgaaattcataacgtgcaaccgtattcggactactatcctacaagttatggtaataaacagaccagctattccagattcctagctttttcgaaccggaattttggattacatttttttatataaaaatatccgagttttcattcattaaaaaatttgccaaattttaagtaattgaagcttaaaatatgtttttttgagaatagaaaacttaaaaattcagggttttggactcgaaccccccagataaagtcagtaaatttatattattttaattaagtgtaatagtatcagctaagataaaaggatgactgtggaataacaggaaatataaattaaaatattatggttacatcttcatttttgttttgctctttcagatcacaggaattgggatcattcgagtgagatagcttatggtcaattgccgcctgctgctcttggtcaatcaaacggtatgacatgtttttgtttagaatattaacaattttataccctgactaattaaataacgaacttttttatatttaataggtttcattaaatatgaaggaaacaggaaattggaaaataagatgattacttagcattagtacactttagtattcttgaattttcaattaattgttttaatttttagcattaaa

SEQ ID NO: 52401 - DNA, 318 bp, Heterodera glycines
atgaataataatataatagcagttgctttcgtcatgaatgtaaattaattttgtaaataatcgatttttatttatacgtcaaattatttttatttctgctttatttacgtcatagctaccccattgttaacgcttataatattataaaaaataggaaataaattttggaattttgcaggctaatagagaaaacttttggttagcgaatgataccaagattgttaaattggctgacaaaggaaaaggttatatatagtccaaaaagttgattggacccaaagttcggggctcaactgaagaaaaccgatttcggctaaa

SEQ ID NO: 52402 - DNA, 360 bp, Heterodera glycines
atgttgctgctgctctgccggttgctggtgctgttgctctgctggttgctgctgctggtggtggtgttggtggtgacgaagaccaaaatgcaaccgcccggtgttggatatttcatgaagaacagcgctatcggagagtccttcctcctcaccaccactttcaactggctgtaaatattgatttaattaatatagttttgttttgaaatttcattattttcagttcaaactcacaattccctccaagttcatgtcggagtggtcttcagacattgaattggccaaaatttggttgagatcgatctgcaaggcggccatcgaaatcggaaagcaaatttgaattgagtaaatgctgtaaaa

SEQ ID NO: 52403 - DNA, 159 bp, Heterodera glycines
atgaaaggaccatttgattggtacattgtatcaaaaatgcaaaaaccgataatcgtcaatataattgctctcgctaatctcggtaccggaattaaactaaactctctgacgatcaccgaatgcgaatttaagtataaccctagaaaattcaatgccgcg

SEQ ID NO: 52404 - DNA, 252 bp, Heterodera glycines
atgtcctcctccacaattgctcccatttcttccgccgatggcaccgctgggagtgccgccgccgtcgccagcgctgggccctcctccgtcgagccgatgccgccggtggagcagctgatggagggcattgaggagaagtgcccgccctcgttggaccagcgactgaacgccatggacgaggtggacatgcgcatcgacgacctgctcaccgtggtggccgaagtgatggccggtctggacaaggacaagccg

SEQ ID NO: 52405 - DNA, 430 bp, Heterodera glycines
  unsure (1)..(430): unsure at all n locations
gaggtggcactgatggacgagtattggtcatggacccggagcgggacgaacgcaacgatatgatgtgagaaggtcgggggggggggggcggcacaaaagccaattccaatttgctctctctgttgttcatccttttcttgtgngctgatcacccatttgggtgttattttttctgatcacttctcccaattcctccgcacagtttgacacgtccaaagcgtcgctactacgaccgggtggaggacttgccgcagaatgttgttgcccggtggcgcaaggagcgcgaacagttccaaccaccgaccgacccatatgctggaaaagaggacgaagaatgagcacggagcggataggatgatgattaatgatcatgaagatggtgttgaacaacatataattaatgaatgcaaatgataaaaataaatatgcc

SEQ ID NO: 52406 - DNA, 854 bp, Heterodera glycines
atgagtgctcactcacatgttaaggagcgcctctttcccgcggctgcccagccggcacccgccattgtacagccggctgccgccgccgttgtccctccggcacccgttgttgttctaccggctgccgccgaagccccaccggcagacgtggagattgagctggacattgacggcgaacaattgacaaacttcccggcacaacaacacccgcaacaattgttcccggcacaacaacacccgcaacaattgttcccggcacaacaacaacaaccgcagcaattgttcccggcacaacatcaacaacaactgctgctgccgcctcggccgatgatttcgcagattgtcgacaatgccgttagcgtactccagatgcattttcacaacatgtctcctctgcggcccgcttttccaccatttttcatcaactcgccgtttcctcggcttcagggcgccttggaactcccttctcttcaattcggccagcagcacgcatttgcgccccctccggcaccggcactccaaattgtcccgctcgatgatgccccggcgcctcaaccgttgtgcgatgttttgcaaacggtagcctaaacccacttttacctataaatgtaaacccccccccaataagacgccaacgtgttcacgttgcattcctagagaatgtgtacgcgccgcgtacaaactgctttcaccacaacaaattcatgcagcggaggcagttctgtttggagacagcaggccgggaaccgcgttcagctcggtgtcctcctgctcttccgcttcttcatccaccacttcctcttccgcgtcctctgttccgaagcacaccgaacgagacaaaagaaagcgcctaa

SEQ ID NO: 52407 - DNA, 375 bp, Heterodera glycines
atggctacctcatttttaatgagcttaatattttgtttattagtgccggcaccgtcaccgagacatggacttcgcgacatcgctgaagaggatgacggcagcgaggaattcgagatatcagccatcatgctgtacgaccactgcgcgtgtatgctctgtggacgtatcagattcttttatctgatcgactacgctacgccacacgtcgttacgaagtggggcgggtcctacttgaaggacgaaaatgtcctaacgcatgtaaaattcctgataaaatcataaattaataatacgcataatttctaggccggcttctgtctcggcagactgctcacctttgtgaacacctcgccacatggatggcagccggcttaa

SEQ ID NO: 52408 - DNA, 807 bp, Heterodera glycines
atgcagtggattaaattcaactgcacgctttgtccaattggacttcagtgtttctatccgcgcaagtacgcaaagcctgtgctttgtgcgcatcccagcgtccgtaacatcacggactttttgagcaccgggcagcttggcgaagctgcaacgacaacaacaacaacatttccgacaactgcggaaacggcggcggcgacagaatgcgcacctccgcccgcgcatttgaccgcgtggatcgcggtgtgcacagcgctggtggcgcttttggtgattgcggaggtctgttaattttgggaatttatccgctaaacccctattcctcaattaagcttgtgcgtgcaggattcaaagtgcgcaaatttttgaaggaccgcgccttcaaaaaggggatgctgcgccgacatcgccagcgtgagtttctcgctattacatttttagcaaattgtaattaacaatttgtacaggaatgagcgccgcaaggcgcaaccgccagccggcaagcgcaccgactccgctgattttgccggctatgttggccggcgtttctctgcgcccgacgggcgtcaatttgactgtggaccgggtgtgcaattttaattaaattaaaatctttatatattttaatttctcactcatcaaaattacaatttaaatttaaaggcagcggggcagcgccgcgcggatggtgcaattgaggagggcgaagagcccgtgtacgatgaggtgccgcttgacagcgacatcgtggtcgagatgcgcgacgaagaaaatggggaggaggaggacgaagacagtgatttttaa

SEQ ID NO: 52409 - DNA, 345 bp, Heterodera glycines
ttggccaggatccaatacattcacagcaaggatttcatccatcgcgacataaagccaggttttctttttttttcatgttacattattcggccttgtaaaaaagcactcttttagacaattttctgatgggtctcggcaagcggggcaatcttgtctacgtaagactactgttggcacttttagacgtaaaaaacgtaaatattggtccatttttgcagattattgactttggactggccaaacggtatcgtgaccagcggaccaagcagcacattccatacagggaccacaaaaatttgacgggtacagcgcgttatgcgtccatcaacacacatttgggtgttg

SEQ ID NO: 52410 - DNA, 1343 bp, Heterodera glycines
atgatgttttggaggaatgaattgtgtgctgtaaatccgcatatttattggcgtctcataaatgaatggccaagcgacgccatcctccgcccatcatcgccgggggggaagaagactaagaagaagaagggaagagatgactgtgagaagatgtgtgaattgcaacagatcttccgattaacaaaggaaaacagcgccggggggaagagaggaggagagaaaatgcattgctaacgttaagcgagcaatgttctcagcagatgggccaaagcgatagtgctgactgcgagcgtactttgttcatcaacatatccggcaaaattccccctttttttgagtactgtagtcccccttttttttgtatactgtatatggtttaaaattaattttctatgtatttttttttctttaatatatcttttatcaatcatctctttgtcttcccgaaggacctactgtatttttttttatatttgtatttcattttttttttgcttttatttcacatttaatctctttttttttgactgactaattttgatttttttcgatttttctctttttcttcccgaagggtatctctcgtttttcatccaaaagggcattcctaattcataatttatttttctacttatttatcttcctactgggcattttcaaattttcagattttcaacctaatgggcatcctgaattttctttttcatgtatttgtcttcccgaagggtatccaaaattttcacttattttcatcctaatgggcatttaatcatccaaaagggcatcccggggcattcttctattattttttcatcccgaagggcattcaaaatttcacattttcatcctaatgggcatttactcatccaaaagggcatcccgaagggcattccgaaagtcatttttttctatttatcatcccgaagggcatcccggagggtattcatagactgtcggggcattctctttttttttttactctttttattttctcctttttaccgcctccggaggactttctttttattgccgaagcactcactaatggccatcatttttccatgcttttcccttactaacttttcctatgggttgtccctcagccgcccaggccaaatgccaaaccatccggtgctaccagtaacacacatgccagtggaacgcgctgaattaggccttgggactcccaacccttacaaatccaaccatttttatgagggggtcctggggtgatcaatcccacttccctccccatctcataccaattcaaattccaatctgtaatggctttatttcaggaagagtatgcaaaactattacaaatagaaatcgcaacaaataaa

SEQ ID NO: 52411 - DNA, 562 bp, Heterodera glycines
atggtaaatacagtaccttttcttcgattaaatcaaatctgtgacaatcaaactaaaaattttttttctctctcttttctgtctgattaattaactgatcaaaaagtcattttgtatcaatgacatgataattttttttcatatcggtttatattgttgtttttatatttttggcgtatttctaataataatttaaagtttgttggcatgaccttaaatactgttttcttccaattttttttaatgggatcattgatcattggcatttattacttaaaaattaattgcttaaacacttaaaattgtaattcattcagacaaccggatcggttatactgtattacaattaacattgtaactcattcaggttttggcattgtgttttgctttggaatttgtcgtcgtcaaggacttgagcagcgtttggattttggatttggagtttgacgcaacagcctttgaacactttgatcttctgtggccaagggttggtcaaatcactgattattgacttaattattcaaattattcaaaataataatacaagacaagactaaacaaa

SEQ ID NO: 52412 - DNA, 1632 bp, Heterodera glycines
atggattataatgatttaaatgtttgcgacaagaaactcatggatgggaagatcctcacgaaccaagcaaaattaagtgatgtagggaaagtccatgatgaagtaatacttttagaagatggggtgaaccgaaatttgagaacgattaaccgaaaagtaacaaatgtttcaaatcgagtagttgagattgctagtgatgtaaatgtaggttttaatacagtagcgaaacgggtcgacactttaggggaaatagtcacagaattagacgggaaatttagtacatggaaaaatgagatagatacgagagaacaattagagtttgatgagatgaacaaaacccaagaagcccatgggactgtacctttcccttttagaagacctccagggtctcctagactgaacattccagcaactcctcctgctaatttggcactgattcttcaaatccaagcaccaaataggggtaatgtgaatgcactcactgaagtaggcacttcgggaccacaaccagggctatttaatggtgaaattgcctcggcatttgatgaatgggaaattaaatttagggattatattgatgtttttggtacaaattggaatgaatcagagaaattgaatcgtcttaagctacatttgggaacccaaacacgaaacatttttgaaaatttgcttcaaaatgaaaggaataccctcgccaatgcattgaaaaatatcagagcaaaattggacagtcctcattttcgggaattagcctacagaaaattagcggcatgttatcaaaaggagggagagtcagtaagtgacttcattaagcgcttagttcctcttgtcaacacaacttcagctcaaattccacctgaagcgagagaagagatgatgtgtagatgtctcatagaaaaagtaagacccgaatttcagcgttctttacagcttgtaggaccacttattgggagaaaggactttcagaaactgactgcatacattcaagagttagaagtctcaattgaaagagatgtgagaaatgagagcttcggcattcacgcacttaatacaaatcctagtcaagttccacaaggcaaatttaacacatggggaccttcgaaccctaacaatattcaacttgggcacaaaacatttagaaatgaaaatcgtgatcagtcagataggagacccaatcagttttcacagaataatagatacaatcagcaaagaagggattggggcccacaaaatgatagaagatggaataacagacccgtctgtcattactgtaagaggaccggacacgtacaatacaattgcaggattagacagaatgactttaatgggcaatcggacaatcgtaatcagacacgttggcaacatcggccacaaaattcaaatagggacaattggtccacaaatgagtcaaaacaattaaaagatatggtagaagacttagcagttcaggtgcatgaaatgaaaatgaacaacaattacgcttcggcgagacaacagaacattaaagcattacaaatgattcatacaaatgaagaaatacagaaaattgaaccaagaaaaattttgaacccaaaagtatttcaagttgggagaataagcaagggaaatccaaaacattttcaagcattttaa

SEQ ID NO: 52413 - DNA, 1786 bp, Heterodera glycines
  unsure (1)..(1786): unsure at all n locations
atggaagagaagtcagaaccagagaattttgatgtgtctttggatgaatgcagacaaatgatcaagcacaaaagttgcagcttcggcaatttaaaagggatcacaaatttttggcaaactgaaaataaaatagatttaactcccaggttttggctgttagggtcatttggatggaagaatgtctcaagtgaaaactgttttcttttagaaacacgaattgactcgcactttggggctaattcaattgtgactccattgagattgagcgaaactcatgactgtccatacagtaaaggttactgtattttgtctgacaaaacagttttaatttggcaaatagacactgaaaggaagtgtaattttattccaattggaaataaaaatggaaaaatgatggacaaaatttggttatctgatgatggtgagctgggtctatctttcgggaatcaaacgaatttaattgatgtgggcaattcttctcagttagcttctcaattgacttatttggctcaatcattaactcaaccatgagttttgcattttctcaatcacttagacattttgtgagttcattgaggagaatagaagatgggttgaagcctcattcttttcaaatccaacggatttggctagatttactttctctaatccattcatttatgctaaaagagcagcccaaacacttttaaaaatttggccatgcgttcctttggaccaaaaagattatgaatttagaccaaccaaacttcaaaatcaatgtttcgaattcataccaattaatttgaagacgcagggtagggaacattttgctttcattgacccaaagtcaatgataatctctccatcatcaagaaaaggttcctgtgaggaatttagaaaaattataattcaaattgaaggccaaattttagaaattgaccaaatagaaggaaaaattacttcggtaagcccaaataaactgattcatcatgaaataaaatttgggctaaacaatttgcttcctcaaatagaagcacatgcttttcacaaattggttctactaaatctgacagacataaaagatcatgcttttgtgagcaatatggtaaaattgagtcaaatgacttatcagattcatgaaaaggacaccaaaatcacagctacaatttctcaagaatgggaagaggttgaaagccaaatgatcaaagcagtgattggtgattacagaaaaatgtggttaataattatgtctctaattattaccattctgtcaattgacttagcgataagattgacaattggtttaagtgaaatttatgcagggaatgggcgcttaggcaatttattatttggtacaacaattcagaaagctgggaaaagagtaagaaaattgagggaaactaaaattcaagaagaaagagaaatctatgaagaaccaattaatcaaattagttggcctccaagaattagaagagcgggaaattcacttagaaaatctttcaccagaccttttaaaagaaataggcatggaccaaatccaacacaaatgagcactcattttgaattaaattctttgatgggacagcttgggtcgttaaataataatacaatgacagggaccacttttgtctctcttaataatttccaaatgaaatgcttagtggacacaggctcaagcacctcagttgcaccaaaagcgttagctgattacttaggtattaaaacatttanatcagaagcacatttaatgagtgcttccggtcatccagtacatgtcaaagaagctgctcgtgtgactttaaaatag

SEQ ID NO: 52414 - DNA, 2216 bp, Heterodera glycines
atgagttttgcattctctcaatcacttaggacatttgtgagttcattgaggagaatagaagatgggttgaagcctcattcttttcaaatccaacggatttggctaggtttactttttctaatccattcatttatgctaaaagagcagcccaaacgctcttgaaaatttggccatgcgttcctttggaccaaaatgattatgaatttaggccaaccaaacttcaaaatcaatgttttgaattcataccaattaatttgaagacactgaatagggaacattttgcttttattgacccaacgtcaatgatagtctctccctcgtcaagaaaaggtacctgtgaggaatttagaaaaattataattcaaattgaaggccaaattttagaaattgaccaaatagaaggaaaaattacttcggtaagcccaaataaattaaatcatcacgaagtaaaatttgggttcaacaatttgcttcctcaaatagaagcacatgcttttcacaaattagttgtattaaatctaacagacataaaagatcatgcttttgtgagcaacatggtcaaattgagtcaaatgacttatcagattcatgaaaaggacacaaaaatcacaacttcaatttctcaggaatgggaagaggttgaaagccaaatggtcaaagcagttattggtgattacagaaaaatatggttaataattatgtctctaattctcaccattttgtcaattgacttggcgataagattgacaattggtttaagtgaaatttatgcagggaatgggcgcttaggcaatttattatttggtacaacaattcagaaagctgggaaaagagtaagaaaattgagggaaactaaaattcagcaagaaggagaaatctatgaagaaccaattaatcaaattagttggcctccaagaattagaagagcgggaaattcacttagaaaatctttcaccagaccttttaaaagaaataggcatggaccaaatccaacacaaatgagcactcattttgaattaaattctttgatgggacagcttgggtctttaaataataatacaatgacagggaccactctcgtctctcttaataatttccaaatgaaatgcttagtggacacaggctcaagcacctcagttgcaccaaaagcgttagctgattacttaggtattagaacatttaaatctgaggcacatttaatgagtgcttccggtcatccagtgcatgtcaaagaagctgctcgtgttaccttaaaaataggaaatgaatatgtggacataattattcgtctttttgatgatgaactttcatggacaatgaaagattataattttattttgggatgtgatgctcttgcttcactgccgcctattacttttgactttcaaaataaatgtgtaattattacaaatcccacctcaactgtaaaaagaatttttaaaggaacatgcctcggcaattcaaatgaagtcttaaaaacggaaaatagcactatttttactgaaattgagaaagaggacagtgagtatgaattcaatgcattgatagaaaaagaaataaaaattgccattgtgacagcagcaaatttgccacttgcaaaattagtccaagaattgaatgatgtatttggttctgatgagatggaagaatcaggttcagttgcattcttctcgggttatgccaaagaaaagtacaaagaaatgttagaaaagttgaaaaggcatttgttgatttccaaaatttcgaacgaagaaataataagcaagtttgagacacaagacgatgtgaaggaaattgagacttattgtaagaatttcgaagttcgaccacgcttaacaaaagaacgaaaagtagcgaatttgtactcagaagttgcggatttgcggattgtcttcaccacagtgtcgatggcagaaaatctgattcacacagctttagacggcacaacagtcttaatctttgatgaagctactcaggggtcatgggtctgcttagcacatttagtagccagaatgccaaaattggagaaagtcttggtaactggtgaccaattgcagcttggtgttcatctgcagaaactcccgcctttgctacaatccggttttggtcttgaatcaatggttgatcagttgatcctgtctccgacagttgttcaaactcgtctaacgacttgttacagaatgcatccgacactggtgaaagcagttgcttcggca

SEQ ID NO: 52415 - DNA, 420 bp, Heterodera glycines
atgccaaaatcctcccaaaaaagatgtcgaatgtccccagttttggaagacaatgatgatatcggtattcggcttaatcgtcttgaaaagcttgtttcctccctcaacccgtcgatcaacgccacaattgttgagcggctggatcgcctagagctacttgtgcagaaattggttaatgacaacacaaaggagcgatccgccggggactcaatgtccttctccaactcctcacccagtgttctttggggtcaaccgccgcctcacatcggaatggtcacccaactggtcaacaatgccgtgttggactcggaggagattatcgcaaaatcgaagagagcagtgttggagaaagtaccagaacaaatcgatgccgttaaacttgtgcgtaaggtcgctaccgaatgtggactgatggacgag

SEQ ID NO: 52416 - DNA, 239 bp, Heterodera glycines
atggaaataaatgaccccaaaaaattccgagaaattgcaaaagaaataattaagcaataatgcatattttccccattgagaggtgtgatttgtttcatttatgtctattgtttttaatttgacacctattctgtgatttgacacttatttttgtgatttttgactgccatttatgttttatttttattctcactttttttctttttacaccactgttagagtgcatagcaccttgtggt

SEQ ID NO: 52417 - DNA, 253 bp, Heterodera glycines
cttatctccattgcatttgattgccacacaccatcacattttattccggtactttgtcgatggatctgcacccattttttggagggggacaactttgcgtcaccactgaattacatttgttggaatccaaattaaaaagtcataaagacatgtttcctgggtgacgagggtggacatacttttgggcaagaaaaagtccgacttgcatcttaaaaattgtttacggccacaatttgccgcaatggcacacatt

SEQ ID NO: 52418 - DNA, 168 bp, Heterodera glycines
atggtgctggaggggacggcggacgaagcgggcggaaacgccgcggaagaggaagaacagcgggaggacggagaagagatggacgaggaagaggaggaagcggaagagaaagtcatcatcccaacaaatggaagagatgaggaaagaaaaagagtgacagaaaagaaa

SEQ ID NO: 52419 - DNA, 367 bp, Heterodera glycines
gagggacagacacataaactgatcaatgggactcatttggccaaatgaagtttaatgagaaaccgactgatcagctggtgaatgctgtgccgggtgatcgttttcccactgtcttttgcgtctttcgctttcataaaatgccaattccctctccccttcccatttctcacatttctgtgctttctttgctgttctttctcatttcacttttttcgctcattcgtttccaatcattccttttttgactcaatgattgatcaaatgtcctttaaatcaatcgaaacattccttccaattttaaatttaaattgttccaattacaaatgaataatatccatctgaattttaaataaatacttaatattta

SEQ ID NO: 52420 - DNA, 1209 bp, Heterodera glycines
atggccaaaaaaagaagcggacgaatgaaaaggaagagaaagaagggaaaaaaggagcaaaatcagagggaagagaaagggggcggtaagaggagggcgagagggggaaaagggaagggacattcggcaaaattaattaatcagcactgataaaagggcgatctgaaaaggcaaaggcattgaaaaacgcaatgaaattggaatgaaaatgattttgattgttccaaattttggcattttttggtgcaagactcttggattggatgtgctttcaatcgccgcacaaattttacttttcttttccgcaatgcatgtgcttcgtcagtgtttatcagtgctgatcggtcagtcacctttcatcctccccccccccctctggtcatatccggatcactttcaccgtcattttcctttttcctctcgccgctccctttgttttccaatggaatgactcccggcattcccccccccctcgcgccggaatttaccacccaaaagggcgacccctcaagaataaactcgtaaaataaatattaagtatttatttaaaattcagatggatattattcatttgtaattggaacaatttaaatttaaaattggaaggaatgtttcgattgatttaaaggacatttgatcaatcattgagtcaaaaaaggaatgattggaaacgaatgagcgaaaaaagtgaaatgagaaagaacagcaaagaaagcacagaaatgtgagaaatgggaaggggagagggaattggcattttatgaaagcgaaagacgcaaaagacagtgggaaaacgatcacccggcacagcattcaccagctgatcagtcggtttctcattaaacttcatttggccaaatgagtcccattgatcagtttatgtgtctgtccctcctttcctttgatctttccccccccccctttttttggtttgtcgtctcttccaaacagtgaattcaaatgaagaaaaaaaataatggcaaggtattttgttcattttatagtccgtttcttccttcaaccaggtgcgtaatatagggtgtacaaagggttaggagaagtgtggaagttgtagtaggcacctttcgggtattttccgtattttgtaaccattgcatgaatagtaatgggatagggagagctcagttatcgccccaggacgactagattggattaagtttaagataagttatgctttattatttgcaa

SEQ ID NO: 52421 - DNA, 59 bp, Heterodera glycines
aacatttgccttctctagtctggctctaccaaacactcacacgatatttgaaatgctaa

SEQ ID NO: 52422 - DNA, 59 bp, Heterodera glycines
aacattttccttctctagtctggctctaccaaacactcacacgatatttgaaatgctaa

SEQ ID NO: 52423 - DNA, 59 bp, Heterodera glycines; identical to SEQ ID NO: 52421

SEQ ID NO: 52424 - DNA, 59 bp, Heterodera glycines; identical to SEQ ID NO: 52422

SEQ ID NO: 52425 - DNA, 59 bp, Heterodera glycines; identical to SEQ ID NO: 52421

SEQ ID NO: 52426 - DNA, 59 bp, Heterodera glycines; identical to SEQ ID NO: 52421

SEQ ID NO: 52427 - DNA, 522 bp, Heterodera glycines
cagagagtggccaaagaattggaagaattagcagggatttgtgagacaattgcagagacaaaagggaaaagggaaagtgcaaagacagaaaaggaagagaagaaaagggatgaaaagtcaacgaaagcgagaaaagtggaagaaacgcagtcaaatttgaaaatggtaaagcggacgacatttgaatggcaggaagtgaaaataattaagcccatttggatgcgaaggcattcggaactagagaaaagtgacgactccttcaccaataagatgccgccgaccgctggcgcattccaaattcaaaatttggcattttcatcagggacgatgaaaaatttgagggaggggaagaaaattggcagcagtgagactggcaagaaaaatggcctaatgagaatttggcgatttgataagtacagtgtgaaagtcgccggacaaatcatagtggaaagtgcgaaatggctcaaaacgtggattttcattaaaattccggataaaattcttttggattatcacatttaa

SEQ ID NO: 52428 - DNA, 349 bp, Heterodera glycines
atgaaccgacggtaaggaatttaaaaaaaaaaatttaaaaaattacaattttaatttttcccaatttttctcatatttcagttggatttgtactgatgtttggatggacattttcccatctttcgaccgtcctaaacttggtctccaaatggcattgctttctttccgttttgatgttttggtggacaaacattttggtggaaaaagcgaattgacaatttggcgaccaatcgtaattaacaagggcattggaccaaaagcaatgctattagtcgattggaagcctgtggcacttccggaccgtccactgcccaacaaaatccgctttaaagaactttggattctgtaa

SEQ ID NO: 52429 - DNA, 1464 bp, Heterodera glycines
atggcagcacctccgatcgccaacaccgccaagacggatcagcaacagcagcagcagacaacacacaccccacagcacttttatcatcaaaattatttcggaagacagatttctgcgcaagtgggtgacaacagcgtgacctcccaagcgccagcccttttcattccgatgactaagccaaacagcagcagtagcacgacgacagctccccaagttcaagctgtacagcaacagacgacgacgaagcaacctgaatttgttgtatttgagctgtttggacagcagaaacagcagctgaacagcagccacaggcaattgttcaatgttcatcaacagcagcaacaacagaaatttgccaccaaatggacgcccttctcgccattgatgtccctcaattcgcgcgaagcgccgtcgctgtccaacaacatcaagacagaaacgaatgtcgaagaatcatccgcagttgcaccaacttcatcaaatggcatttgctttgccactgtccatctttggcccaaccatccgtcactgggtaacaacaacagcagcagcagtaacattaacattgtcagcagacacagcaagacaccgcagcaacaacggacgaatcgtctgttgttcgataatccgatgttccgtcgtctgccgaattggcacttttttggcgatgatcgtcgacttgtgccaatccctcccctaattccgctgcttccggtgatgcctattgagcgaacattgctttacattgcgccaaatgagagcagttcacgtcagctgctgctgctagccatgttggacatgaagcgaaagaaggaaattgcgggaggaatgcccgccattggggacggtgaagcggactccgaaagtgcagaaacagcagctgtggctgaactgcttcaacaggatgacgaactgttgccggtggaacaggagtgcccgagcagtacatccggcgtggagtcgatgtcctcggcggaagaaagtggtagcgcgttgacagagcgtagctcgcgctccaccacgccgaccaacaaaggcggacggagcacgcccggggaacagcagacagagccgaaatatcagcagaacaatgctcatgcatatgagggtgatgaacggcaggatggcaacgaaatggaagagtatgacgaggaagacgagatgttgaggctgggtcagcagcacaaccacctcctccgccgtcagtcaccgatctcctccgccaccgaatcctgcacgtcaagtacgccgaactcgccgccaacatttgaccggcgcattgttcgcatgagtcgtggcacgagggatgcggtgcgacgactttcgagacgttttgaagaggacagagaggaggaggaagcggaagaagagagtggcaattgtgcagcggaggacgaaagtgatgagcatgaatttggtaaagcaaatgggaggaaggatgaagaaagtgtgtgtgcaaactga

SEQ ID NO: 52430 - DNA, 516 bp, Heterodera glycines
ggtatttgctgaacccattgaacggggctttgcaactgaacagagcgatccgctggtaatttggatagcgagaaagtcgcaggacaaaggcaatgaaagcggagaaaattcggagaatgggtaggttggcggacttctgttgtttgatgcatggtctttgttttgtgccggttttcagcgcgatttccatggctgatgagcttcttccgccgtacaatttcaccgccaacattctcagtcccggcaaagtgcgtctcgagtggagaacgcctccgctgccctcgccttcgtccgtccctttttacattgtgaatgtccgtcagctaagtgccaatacaggcgatcgcttccctccccaacaggtggacatttacttggcatttccttggcgtttgccgcatttccttggcatttcgtctaatcttcgttttttccttttcgcttcgcgtcgatggcactcattttttgctcggcaatttggtcgctggagaaaactttgagttcacaattcggacc

SEQ ID NO: 52431 - DNA, 893 bp, Heterodera glycines
atggtgattagaagaggtacaactgtgattagaagagggacaactgtgatcagaagaggtacaacggtgattaggagaggtacaacagtgattaggagaggtacaactgtgattagaagaggtacaacagtgattagaagaggtgcaaaattgttaaaagaggtaaaaaagtgattagatgaggtacaaccactgtcgaaaaggtacaataattgttggaatggtacaataatggttaaaaagggtacaatcatggttttaaaattaaataattaaggaaatcgtttattaaaaagtaagattaaatattgaatgtaattaataaattttaaaaaataaaataaattattccttttattaattaaaaagaaagtttgaaatgtacaaggattgaatattaattaaattgaaattaattttacaaattctaatttaaaaaatacaggagttctttaataaaagtaaataaattattattttaatttaaaacatttttcacaaaaaaacaatttaatttaaattaaaaaattttatttttattaagaaaaaaacactcttttaaatgaattaaaacattaaaaataacccaaaaatacatagaaaataatatacaccgcgcggattcgaacttcgcccccccccccaaaaaaaatgatgcctcagaatccccaatcacacagggattctaaggtcttaacgatgtcagaagtaaaatctgatcacgcattcgtgatcagcaacccaaataacgcctaaagacatcttttttgaaggtttttgatgaaaaaattttttcactcaaaaatcctggtcacccccttgtggtcccgaacaccaaaatcacttttatttttgtatctatttttaaaaatgtgataaaaaagtgaaataaa

SEQ ID NO: 52432 - DNA, 162 bp, Heterodera glycines
gaaggaaattcgaacgtgcacgcggtcgccgaaagtctcgcggttacaagaactgaggaattcctgtttcgctttgttgagtatattcccttgtcatgttacctttttgttatggaaatgaaatctttcttatccataatcaaagaaaaaaattgttgattt

SEQ ID NO: 52433 - DNA, 154 bp, Heterodera glycines
atgaatattgttgtggtcattaaaactgaaggaaatggtattataaagtctaattttcattaataaatcaattttagaaaagcattattataattttatttattataaaaatatattatttaaggtagcccataaatatattaatatcaataaa

SEQ ID NO: 52434 - DNA, 564 bp, Heterodera glycines
atgatagtatcttttttgacccagctaaaaacatacctgaggaaacatacaataagtgagtttattgagcaaaagttaaaaaaagtaattaaaacctaaagcaataaaatattaaatataaaaaataaaatattcagaaatctttattttttaaaaatagaaccaaggatgaaggcttggatatgaaacaaggtggatcaattggacggaattaactttccttaatcatacatttaaaaaatgattgactataatttttgggtattataattcctattttaaaactaataactattcgaatttttgtaaaaattctttctctaaagaaataatttgtaaattttatgtagctaagaattttttgatcaaataccgataaaaatgacaacctgaataatttttctttaatatattcctttttcatatatttttatttctttagtatccgtataccattgcaatgagccccactagtttgtgtccgcccattgtgttatttcttacaatttgtagaatttattacttatattaattattaacttaagttttaaccaaaaaaataaa

SEQ ID NO: 52435 - DNA, 1185 bp, Heterodera glycines
atgatggaacgcctccgaggcggtgtgccggaggcaacgacggcaaaatttgtgccaccgtcggcaccggcggcactacaacaacaacaacaacattttgctgacaacaacacccataataacaacggcacggtggtgttggcccagcaacagcaggtaacaaatgattttcggttatttaaatttttctttatctaattttactaaaaattaaattggattttgattttaatttatacattatttttaatttatattttgcagaaattaattttgcattttgcattttgaatttaaattttatttattttttaattcattttaatatttaaaatttttggaagtgcaaattgatgtgtaatttattttataattcaaatttttcaggtgcccctcaattttggaagtctttcaaatttgtcctcttcctcctcatcttcttcttccgctcctccatcatcatcagctccaccacaacaacaaattaagactgaattgatcaaaaaatcatcttccgaaaatgccacagccgacgaatgtgagggtgggtaaaatgccaagcattgattggcaagcctttgaaattttataaaaattttgataggcctacctaatattttgtaattcaaaaaaatcaacttttctgattccgctgcgggattggaattcaaaatttagcagatgggatctcccgcaaggactaattccaaaaaatccctattttcaaaaaaatgcgggattggggattgagatcccgcaaatcccgcgcggggtcccgtcccacatcgggctctaaatcaatcactaaatttagggaattttaaacaaaatattttagttgaaatacaataataatcatcagagatttacagtaattggaacgatgcgaaatttttccaattttttagcacaacaaacacaatttgtgccaacaccatcaacaacagctgatgagctgatcggccacgcgttggcacatctcgtggaacaaatggacaccgacggcaccgatgcgacggatgacggccacttccaggaaggtgagaattgccaaaaacagtgcgagggcgattcctcaatttccccagcagaaccctcctaattagtgtctaattaacggataaatcggaattgctaatgccgaagccttaaaattgccagattcattaatttgcagccacctaa

SEQ ID NO: 52436 - DNA, 297 bp, Heterodera glycines
atgcataaatcacttattctgactactgttcagaataaaagtatcgtagatgaagtgagaaaagaagtggacgaaatcacaggattagcaagataaaaatgcgaataaaataaaatcaggtttaaagtaaaactgcggtagacggcataaaataaaaatattttcacgtaattcatattttagaaaataggggtgggtgtattatttctcccgaaatccaggacaatttatcagaagctgaagctcaaaaaactcgatgtttccgaagctcgaagccgaagtttcgtccatccctga

SEQ ID NO: 52437 - DNA, 1151 bp, Heterodera glycines
atgggtatttgtctaagccttcaactatatattgtccatgaacaacagtgagtgaacattattattttttcatttgttaagcatatcgataatgatgataaatgcgggaattcaaaaaaatgcgactgtttttgatttataatactgaaaaaagggcgtgaatgaccttagtatttattagtaaaatttagcgaaaaaccaaaatttttaattttataggccatttttataaactcttttaaatctgatccttttttgatgggaagcttaaaataaaccgtctttatagcgcgtgcaatttaaaactgtccaaaggcacattagtgttcttacatggtgcgaaaaagacaaaaaaaagggaagcgaacaattaaaaatatagaagaataccgtaataaatagaccaaagtttataattctatttaagtctagttttttttcttttcgaacattgatttgaaatatttttttgttctaaatgattaaaaaattacaacacaaagcctcaaagatcaaacattatgagaggggtgtcaaaagccaattgcttataatctcatttattaaattttaatttgtactttcaatttatgaataaaagggtcatgtgtttgtttcaaaaatatacgattaatataaattcccattacagcaaattcatgggcattggtacggcaccatggattgcattcctccaaaattgagttgaacccgaacacagattaaaaatgcgacactgagaaaatatgacacaaattttgtttttttaataatagattgatttttgtttctatacagcgtcaggaaattggccaatccttagcaaaaaaaaaattttgtattgtgcctaacaaaggagaggtacccaagtgacgctggaacttccgaatgaaacttacagggtaggtagattaccccccccccactttgtattataaaattttttttatttttgctaaatgaagcttctggccgagatatgaagctttttctttttgatatattaatacctttacaaagaatgaagagccaatgtgagcgtcggtggcctagtggttatgccttccattctttttttcttcttctgaagttcaattcccccaccctgcaaataattgttttggttcttttccctatccaaaatattttta

SEQ ID NO: 52438 - DNA, 214 bp, Heterodera glycines
gtttgactaacttccgttcgttccgttggaatgtttaaattcgtccactttttctgctcattggccacttttcccctgctgatctctgccatttgtaagtcctttcgccccctttgccctttaaagtccaattttcccctaattagcttccaattgcttttacttgccacacattgtgctgaacggcggcacttatgacgagttcaatgcttct

SEQ ID NO: 52439 - DNA, 1348 bp, Heterodera glycines
atggtacaatacgaccctataaataaaccagtgaagaatattattacagaaaagttcaacattttttttaatttattaaggttttttggtaacaaaaccagggttgcctactgaaaattgagtgcaatttgtaaaaggttttcatccaatttttttttttcaaaaatgagcataaatcagcaaagtttctcaaaaaacagctataacggctgatcgaaaatagctgtgcgagctgaagcaaaaggggctaaaatgaaggaaagattgccccaaaacaacattcatccctcccgagtggtggatgtggtctagtggctaagacaacggatccacacgtaaggggccccgatcaaatccggccttccaccccaattttataatagcagcaaagcagaatttggagccctgattatgatgatgaacatggaaaggatttataaaactccaactgaaatcatttgaccaaatatttggataaaaatgggaagaaaaggaagaagaacatttgaatgaaaaaaagaaaatgattaaaaaatattgtaatataaaagagaaaattctgcaaaaacaagaaaatacggagcaaaaaatggagaaaaattgaaagaaaaattggaagaaaactggggtcaaagcaccattatatttataagtggattaaaaaatggaattaaatcaaaacgccaaaaagatacaaataaaaaattgaaattatacaaaaaaagataaaaataaaaaggcataaaattaaaaattattaagaaaaattaaattttaggggtaaatattgatgattttttggcgttgtctgccccccctttcattgacggcatttctttcgcatgtccaactttttgtcgaccgttccaaagttgtggagatggcgtcgctgcactcgcatttcgtccaatctttggctgtcgtggactttgcgcgacgactcaagtgaatttgctgccgatgggcattaactgttagcaattgaattgggttcattgacagctctgaacagcgttgttcggtccgtgatcagctgatgttctgtttggtgccaattgtgcctcaaatggttgaaattgccggtcctttttttgcatttatttttgttaatttgcttctccaattcctttcagactgttctcgtcgtcaaattggcatgctgatgtgcgaagttctgttctcccttttcgatttcccttctccgcctcaatttgactacgccgagaccgacccaatgctaagagagtttcgagcggcgcttcaaaatcatccatatcaaaatagcacagaatctaatgatgaagatgtgctcctagagaataccttctgtaacgtattgaccatttaa

SEQ ID NO: 52440 - DNA, 857 bp, Heterodera glycines
atgacatttaacaaagcaattgccctgactgtttacaaccttttgccaccggtatggagttttagggcccttttatagaagtttgtgccattctttgaggcgaggtactccctcactggctactcgatccatgttgagcctccagaaatgcagaggaagaaaaaatgaaaaatacgactagcccgtataattgaatttatatttctgattattatttttaacgcctccttccctttttgaaggcaaaaccaaaattgacgtaaaaatcaaacttaaaaaatttctgttgggaaaaaaccaatttttcatttctttgttttttttaaagtttccgaatcgtcattttttgctcttgtttcgtttttaatgaaagttttccaaaatgaaaatttaaattttaaaacttgaaaacgaaaaagaaacaaaaattttttcttggacgaaaaagaaacacaaaaacaaaaagataccgttttcatacgaaaaaaacgaaaaacacgaaaatttcgcacaatttatcatttatttaatgtctttgttttgtaaatcatttctttaagtattttttgaattataatgttatttaaaatttttttaaatgaataaaaaattgcttcagcaaagctatttaaatcatggtttatacggcttgcttaaggccttaatattaaacataaatttaaaaagaattatttaaaaattagccattttttgttttaaatttttgcacaaatatattttttcatttatgggcagaaagtgcaaaaaaagggcatgatttccagcattctatctccgatcaaaaaaaaatcatacccatacgaaaatttcaatacaggtcttttttgcagtcaata

SEQ ID NO: 52441 - DNA, 554 bp, Heterodera glycines
gagaagggtcgtccgacatgataatggaagaaatacccttaggcaattgcctctgtttttggacctccaaaccggtgcacttatacggaaaacggacggaaaagtatttgcgtgtgaaatggcaaaagaacgtgaaaaggcaaaaaccacagagcaagatccgaacttggaattatgtttacaaaaacataaagatgttttttccacccatgattatgacctcggggaatgtttaattaaatgccctcccattttgacaaattcaaatgtgccagagcgggtcaaaccatatcccgtaccggaaaaatacgagaaagagctgaaattgcacattgggaaaatgctcgaagccggcgtaattaaagagagttgtacgccatgggcccacaacgttgtgttagttaaaaaatcgaatggccaattgcgcccatgcgtggattttagaccattaaataaaataacaattccggatccgtatcccattccacgaatggacaaaacaattttaagagtttccggacaaaaatattactcgacattggatttgttgtcgg

SEQ ID NO: 52442 - DNA, 1213 bp, Heterodera glycines
atgaatataattttgcatttgttaattttaaactctgccgttgatttgctcaattcgaataatttagaacaaacgaaaattttaattggtaagtaaataatgagcaactttcagttttttttaattattagtcaattaatttttagaactgatcaacacaggcaaatgcaccgaaaaaaccgagttcaaaaaaaatataataaaaaatttcatcgattcgaatttataaatatattcaggcaaattgaagaatttgttcttgaaaagggatgcgaaatattcaaaaatgaccaacaaaccgactacccaagcgaactcggccaaattaatgcaaattttgaaaaattatgcattcttaaaaatgaacgtaatgccaagaatgaaaatcttctcaaaattaaatccgtattcattgaaagctttgaattgaattttcagcaatttttggccaaattgaagaaagaagagggacaaattcaaaatttcttgtcagagaaaaatgacaataaaagaaaaattttaaaagcaattgtcaatttttttgatgaaatttcaaaaatattgacggaattttcatcaaagaatggtaaatttgctgaaaaagattatcgaatgctaagccaactaattgaaacgcttctcgacaaattatcaaccattaacaaaaatggttggaataatgtagagaaaaatagcaaaaatttatttaaacaattcgaaactccaaaaatttttgcaaaagcacatcaaaaaagacgcgttcgtcgtcgtgacaacgaaggcataatgccaattggtgtgattgaagtgttcttattgttgacaacgtattgtgcaatcactgtactgccactgatcacagcaattctgttgctgatcagactcttttttatgtttcggaatgaaaagatgaattaatgaagagaaaaattgaaattcgatttacactcatcaattgatatttatttgttagtgataatttgcaacaataattaaaaaatacatataatttttcaaaatgcgaacaatgacaaaaatcatctttacaatttatttatttaaatgcttaagtaattaaaatgatctccaattcattttgcaaaaaatggaatttgtcgtggtactcttacccaggaataatttttagagaatttaaacccattaatactttcataggataattttattattacatgcacgacttcttaataaa

SEQ ID NO: 52443 - DNA, 1308 bp, Heterodera glycines
  unsure (1)..(1308): unsure at all n locations
atggtctatggccagccgagtaatgccatagaattgtggaacaagtacaaagaccaaatgtacaatccgcaaggcattattactccggcacagcataaagcagcagagcttgaagccctagccgaccttgattggcggctgcacagctgctttaacttaagctgtgtgcattttggcctgccagacccgccaaactcaattgccaaaaatactgacgcggcaattgaagagtttttctttggcgatgatgatttgaatttgcctccagggcaaccaaatcttcgtccacagccaaaagcccctccgccacttaacagcgaccaacagaaggtctttgatgctgttttgttggcaatacagtcgaaccctagggatccgactgtcccccgccgtttcttcatatacggcgatggaggtacaggaaagacattcctgtttggccaaattattaggcgcttgcgaaaggccccatacacctacaaagtgcttgccacggcatccactgggtgtgcagccattttgctgccatatgggaaaacagcccattccacgtttcgtctgggtagagaagtgtcattagacaagctcccaagcattccgctggagagcttctttgcccgtcggattcgtgaggcccaactcatcatcattgatgagatcaccatgcttcacaacacggtgattgaggtcatcgaccgagtgtgcaaagagatggcaattcgccagcacaaggatctcctcttcggagggaaaacagtcattttcagcggtgacttcaaacagtcgctgccggtcgtgcctcatgaaggcttaaccgctcaggtgacagcctgttttcaaacatctccattgtttggtcaattcaccacgatgaaattgaccatcaaccagagattgggcaaaggtcagcaagcgtacttgcaaatgtgccgccaaattgggctcggagaaaccggagagcacttctggattcctcggcagttcctcgttaagagcaaggaagagctgatagactatgtctatcctaacttccaacaactccttggcaatgacaaggagctgctcaatcgtttgattctcgctccgcacattgacacgtgcgacgaagtcaacgacatcatgatggcgaatgtgccaagtcatatgcgggaatacttgtccacggataagccccttgacgaccgcccactggacatcgatgagatcgagtccgaagtggctgcgttgaaccngcgcacagactcgggcatgccccacacagtctccggcttaagtcggatgcgtcgtcgtcctcttatcataaagtga

SEQ ID NO: 52444 - DNA, 1232 bp, Heterodera glycines
atggttagtgctctatttcaaaggggatatattttttattaatgattatagattatttatttattttttctccttccatgctgtacggacgggcatttagcagaaattttactaattaaccacaaaatttattgtttattttttcggaattagagaatggcattaaacccaaatttgattacacgcggacttaagcattcttaaaagtctataatttaagccaagcggtccgccacttttgaattatgtgtgtaagtcaaatgggaacagtgaaagaaggcacatttcgtttcttaaccaatttgatttgcaaattgtgccgacaattccaaaagatgacgacagcatttattacgtggagacacaatgccataataagggaaatgaacatcaaacattcaaatcggtgacaagtggcagcattaaaattgttttgcacaaatttgcttgtaaatcgtacgacattatggcacgaaaagtgccgaaaaattggacccagcaaattgaattggtaatgtgatttatataaaattaaaaatttataaaaaaaaatagaggcaatcgcaagatttcttaattgcatttatatttttcgaaatttaattgactgatttttataattatgctaatttaataatttgttcttttgctttaaagtataaatatgcaattcgtcaaataaaagatgccaccgaattaaatgtcaatattgataatggatatgtgtacatttttgattatgaaacactggtccggacaaaccgcagatggagaaacgctgggccttcatcggtaatctttaatgtttattttaataaaatttcgttctgctatccattaacgaaagcggttttaataactcttaattgttctaatttggtaaccttgaaaagttggtatttgcgttaatttttctttatgatttttttttcgtttttgtaaaattttgcctattttaagaatgtcaatctttttgatttgaacgtggaagattatgttgcatcagattatgataaaatggaagaggaagacagaaaagaaacggaattaaataaagcaagaatggatgaaacggatgatgattgtttttactatttcaattaaatttgtatctttttcatgccttttctaaatgaataattttaggataaaatggtaaaaaaaatttaatctttggttaatatttttttttactaaaagcattggtcacattcacaaaaaaaaattgacaa

SEQ ID NO: 52445 - DNA, 83 bp, Heterodera glycines
agagcattttctgaaaaaatatttatgaaataaaaaaatcgatagtttcaagtgtccgtttggggtactcaaactaattatgg

SEQ ID NO: 52446 - DNA, 413 bp, Heterodera glycines
atggaaaactccaatcaggaaataaagacaaagcgaaacaagcagaagctggaacatgagggtgcactttatgttcttcaccaactcagtgacgatggacttcggaagtactggcgatgcgagtttttcgggcctaacgataaatgcaaaggtgtatgcaaaaataaaataaagactatttttcaaatttagggcgccttcacactgatattcatggtaatgtcctcaaaataattggaagccacacatgcgacatgagcgccgcacaagtggagtgtcagcgacgtgtgacccagctcaagcgacgtgcagttgagacgtgcgaagcgccggctactattcgtgcgcaagtattgcataacacagcaacccccgtgttggcagcttttccgaccaaagctgcgacaaaaaag

SEQ ID NO: 52447 - DNA, 4133 bp, Heterodera glycines
atggccaaccaaaacgcgacaattcaacaattgattgacacattgacgcaacagcaacaattggttcagcaattgctgacacatcaaacgcagaatttggctggacaagcaattgcgcccacaacaattccggcacttcccgacatcatggcttttgagcagaatgatgataaaagccgagtatcggaatggatctcgcgcttcaaatttgcacttgactgtgccgcgccgaatgccgccgacggaatcaaggttaaggcgctcatgaacaagcttagtgaagcagcgttcagtgagtacagccgttcggtgctgccgtcagcagtgactgattttaattttgatgcgacagtgcaaagaatggaaaagttatttgcgcgtccgcaatcggtcttcattgatcgatatgagtgcttgaaagcggtgagaagtgaaggcgaagattttcgcagcttcatcaaccgacaccgaaaattgctcgccgatttcaagttcagtgaactgaacaaagagcaattcaattgcctaatgctattaactgcattaaaatcgcacagcgattcggctcttcgtcaaaggattttggcgaagctgtcagcggacggaacaaacatcacttacgacggagttgtggaagacctgattaatttccaggcaacaattgtggaggcaaaagcaattgaagcaccgacaaattggaggaatgtgaatgccgtaaatcggccggtgaagcaaaacaacgcgccgaaaatgcaagttgccaaagtgccagagaatcggcaggcgaataagaattgctggcgttgtggagctaccgatcattggggcagcgagtgccgattcattggagcgaaatgccgaaagtgcaaattcacaggtcacattgaaaggcaatgtgaaagtgtgcagcaatggcgtttgaagaacaaaggcaagaggtttggcaacaaaagaattggccaattacaaatcggtatggtaaatccgaaaaatgacaccgattcgctgaagacgaaaattcggttcaacaaaaagccgattcaatttgcactagacactggatcggatgtgaacgtcattgatgttgactcacatgtggaggctgggagcccaccgatcgaaaagtgcactgaaattggaagagctttcgatggaacgccgattcgattcatcggaaaaggctttggcacatttgaatttggaggaattttgatcgagaatgaaccattttatgtggcaaagcgtggatcgcttaatttgttgagccgccaaacaatgggaaaatttggatttttggatggtattaagcagcggatcagcgaacatgggatcaattcatgcagagccaccaaccaatttgagaagcacatttcggaattgaggaaagaattcccgactgttttcgaagatgcacttggacattacatcaaagaaaaagcgcacctcgaattgaaaggaggagccgcgccaatttacagaaaggccagaccggtgccacatcactcaaaagacgtcatcgaacgtgaattggaccggctggagggcctcggaatcattcgaaaagtcgaacatttggattgggccgcaccaattttggtagtgaaaaaggcggatggaagtgcccgcctctgcatcgattattcaacggggttgaatgatgcattaatcgactaccagcacccgctcccaattccggaggacattttcgcgacgttaaatggaggacaattcttttcgcagattgacctcaaagacgcgtacttccaggtggaattggatgaggactcgaagaaattgtgcggactttcaacacacaaaggcaatttcgccatggaacgtttaccgttcggcgtaaaatcggcgccaagcatttttcagtctattatggacaaaatgctcgcaggcttaaattttgccacggcttatttggacgatattatcgtcgccagccgatcattctccgatcacatccagcatttgaaagatgtgttcaaccggctgcagtcatacggattccgtgtcaaaatgacgaagtgctcatttttccaggaggaaattaagtaccttggattcgtcatcgacaaaaacggacgcaggccggacgcatcaaagattaaggcaattactgaaatgcctgcgccaacgaatctttctacattgcggtcctttctgggaatggtaaaccattaccagcaatttgtgcaaaacatgcggttcgtcagaaaaccgctcgacgatttgctaaagaaggacgcagaatggatttgggccgaaaattgtcgtaaagcatttgataaattgaaggagattttgacttcaaatttgctgctgactcattacgacccgaatttggagatcatcgtttcggccgatgcatcagaacacgggatcggagcagttattgcacatcgttttcctgatggagcgatcaaggccatcgcacatgcatccaaatccctcaatgctgctgagaaaaattatgcccagattgagaaggaaggattggcattaatttttgcggtgcaaaaatttcataaaatgatttatggccgtaaatttgtccttcaaacggaccataaaccactcctggccatttttggaaacaaaaaggggatcaggcagtgcagcgccaatcgattaattcgttggtcgctgatactattggcctatgattttgaaatcgaatatttgaataccaaagattttggccacgcggatgccctttcaagattgatcgcgaaaggatccgacgacgaagatgagcgagtgatcgcttccgtcacagaagagtcggaaatggaagaccttctaaaattggccactaaaaatttgccgattaaatttcatgatttggttttggcaaccaaaaacgatgctttgctgaaaaaggtcgttcaatttgtgcaaaaaggctggccaaacgacaaagatttgagcaaagaagaggaaattgtccgattatttcaccgacggatggctgatttgtcaatcctcaaggattgtttgatgtatggcgaaagagtggtgatcccgaagattttccaaagcaaaattcttcacctctttcacaaaggccatccaggaatgaagagaatgaagcaattggcgcgtcagtatgtattttggccaaagatggaccaaaacatcgaacaatttgtgcaaaattgcgagccttgccaagctgcggcaaaggcgccggtcaaatcgaaccttcattcgtggccaaagtcaacagaaccctggcaaagaattcacatcgactacgccgggccattttatggaaaaatgttcctaattgtggtggattcgttctcaaagtatccagaagtatttgagatgaccacgtcttcggccacggcaacaattgacaaattgagatatttgttcacgcgccacggcattcctgaaacaattgtttcagacaatggaactcaattttcgagttcagaatttgccaaatttacagcagccaacggcatcacccatctcttttctgccccgtataatccgatgtcaaacggacaggcagaaagatttgtggacacatttaagcgggctttccgaaaattgaaaggggaaggaatgccgaatcaggagatcatcgaaacttttctgatcacctacaggacaactccgaacgattcgcttccaaattcggtgtccccagctgaaatgctgcttggacgaaagcccaggactacatttgatttgttgaagccgccgccatttcgaccactgatcagggatttggcgatggaagagagattcaacaaacgatttggcaccaaatcacggaaatttgaaattggtgataagatctttgcgaggcatcgatcttctgaagattggagacccggagtcatcaagggatgctctggcgtcatatttgaagtgaaattcatggacggatcaaagtcgcgattccatgcgaatcagctgcgaaaccgacaaaatatgaacaatggcgatgaagcattggcgatcttgaatgatgcctttgcattgccattgccacctgcacaggctaatgaggtgccagcagcagacccgccggcagatgaccacgaaggcaatggactcgaagaccaaggcattgtgcgatcgccactgatcgcggaccgaaatcagcgccg

SEQ ID NO: 52448 - DNA, 100 bp, Heterodera glycines
ttgtctcctccgccgtcctccgacatatttatttgttattttaatttgtcttcaataaatatttatttgttcgtccattcgacatttcggggaccgaaca

SEQ ID NO: 52449 - DNA, 63 bp, Heterodera glycines
tttgggccccggggtcatttgggccccaacccaaaaattgaaaaatgtgcttttttaaaaatt

SEQ ID NO: 52450 - DNA, 1961 bp, Heterodera glycines
acttatccaagaactgcaagcgaccaaatctcgtttgcaaactgaagcaagtgaccaagaaaggcagagtgaggtgaaaacatttctaatgtacaataatgatcaatacaaaaaagattaattaccataaatttaaaaaatgtttccattttaggaattggaaagccaattaaatcaaatgggcaaacgtaaggcgcaggcattggcacagcttgaagacgcgaagagaattctggaggaggagcaccaagaacgaatggaggtccgtccggtgtaaaaacataatatgcaccgttgggaaaaatttttaaaattttaattaatatttttttaggttttaacaatgttttcaatatttatttagatttttaatttccaactggagcattttgggtccacataattggatatttttggtcaaatatgttaaaaatttctccaaatttttaaatttttgccctaattttgcttctaaacgcctgtggcatttttggaaaattcttgtttaaaaattcccgaacatttttataaattaaaataatcattttttctttataggtcagtgccaatgtgaaagcgttggagcatgacattgagcaaatccgtgaagcaattgacgaggaagtgcagggcaaagaggaactgctcaagcagctcagcaaagccaaggcggaggcggcacaatggcgaggcaaattcgaaggtgccgaccgaaactattaattaactaattaataatatttatgattaattaatctgttccatgtgtcaaacttaattttgacctcccgccccacgctttaagcaatttataattttcgtaagcaaattttaattaaaattgaagcattttcccctctcggcgccagtccggtacgcctgactacaaaattccctggaatttttcataatttgacctaaaagtggttaacttctggcgaaaaactgctaaaaatattactttcggaatcctaaaaaatatttaggggtagtggagcaaaaaaaaaaagtctttggcttccagcaatcctaaattttctctgcctttcggcgccgccggttcaattctcgaattaattaactaattaaaacccattgaattttcaaaatttgacccttcaaaatttctcaaattaatcattttttgcgcgaaattacaaaatgaaaaaaaacattttttataagaagcttaggtatgtgaaaaattacatattcctctaggagaaggccttgttgctgttgatgaattggaagaagaacgccgtcgtcggatgaaccgaaagttggaaatcagtgaccaccttgctgaactgaactccaaaattgcagctgtcgagaaaacaaattcaaaagtgaattcattaaaaaataaaataaattatttagataataaatctttatattaattcattgttgtaataatcaattaaaattttttattaatcaattacatgctaattaaacaaatgcattttgtaaattcgtttattataaaatgaaaaattttttaaatatttaaattatttatttaaatactttgtaataatataattacggtttttattaactaattactttctgcttaaaacaatgcattttgtgaattcattaattcagtcatatgaattaaggacaaattataatttgtgttttttcatgggttatttaaaatatatttttttaaatattatttataaattaatttttaattaattgtatttaaaaataattatttccttcttaaatcaatttttttatcttaattttaaatttgattaaagttgttggccgacgcggaagaggcgcgtgcggaagcggagcgtgcgcaaacccaaatcttgcagtggcagaagaagcaggagacgcacgagcgcgtgctggacgactggcggcgccaatgcgacgatttgagcgcgcaaattgagcgcacgcaggaggactgccgccgcagtaccgctgat

SEQ ID NO: 52451 - DNA, 358 bp, Heterodera glycines
atgactataaaaacagaaaaacaatcgaattcaattcaaaaagcaaaaagaatatgcccaggcagtgattggatgagctcaaaacaaggaaagtatgaaatcctaaaataattcaaaaaatggtggaaaaagaaaggcattatgattattattattattagggatatttttttaggcaaatgcctaaaatttctgcgcacttgatactcacagataagcacgggaaacgcattttccgcttggtttcggatgtctacgatgacttttataatgcctatttttgcctatttcgaggtttttgtgcataatgtgcctatttgcaggattttcgaaaaatccttaacaaaaaagcaataaa

SEQ ID NO: 52452 - DNA, 116 bp, Heterodera glycines
aaaaggccgtgcgcggaattaccaccacccattcgttatttgtgcttcgtatctcatcatttattttgctttgattattcgctttgctctcttaattttatttaaatggccatgac

SEQ ID NO: 52453 - DNA, 402 bp, Heterodera glycines
atgcaaatggtgccatttgaatttcttaacgaatggacaaaggaaaagctgacaatgaccaaagcaaatgaaaatgaattggacaacagttggataatgaaacgatgcaaaattattggggagaaaaaggagaagcagcagcaaaagaaagatgataattgggacaacaattgtaacaatgtgtccatttggttttttaatgccaatgattgcattgggtgagcaattaaaaaaggcatttaattttgtttaaataattcaaatttcgcttaattaaggccattgtctccgccaccattcgcagaagaatccggacaaagcatcacaaaagggccgtcttctgctgacaaaatgagtgatgtgcaaaacaacaaaatcaatgatcagatgcagaagaaatga

SEQ ID NO: 52454 - DNA, 723 bp, Heterodera glycines
atgatagtggacaaaaagagttttaaaagtaacatattatgccgaatactgcttttggaagtgacagttcagaatgttcccttgtaagtggtcaaacgatgatgcactcgctctagaccgtgtgtccaaaaccctaaacctaacagggctgggcgtaactggattttaattatggaaaatcgtaacccgtaattacgtagttttttaaataacggaaatacaatactcgttattatgggaggaggggggtcgaaaagtgccgtaattagggaatctcggaccatcaaaaccaaagacatttcccactctcgattcgcgtatcaccacaaatacacctaaataggaaaacagttcgatttacctcattttgattaaccagtgcttcgacctccttcctgttgtggtagcaaccagaaaaatcatacaaatatcgttgaacttttttggtgccattggcatatacagacagtaacaccaaactttcggcaattaatctcagcctcacaataatccgggaagaacggcacagttttaacgcatttgctctaaatttggaaagaatttgcaaaagtgagtgtcatcgttttaggttccaaaacctaaagcccaaaaaatgaaccgtattttgtattttgtttggtgccaaaacataaaaaaatgcctaaaaagcgaaccgttttttttgcaaattatcaatcaaacaattttaatatttttagataa

SEQ ID NO: 52455 - DNA, 211 bp, Heterodera glycines
tttgtgcgaccaaatcgacgcattggcacgggaagcggaggaattgaggcagaaattggagcaggaaaggcacaaactgaacgacatcccaagtgaacgaccattaggcaaggcaaaagcagacggaaaacttccttttagtacaacaagcagcagaacggttggaacttctgtcccaatagccatcaaacagcggagagtgctaaagggc

SEQ ID NO: 52456 - DNA, 1861 bp, Heterodera glycines
  unsure (1)..(1861): unsure at all n locations
cctctagagtcattgccgccacagatatgtacgaagtctgttttaagtttctggttttgatgatggtgaataccacttactgcatccggcacctcccggtccgtttgtttgaatgctcggcggaacgcttgggggtgaagcgccgcctgggggaatgccaggggcatttccactgggaccagtgccagaaacagcttaaataacaaagaaactatttggaagtgcaaagattcgttcttacgcgccgagggtgcaacaccgacgggcgcattcgctttgggtgcgctttctgcgcccgcgtagccggcgtcacggcgggcgcggacgcgcaacttcttgcccaacttcatcatgtccacccaaaggtcgtcagtttcggcacggaacccagcgatttgttggtccaactcttgccaaatttgttgaacatcgctgtaaatgttggcgatcagtacaagagaggcgagcagggaaatgcccgagacggaggaggcgaggaaagtggcggtgtacactttcattacgccgagggaattctctttgtcctaagtcaaaattattgtttttaattggccaattaaaaaactggaacaaaatttgttgaaatgaaattaatgctggcagaaggaaaagtcaattgcgatttatgcataataaaaattgcgaacattcgcaacaacggagtcccttttgtgggagatcagtcaaatgcttctgcttttaacgagtcaaagaaagccgaccgatcaaagagcgaccgatcagtcggtcgccaatacccccccccccccctctaacggattaaggatggcgtctgcgattttgggggggaggaaaccaaaactaattaatggtcgtgcttntgatgggtgaacgcttttgggtacgtggaaggacggggggaagagtgaacaaactggttggggagaggggcgggtaattggcgaacggaccgaccgattcgctgcattgcgcgccttttggcctgcccctccccccccccccgggggcaattcgaacattcttcgcaaaagtcgtttttcaccgccgtaacccttttcccaattcagcgccctctttcgcttcgcgctgttcaggcgctgaagcggctttacagcactaagtaccaagtgggctccggagcggaccttctctgtgagtgattatgtcttcttacaatttgccagcattttctcttcagacgaggcttccggcgcttctcatgactttgccaagggctctctgaacattccgtactcatttctcatcgaacttcgacctcagaacactttgcacagcacgggatttttactacccgaggccgaaattatggacacggcagaagagacgtgggaagcggtgaaagtggtggcggacgaagtcctgcagagatttggccaatttggagaagaacggaaggcatggaatggtcggtcaaaagagggcgggggtaagaggaagaggaggaaaaagggaggaaaaaagggggttaattgggaagaaaagaaaaggatgaaaagagaagaaaacgatgaaaagagaagaaaacgatgaaaagagaagaaaacgatgaaaagagaagaaaacgatgaaaagagtgccattttcagtgtccaccgcaaaaccaacacaaacggtgagcagcacaacaacaacaacaactgaagcaacaacaacggaaacgacaacgacaaaagcaacgacaataacaacgacaacaacagaagaagcgaccaaagggacgacaaaacgaaagacgacgaaaatcagaggaaaagggggagaaaaaaaggggaaaaagtcactggcgcacaaacacacgttcaaaccgaacacaaccaacaacagaacaacggcagca

SEQ ID NO: 52457 - DNA, 441 bp, Heterodera glycines
atgaaagtgtacaccgccactttcctcgcctcctccgtctcgggcatttccctgctcgcctctcttgtactgatcgccaacatttacagcgatgttcaacaaatttggcaagagttggaccaacaaatcgctgggttccgtgccgaaactgacgacctttgggtggacatgatgaagttgggcaagaagttgcgcgtccgcgcccgccgtgacgccggctacgcgggcgcagaaagcgcacccaaagcgaatgcgcccgtcggtgttgcaccctcggcgcgtaagaacgaatctttgcacttccaaatagtttctttgttatttaagctgtttctggcactggtcccagtggaaatgcccctggcattcccccaggcggcgcttcacccccaagcgttccgccgagcattcaaacaaacggaccgggaggtgccggatgca

SEQ ID NO: 52458 - DNA, 1152 bp, Heterodera glycines
tggccttccatctccccccccctcctttaagaaccgaatgtggcgcaagaacagacgacccgcattttgtaggcagcaatatttcaaccgaatttgctgctcgggagtggacctcaaccgtaacttcgactggttttggtccagtgagtcttttcctttccattccgtggcactttctctccgttcagccaccggttcgagtgccgacccgtgccatgagacataccacggcccctcagcattcagtgagcccgaagcaaggtcattaagagaaactgttcgattttacaacaaaatacggatttgttcgtcggaccattaagcgccactttaaaatgttttcatttatttgtagcacaatccaatctctcaaaagcctagccctgcacggtctgtttagtgacttattccccaaattaggtccgtccgcgactttctcgaggatcattcggtgaaggcctttttcacgctccattcgtactcccaactttggctgattccctacgggcacaaacgacgcaattacccggaggattacacaaaaattcaggtgggaaatttggtaaaggaagtgatttatttgtcggtttttatttgatgttggttggcacatgatctgatcgttcgttcgtccgttcgttttcctttctctcccatttctctcagcccgatcgctgtgggcacgggcaatactctgcgtctggccccggccgtcccgtcggtccttcctcgccgggccttccttgtgctccctgcactcccggcactccttgcgtccccgcctcccccgcgggtccgggcagtcccggcggggcgtttagcccggactctccggctattccttctgcgccttgcaacccgcgcggaccacgaggtccttggcgcccgatttgctgctctgtgtcacgccctttctctccgggcagtccgggaggtcccacttggccagcaggcccaggggcacccgattcgccgggtggcccagggttcccgtcccgtcctccgtgtccgggctgtccctttgctcccgggtgtccctttgggcccgtccgtccgattgggcccggttgtccttgcgggccagccgggcaattgaagctatgatgatagaggatcagcatctttttcgctctggtgcgcccacccaccatc

SEQ ID NO: 52459 - DNA, 540 bp, Heterodera glycines
atggacactttccttggcatggcatttcccaccatccggagtgaattgacaccaattgactgtacactaattaattggttgttggctacccattgtgcccatcttcagggtgtccgtcaactcagctgcctccaccgggtcgggtcctcaatcggtgcagaactttttatggggcgccaaaaggacgacaaacgcaaaaccaacgaacggagaaatgggaaaaacggtgggagaagaaaaacggaattgggaaagtacatttggtctgatcagagcacaaagtcgcattgccatgttcattttgacctgaacaaatcgggtcaaaaggaagaagcgatcggcggaggcaaagcattggcaatgatcgcagaggaagagacggaaatgggaaggactgaaatgggaaggacagaaaagggaaggacggacattccaacgccaaagtcatcgttgggatcagcgagcagtacgagcagttcggcggcagagggaaaggaaaaggacaaaacgaacgatggggtcaaaagacgaaaagaatga

SEQ ID NO: 52460 - DNA, 490 bp, Heterodera glycines
atggacttccaaatggagcccttccaacggagcaaaagacggaaaaagccgagaaaagtggaggaagagacggacaaagagtaagtgatggtcattagcagagggatgggagaaaccaagtcgagacaggcgagacagcgaagaatgttcgatcgaagccgggatttccgaagcgttgccgaaactgacacgggactgatcgatcagagtgctgcgaaagaatgtggcttccgtttgccaattttgccttccggtcgaccgattgatcactgatcatctctctgttcttgccgttttctgtctgttgcgcttttctcactgtttgccctgtcgatggattgtcaaagcacttcaatttgagattaattgagcataatcagaaagaaaggaccagcgaatggatgataagtgcttcaaaaaagaacggagagaaggcgaaacataagcaaatggaagaagaagaagaagaaagaagaaacattatttgaca

SEQ ID NO: 52461 - DNA, 751 bp, Heterodera glycines
atgaccatcacttactctttgtccgtctcttcctccacttttctcggctttttccgtcttttgctccgttggaagggctccatttggaagtccatttggcctgagtttgtctgttggctatgcacttactacgccctttccttctcgtacagaaaactgatgaggaaaaaccagcaaatgttcgttttttcgattgacttcgctacggccaattcagtcccatggcttccctttttccctcgctcattctttttctgttttctcatttcattgtgcttttcctcttcagactcttcgaggacatttgcatgtttttccacgcttattccgattacattgtgcgttgttaattagcatgcttttcattttaattacttagttccaaatgtttgtttggcttttccccttagccaatcacttttatgctcggcttttatgtctcggcagtttttaaccgatggaatgaaatgttcacaaatttgggttggatcgattcgtaagttggcaactaattaactaatctcaactctttattgcaaaaatgtaggttttcctttactaattccccaacccattaagccctgctttgctaatcgccacgattttgcgtggcaaatcggaggaggcgcggataatccgacggaacattgtgcgatatttggtgctcgtccaagcgatggtttacagggacatcagtgcaccggtgaaaaagagatttccgacgatggtaagcaaaggaatcctaaaatac

SEQ ID NO: 52462 - DNA, 467 bp, Heterodera glycines
atgataaaagcaaacagaaaaaagtgccgatggaaatttgacaaagttcggagacaaaaggaagggcggacaaaagagggacggtcagtgagaaagacaaaaggctggccaacagaacgcaaatgaattcacgggagaatctgaacgaaaagtcataattaccattttaagaaattagttttattcattaaaataaaacaatttgtgatgctagtcagcttaggatttaccaaaaattaaagaagatatttggaaaaaatggtttcttcttaatcttaaaaaacttactaactaagaaatttttaaagaaaaaatcttacaattaatttgtttattagaaaattttaaagaataatttttcagcgattttttgtccgggcggaaccagcggggagagcggaaacgtagtgcaccccaataagacactgggaaaattattgttttttatcaattgcaaaaaaaataaa

SEQ ID NO: 52463 - DNA, 384 bp, Heterodera glycines
  unsure (1)..(384): unsure at all n locations
atggtcagaatttgtgcaaatttcgcaattctttgtttgactttcattgtttgcccggcggaagaatcgaagattccgaaagtggttttgaatggtatgccatctgtgggactccatttcaaaaccggaccgaattttcagttgttttaaggtaaccaaatttaactatgcgcttttgagtcaataatgatttatttgcctttagcgtgttttgctttttggcttctctgctcctttaccaagcggccgctgcctcgggaaaaacgccacacttttaccgagtggtttatggccgttcagaaaagaagaaaaagaccaaatgattcatcaaatcatgcacnatatttttgatctcgttaaccaattggatatcattttctccaa

SEQ ID NO: 52464 - DNA, 1078 bp, Heterodera glycines
attccaccaattacttcctcttctctttggcccttgccgatctgctagtttgtgccgtggtgatgcctttctccattttggttgagcttggcaatggtttggctgcgcttttgcacaaatgtctcaaatttcgaattgcttttcccccaggggttttgccgtggacattccgctgggacttcttctcttgtctcgtgtacacttatgccgatgtgttcctctgctcttgctccatcgtccacatgactgtgatctctttcgacagatatttgggtaaattctcaaaattatatttttttaaatgttggcatttgccgtctttcaaaagttccaataaattttcaggcgtttctcaacccctcaaacggcacaacaaacgcaagcgaattgttttgatgaagatttttgttgcttgggttctgtccaccataatctcttcaccgttggccattctctcttttgtggaacagcagaatattttgatggtccgtttaattcccaaattcatacggtatccatccaattgtatacggtactttccctgttcaggaaaatcgttgcggtattcgttctcgctttttcatgctctatggttctggtggggtcgttttttgctttaaatttttgaattcgctcccaattttgcacttttctcagtgttttcctttctcatccctttggccattatggcaattaccaccagccgaacggcccatttactgcagcgtcaggctcttctgttgagctccggcaattccttcggcggattgcgccgaattatggcaccgcagcgcaaaatgggcggacaggcgccgatgatgttcatcgccaacttcagcggggggtttgccaacagcagcacggggaggagcagcaatactacgacgacgacgaacagcaggtggccaaatgggacagaaggacaagccgaacaaagaatggcacgggagaggggggggggagggctaatgacccctcatttgtcagtgattagcgagcggagagtcttttaattgaaacaatttccaattttcagtggcagcagaagccggccactcccaaagccgatgaattgtaa

SEQ ID NO: 52465 - DNA, 179 bp, Heterodera glycines
atgtccttctatactgtacatcgtgatcagctgccattgcgtgcattgttcaatcaacatggactaagctttcaacagcgttggcattcacctcactacaaatacagtgaggtgctcggcggcacttaccatatcccgcacagccgttacccaccccatgacgtgtacaaaacaccgtg

SEQ ID NO: 52466 - DNA, 352 bp, Heterodera glycines
atgcggccacgttccaaatccctttcaaatataaattttgaaattactcaaacaccaatctgccgtttttatctacgctttatggatgcgttatatggtagaaggcgtttatcaactcctcatagaaattttttcccaacaaaaatgaacataggtctttctcagcacttttttcattttaaaatatatttttaaaattttagaagcaaaacatgatcggatttttttgaagcgaaaaaagaacaatcgttgggtgaagattcgacgggtatatccagtattcatcttggcgttaatattatttaaataatttagtcgtcacgtctgctggataaaagaaataatattgata

SEQ ID NO: 52467 - DNA, 599 bp, Heterodera glycines
atgaagaaaacgatggatgaaactaacggacaattatgcaattcaactttcatcaattctgacgcactgacggtattcttgaacctctatgcaaaagtgacttctttcgtgaaagtagggatttgtgcgagtctttattagttaattcattttgatgtcaaaatattagattatcttagcatacataatagtattcagtttacaacaatagtggatcagtttagtaattagtcctagaatggatgtcatatccgttttcagcgacctcaaaaacccctaaaaatatattttccctgtaatttacgaatttcgatttttttcgaattcgggttcggaattttgaaaaataaacgtcatattcgtgatcatcggcacaaattaccctagaaatgactttttatttgaaaatttcaggggggggggtcacaaaacagaaaagtaccgggctacgaatgatatcaagaattacggtaatttttttgttaaaaattttaatttgatgtgtttctttataacgccctttttatggcttttataacgactcagcactagtggagttgacccatattgaatctctttaaaggtgtaaacgtaataaa

SEQ ID NO: 52468 - DNA, 1373 bp, Heterodera glycines
atgatcaagaatatcggcactcgagtcgattttcggtgcggcatcgagtaattcagaaaaactttacggcactgtcggaataaaaatttacttcggcaaattataatttagtgaaaaaagatttttggattttttcaaattgaatattcattttttaagtgaaacattaacaacggtttactcattactggaaattgaatctcaactggtcaaagtcgatgagaaatccgcaaagactatccaaagactcaacactgatcttatgacgaacttcagcaatggaaaaataagcgaaaatgaaggcttaaaggaattggacaatgaattggataaaacatttaaaacgatgaaaaataaagaggatacggcggcgaaagttggaattggcgggatggacggtttggcacaaatatttccaaaggcaaatgagcaaggaaagtctgtaaggttacaaatatatgggcaagcgatggaagtgctaaagctaattcacgagagaattgagcaaagtacggaaaaagaagcaattggaaaagtaaccggcaagagtacggtggcaaacaacggtagtactgtaatgccaagtcaattagtgggcttaatgatggggctttggacacattttttgcaaagagttcgcaaatcagaccaagacaaagctactcaaactaatccagaggtaattctaatgagtgaggatgtgtggggacggggggggaaggattttcatccccgttccccgtttttcctatcccaggaaacggggatccccgcaccccattcctaccgtggacgggcatgaaacatactaaaaatgggctcaacaacaataatgaagaaactttttgacgaaatttaagcaaataaaaaaatgggaggaaaattcgtttcaaaatttttcctccggccttatcggcatcccagaaccactaattcctttcgatattcaaaaatgagcgaaaaacttgcatttttcctaaaaatctgttaaatcaactcaggaaaagcaatcttcacctaagctacggacgaaacttaacacaccgatggcacaaaaaacaaaggctccaacgaaggcagctaaaaatcaagcaattccaaaaaaccaaaagcacacggcttcgtcagatagacaaaaaaaagtgacagaaaagaaagcggtttctcttggcaatgataaattcagccgtcgacgacgtgccataacgccaattgactcttcgacaattcacgctttattaatcgctcttgctattctttgtatcactgtactagccttcagcagtgaccttaacccatgggcgattgttgcaattgtctttcttacacttaattctcaacaagcaaataatcggcccaatcaaattgccaaa

SEQ ID NO: 52469 - DNA, 1166 bp, Heterodera glycines
  unsure (1)..(1166): unsure at all n locations
atggggcaaatcagtaaaaataatggtaataagtaacacttcgctaccgtttaaattttataaaatcagtaaaaatttctaaatagaatttctgtaaaatttaatatttctttagacatatcacatttggaagagtcgtttaaagaaatgttaaaattcaaaaatagtcaatcacctagaaaatgggagacgcccaattcgacgccatccagcccagcgccgtccaattcggcaccgtgcagcagagagccgtcaagttttactccgtctagttcatcaccacaggtaataattttcttatctttgagaataaaattttataaagtcggtgtcactcaaaagcgtttgggccaacctctgttagttttccaaaatgaaaaaatttagatacttaaaaattggcggcgccgaatcggcgagcgcccaagtaacaccgaccagacaaaatatgtgagaggaaatcactcaaaatcaaacaacttggaagagtcgtttaaagaaatgttaaaattcaaaaatagtcaagcatcgagaaaattggagacgcccaattcgacaccatccagcccagcgccgtccaattcggctcagtccagttgggcaccgtacagtttggagttgtccagtcttgcaccgtctagtccagcatcacgggtaataattttctttattcgagaacaaaattttataaaaatcggtgtcactcgaaaacgctagggccaacctctgttaatttgcaaaattcaaaaattaaggcatttgagaattggcggcgccgaatcggcgggcgcccaagtaacaccgaccaaacaaaatatgagagaggaaatcactcaaaatcacacaacattgaaagcaattttgacgaggaaaaaggtaatttaatatgtgtcattttctgcaattttcttgcggatgattgttgttcgatattttttttaaaacattttttaatgaaaattgcctagaaaattctaaaactaaatttttcaatcttagaaaattaccgagaaatgtttgtctaaactaaacataattttttgactcttagaattaattcaagtcaaaaatgccccaattaccaagaaaaacatatttnggcagaagtcggagtacaagtgtaattggacgattttctanagannaatgtaagttgtcgcaataaa

SEQ ID NO: 52470 - DNA, 1110 bp, Heterodera glycines
atggacggcttcaacacgggcatgaaccaaatgacaaacgttcttgatgctagtcaaccgtgggtggaattaatgtcgctcgatgataaagaatttgatgccgggtgcgttgagtcttgagaaacagggaaagaacccgagaacccaacttagaaggagaaagcgcaaggagagaccccccaaggccaaccggtacataacggcattccgttgagcatgagcattccgtctaaaaagtctctaagcgcggtgcgaggtgccggccatgggcgcgtcttcatccgaggacgcgggggacaaagctgtggagctgtaacgggaacctagtttcacatgtgcgaaggcaatcgagcgcacaatcagcaccacaaccaccgtcactcggtcccggggccgccaggacattgccgataccgtaactgtcagctgccgaaccatcattttggcattaatttctgtccatatgctccgcgttgacaggctgccgcagaatttcaaagaggtaagaaatggactgttcgttaatctgtattttaacccaatctacttttttcctttgtgttcgctcccgactccccacacgcttgactcagccaatttgttatgtaatttatgtaatttccccgcttaatgtacattcttcctcactccctttaattctgcgtctgataagaattggttttggcattctctcgttccatccttgcctacaaaaacattgtcaccacttactctcggctcttctctctcctatcctaacctactattcctgctttcaactttcattcccaacctttacctaactttctaaataaacctcccattaggaaaaaatttgcaaatcgtacatttcaagtgtgtaattgggatataaaatcaaatttttaatacatttttttgtgcgcattttttaaaaaaagggggtggatccggcggcgccgatcattcaatagttctaggttttctctatcagaataaattttaaatttttttataaaattataaaaaagtatggccaaaaaaatctaaccattatttttttttaatttttaagataataaatagctttctttatacttaagtaaaaaaattttaaaaaataatattcta

SEQ ID NO: 52471 - DNA, 1575 bp, Heterodera glycines
atgcgctatcagaatattttcttccaaccgatggtcactgctttggccgacaaatatcccgaggtgaaacgaatgccaataatttatcattttttagtttttgtctttttaggttaggcaggcggccgcttacggctgcggaattatgggactgaaggggggacaggtgagtaccaacgaaaaacggcaaataaacaaacatttgatcacggatttcagaattacgcgaaacattgcgcccaaatgcttcagccattaatcaatgccattgagaagaacgggtcgagaagcaccgaaggtaggcaaaggaaaagaaaaaggaacaattaaacggctagattttaaaagataagaaacatttgttcagaggacacgcgggcgacggaaaatgcgataagtgcggtggcaaaaatactcaaatacaacgcgacagaagtgaatttcaacgaggtgagcaaaaaaagggtggagaactggtggattgatggttcgtatcatcggcataatgccaatggttaaggttgtgccgcgtttcgttggttggttgcccatttggaatgacgaggaggaggtgccgtacgtgttcgacttcttctgcgatttggtcgagtctcagcacgacgcagtgcgagaggacccgtctcgtgttttccacgtaatttttcattatttgttaattacactcattaaaaagcgtctcgcttttggttttgttggcgtccctttggagtgtcgttcattcaaatggcaaaatgccttccttcccttccttcagattattctaaacgctttttcgcacggtgcttttgaggacgactcggcggaagagatgcgattggtcaaaagtcggatggtccgtttccaattgaaataaaatcgaacaaaacaaatttaaaaaatggatttagaagggaataatggcacacattcgtgccaatgaacagttgttcacgcaaattgtacaatcgctacaattgaacactcaccagcgaactgtgctggagcaaattttagcctgaggggggaaagcggtgacaagcgacggaactgatcagagtgatcaatgaaggaatgataagacggacattaacatcggacgaaacggataccaattaaattcaccctttattatgcagatgttgttttgttatcactatcgttatattaattatcaccatacaaatgcgcttttctgtttacgatcctttgcgctttgttatcgttttgaattgtgttagttgtttaactaagaattgttacaaatgtgccaatttgttatgaaaaataagttttgggggcccgacggtaccgataggcgccgccggaggaaaaatagaaattttgagtttttaacagattttcactgaaattttggggcattttacacacacgaaaatgaatcaaaatgtacttttttcaaattaaaattttttcaaatattcgcttcaaaaaaatgatatgtagggctgcaacttttagtgacgaaaaatctcaaaatagttacctaactaaaatagtgagtaaaaattccaaaatagtgacaaaatagtggcaaaaagtgcgaaatagtgacga

SEQ ID NO: 52472 - DNA, 2560 bp, Heterodera glycines
  unsure (1)..(2560): unsure at all n locations
atgataaaattggaagttgccgaatcggaaaccgttgacaaagtgaagatgcttatccaccaaaccgaaggcattccacccgaccagcaaatgctgttcattcagcttgaggacggtcgaaggctaagcgactacaacgtgcagagttcgtctacgattgggatggtcttacgcccgtcgtcagctaaagaaaatcctaacatgcacgaagtgtccacgcttagcatggccaacacctgcgcggtgtccccgtttggaatgcccgtattaccttcgcccgctgcggcagatgccagcatgcgcgatgtgcccacgtttggcatgcccggtacaagcgaggccaaccttcacgatacatccccgcttgggatcgccctacgcccagtgtccgtctcgtctgatgcaaacatgcgcgccgtaactacgagcattgcagtgcacccaacgcctgtcataattgctgaagttcctcatagttttgccgcattgatgcgcaaaaggtaatttaataattgttttttgattgatcaaatagcctgtttgtaattcttactcttttcataaaacattaagacattaaatgttttttttttgaattttgtacattttccatgatgtacttatttttgcccttgttatgctcttatatttggccacaaacgccttttgctgatctggtccttttacagagtccttgtttcgaattaatttccattttattaggcctttctctgcgaatgaaatgccaagcgaagcgacgacttcctcttttactcaacatgaaatatctgtatttgtcagcagtttgaacaatataatgctgaaatttgcaatgaaacgatctgacaatgtgcaagacattatggagaaaatttgggagctgaaaggcattccgattggagagcagcggctgttcttccgaggcattcagctcaacaaggccgaattgcaaattttcctacacaatgggggacatgaaaatgagttcgttttttacctggtaccacgacctgccttgccaaggtcgttagaagaaaaaacgataatgtttaaacaaaatgttgattgatttagtgaggaaatgccaattcttgtaaaggatttaacaaataagaaaatgatcagactgcgggttaaaagcaccgacaccttgctcaacattgaatggatgatcaaagccaaagtgggcattccgcgcgatcagctaaggctttgtttgaatggaaacggatacagtttaaagcaagaattagccaaatacatcgaaggggcaaattggccagaaattacacttgaaattaagccacaattgcatgtctctgacggttggcggggataagattttcgttattccatgatattatataaagccgtacagggaaagcgttttcaagtgcataaaatcgtaaaattggtaccttaataagtacagaaatgtttattctatttttaactaatatatgctagatggcaatttgaaattttttttgaaatccattcactactaattactgcaattatgaatttattatcataaaataaggacattgaatgtaatgaatggtaaatggttatgctttattgtgtccactaattggttcttagttgacttttatcccaattcttaaaaaccgaatttttacatctgctaaaattagacgccatcatgcacaaacaaaagtaaataaaataaatacattaaatgtaaagaatagttatgttttccatcatgatcaaacaattactaaaaattgttttaagaaataaacataaaaatgccaaacggtaaagttatacaaatgagagtgcatcgatggtacaccattctatacataatgaggaaagtccaagaactggagaacattccactaattgaccaaacgctgctgtacaaaggaaaacggcttagaagcgatgtaaccctcgcgaattatggaatcgagaactatacgaacactgagtacgagataaaaactcttgacctgttggtgagccaagcattgccaataatcacttacggtcagttctttgcttaatctttagcccatttattaatagattntgacgcattatgacacactttaggcctcttgataaaattattgaaaaaagctatgaatttttatttttcgggggtggacaaagctaaattgtgtgatgaacagtgacagattttaggcaaaaaaggaagaaaaagcttttgaaaaatcgtgaaaatttttgttgcactaattttatttaaatatttaggcagtttttgatttttagcatattaaatattacccaatcgctttattactcaacgtaaacatatatttttaaattttactattaattgaattttttagaaatatttattggtgaattggtcttattaaaattggatgttcatgactggaacaccgtgcagcagctgaagaagaaaattgaggagaaaaaaggcattgccatgaacaagcaaaagttgaaacacggggaaattgaactgataaacgaattgacaatgtccgattacgaaatcagaaaattttcaatattgagtctgattataatttggtaa

SEQ ID NO: 52473 - DNA, 623 bp, Heterodera glycines
atgacgacgacgacgccacaaaaatatttgaattgtcacaatttgcacgcattttcgaatggaaatgggtgcagaaatggtatttctttaatttttttttcaatttgtttacattgtgcaccgtaaaattatcccgtgtatagactttataaaatagagaaacatttacaaatttgtcaggtgtgtcgtgttcgtcaacgcgagaaaagcggaaaaaatgctgggattattccgatgccatggcattccatcaacagcagcgtcaaccccagcaccaacactcaaagcggaatgggggcgaaccaacaacaataacaacaacaacaatgcatgttggagatggtggaggtggagaaattggcggcacaacaacaccgaaaaagttgggagcaatttgagttgttttttttgggggggggggggggcaaatcatgcaatttcaccacccggcggtttttcaaacaaatccaaattttaggcggtgtttttaaaaacacttataacctctgcgccgcgcggcgttggcaaatcgttgaacacaaaacaatggtgacggaaaatgcacacacaaacaaactcaatatatagattcgttttttgttttcttttctcataacatgcaa

SEQ ID NO: 52474 - DNA, 926 bp, Heterodera glycines
atgaaaaatgccgtgaaaatggcattgattgttcagcagagaatcgccgtcaaatgcttggcccggcactgttcaaaattcgctttccgcttttgtcaaacgtggaatttacgaggaaaattggtaaaaaataagtcaaaatttcaaactcgttctctgatgagatgccgtaaactattcattgtttttgtggcgatttttaaaaatgtttttttaaatttatttttcaataagttaatacatatttacagttcccttcggtgttttatcaaaagatgaagtgatcgccgtttatcagttcaaatcccttccaaattgtcatgggatttccgacggacttttcccaatgccattttcgactaatggacggatttctgatcgaaaaaagggcacacttttgctggacattgaaaaagtgtcggaatttgcacgagaggaggttgggagcagtcggtacagcgaaaaagtgtacataaatggattaccatggaaaatagtggcacaaataaaaacgaaaaatggaggcactgacaatgagaaatggttgggcattttcatttgttgcgatacttcgaaaaaaggtgcaaaattactaatagttaatatatatattaacaacaattaattgttaattagtactaattaacagcaataattaatactccattaagattcgctttggcgctgctgcgttcgttcggcaacttttagaattatctcgcaaaaaaatgggacggagaattgcgttgggacacttagtaactttgtgttggacaacaaattgaccaatttgggattcactaatttcgtttcgtttgcggtaagtgccaattcaaacaaatatttaaatttgacattcgtggaccagccaatattgaagttcatttatttatttgcctggtgtaaagaaatcataaacaaataaa

SEQ ID NO: 52475 - DNA, 208 bp, Heterodera glycines
  unsure (1)..(208): unsure at all n locations
ggaatcccacactgaacccaatcatcgaacggctcgaaaagttggaaaggttggtggagcggctcgtggagggcgagaatcgatatggacatcngatttggtgacccccagcacacctcctccacttcggctcccacccccacaaacggcaattttcaatggggtcaaccgccgccttttgctggcaccggcgcagtgtcgcggatga

SEQ ID NO: 52476 - DNA, 874 bp, Heterodera glycines
cgggaaatcccggggttttcaggtcccggtcccgatcccggtcccggtttttggaaaaacagaaatcccggtcccgattttgccagtcccggtcccggcgggactaaataagcactgttaagaatgggggtctgggtgagaaaagagaagggaattggtgagggatcagaaatttttgataaaaataaattaaattatttattttcatttatagcatcttttcatgtgcataagtggtcaagtggctaaacctttttactttcattatttgtctcttcggttcaattccctgatggaacagaaaatttttttatattttctttaccattattttaattgaatttaattaataaaaaatattttaatttaaaattattatttttttcatttttaatagcctaaaaacccataaattaaccaaatatttggtcattttttgacaaattctgttaacaaattcgctcaaaatttcaaaatttttccggcggcgcctatcggcactgccggaccccgcccctcccactgttccaaaaaagttttttgaaaaaacattgccacaaaaacagcgatttaaaagcaaaaaatttaaaagattgtaaatttatttaaaaaatacagaattttgggactcagaaaattccaagaaccccccctgaaaacaaaatttttaaaaattttcctcgaactcgtcccccaaaacataaatacaaaattttatgggtacatttttgaatattgccaattttcgtaataaagtgcacttaaattttcaatttttttcaaaaaaattttcacttgggaaaagtcccggttggtcccggtcccgggttttttcgcggtcccggtcgaaaaacttggtcccggtcccgacttt

SEQ ID NO: 52477 - DNA, 710 bp, Heterodera glycines
atgccagttcagtgttcaatgtttgtagctcgtgctccttttcttccaacaatcgttttgcctgcaaaattggtaccatattataagtatttgtatagtaatggctcaatctatcggtgcattttctccattcaaaaaagatgtttttagatttcgaaaaaaatcctctcctcattctttaaaaaaggaaatgattcgagggaatagtaagcggttccgcaagactccacctcattcaactcgtaaatttgatcttccaggcgccgaattcgcccttgtgctacttccaactcgcgctgcgcactttccatctcctctttcatggataaccttaattttgttttcatactatttttggctcgcattgtacgccggaaaaaagaagctgacaatgaaagttcatatctgatttgattatttataaactttttgaatatagcaaataattagcatccgttttccggatcagaggatgctttcaaattctgatgtgttcaattctccctcgccgtttcatgcaaaaaaacttcaacaaaaaaaaattcttaaatttataggaaaatcaaaagaaattttttttttgtaaattgttattataactcaaacacccatacataaacgtacgtacattttggcttcatattcatgttgtttctgttcagccgcttccctggcgcacatttctcgctgcagcctgtaaaaacaataaa

SEQ ID NO: 52478 - DNA, 1108 bp, Heterodera glycines
atgcttttacttgcctccctccgtggtccgtgtcgtcgtcctcgcgttctcaaaacgctgcgctctcttaaagtccctcacttttccacaatgaaccgtgactatgtcattgaaactgtgaatgtattctctttgttttaatcaatcaaattagacgattttcgcacttttcttttagttcacttccgaacgtgactctgtgttcaaattcttgcaagaagtgtttttggtcaacgagccgatcacccgcgtcatcggtcctttttccacaaatgatataattttaccaataataatttttattttgattttttaaggttgcaccccctcggacacctcaccaatattcgacgacatttgtgagaagtgttctaaagttagttcgtggattagtttctccaatgctttgcttctcttcaccctcttccccctcattttcagtttgatttgtcatttgcggccaaaaacaacgatgggaaaatactgggagttctgttgaatgcgcccttcaaattggaaaatattcacgaaagctacagagacattgggcgcatgccgaacaaaaaggaattcggagaaggttaggcaacgtaaggcggagattgaagatgaaagcaaattgttaagagattcgcaatggcccttttccatctcaaaatgccaatcgaatccacgccattctcactttcgtgaatagtcatatcgcactgttgccccccgaagaggatattaaattagtcgaattgcaggccatggctgtaggtccaggacacgccaggtaacgttgtgttgaatgccaatcactcgctcgtcaaatgcggcactttccgctccttttcaggactggcttgggctccggtatgctccgtgcactcatccaaacggcttccgcaaaaggctattcccatttgttcacctgtgccaccgccatcgcctctcagacggggcttaaaaaagtgagttgtctgaccagcagtgatcactattttacttttccattttgaaatctttgactttacagtttggctttgacgagatcaaaactgtccctttcaactcttttctggaggacggagtgccaatcttttctggggttcacgacaacgga

SEQ ID NO: 52479 - DNA, 2618 bp, Heterodera glycines
tcttctacctaatccaaatccaacattggtgatataattcgaaagctgaacatgtttagaagctttttctaagcgatttcttcgcgatcagacaattaccaaaaaagttatacatgaaaattgcgaaaagtcgaaatttttgaagttttttcttaataaaattttttacaggcatgaaaatctatccgctttttgtaaggctaatagagcatgttaaagctttcgaatgatacaaagattgttgaatttggatgccaaagtaaaaagctatcttggaaaaacgagctggcgccgcattgcgcgcgccgaaatgcgtgggtccctaatttcgcttataaaatttgaaaaccaaaagatttccatttaggtaattccatatttaaatgctcaattctattatttctttctctactttttgttcttttcatgtcctttcccccatcattttactcctctattattattcaattcgtttgttcgatttatttattgaaaattggaaaaaaatccatgtgaaatttggtgatggcaaagatcatctgttttccgaatatatttaagggaatttgaggccaacaagagaattttctgagaaacggctctctggagggagagatggtgggtgtaattaagaaaaccaaaaaatgaattttgtttgggaacggaatggaggaaataacggaaaaaggaaaacggagaataatttggggaggggagaggggtactgcatatgtcaaattatagtaggcctcatttttcaattaacgtaatcattaggcagttaatttatattgttaataatatttaatttttttagattgacgtaattattaggcattaatattcaatttttaattgagatttattattgtatagtaaagtttcgattttttgtgccgatcaaataaggaatttcacattttgtataatattaggaaataattaaatttttaataaatttattattatagaaagtagaagggaaccgaataaaatacatagcaaaatgtgaataaaaatcacattgattaatataattttataaatgttcttgctagtttccattttatttatttttgggagcacgacaaaacgtttgccgggcgaaccttttggaccatatctttttaaaatttttggtcatttttggttgcatttgaaaaaagttacaacaaaaaatatgtggtgcaagacttatttgtcaccctgtatacgttcaaaactttgaagacatataacttttttaatagggcaaaagaaaaaatctgaaaaatttacattttataactttttattcaccaaagtgatcagatcactcattcggatggatatgaaaccctaaatggcttgaaaacgggaaattctacaaaaaaatcttatgtggttgtaaaattgtttcgtggcagacgaacacaaacttgctataaaatgcaaaatccgcatatagcaaaatttgtgttctttctgtacgtaatattcgttttccgcgaaaaattttccgtccaaccccataggaatttttttctgaaagtttcgcaatttcatgccattttagggttttcagatcaccccgaatgagtgatctgatcactttggtgaaattgattttttggtcagtataaaagttttgtaaaattatgaatttttttttcttgtcctattaaaaaaatacatgtattcaaattttgaacaaataattgaaacagagcatataataaataattaaatgaaattttgttttattttataaaatgtgccacatccacctgttcctttttctgatcatcatgatggctattgtcaatgttgcgaatggaatggactacaaatatgaaaagttgaaagaaccgttactttcaaacgaaaacattgatcagcacgaatttgaagtgatcaaagatggcataaccgaagaggaggacatggaaaaagcaatgaaaatcggcaaaacattcttttggcgagttataatacaaattgtttttacattgatggaccagggggcacaggaaaatcatttgtttaatctgctatttttcatttgtccagaggttttttaaaaaaagtgacaaatatggcttttagtggaatagctgcaacattgttaaagaacggtcgaactgttcacaaccggtttaaattaccattagatttaaatataaattcatcatcgtcgattgaaaacaattctaaagaagcaaaagaaattagagaaacggatattatcatttttgacgaggcaccaatggcacctaaatttgtaattgaaataatcgataagaaattaagagagatacataagaacaatattatttttggtgggaaaattatgattttaagtggtgacttccgtcaatgtttgccaataaaaaataaagcatcaaaaaccgaaattttagatttaacactacaaaaaagtgagttgtgggttaattttaaaatattccatttgagaaaaaatatgcgaacggaaaatgaatcacaaaattttgcaaaccaaattttggaaatagggaacggtaaaggtaatgatgaaaacggtatatgtcttccaaaaatttgtgatattgaagacaatgatttggttgatgaaatttttggtgaaataattaaaacaa

SEQ ID NO: 52480 - DNA, 312 bp, Heterodera glycines
ttaaataattttattgaagaactattcctttttattgaaactgttttggaaagtgaagaatttgaaatccgaaatgacgtaatgaacaaattttggtcggcatggactgtcacactgaaaagaattgcacaaatggacaatttggcacaacgattttgtacacttcataaattcacaattatgaacatcagtcttttttggacgaatgccacggaacagcaaagagaagaattgtggcaaatgttgcgggaaaaaacggtggtcggatatgaaggattttgtgggccaatttaccgtatttccctacattaa

SEQ ID NO: 52481 - DNA, 398 bp, Heterodera glycines
atgggtggcaaagatttagattttggcaatggcattggtgaagaatggcacagtacgaataccatttttaatgaaaacccggtaatttttggtgaaagcccggaaataagctcaatgaataatgacgatgataacaacaacaactatcatccttattactactacaataattatggttatggtaacgacagtaattttcctggaaataataattggtataacgcaaacgcatacactgataactggtatagcgtaaatgatggtgatgatgacacgagtggttacggtagtactacaagtggaaactacggttttgagacgaacagttacagtagcagtacactgggtggcaattacgattacggtaacagtagtgagtcatcagcaccagcgtaccg

SEQ ID NO: 52482 - DNA, 380 bp, Heterodera glycines
atgttatctcgtccgcttctattcattgccgcccttctcttcctcttcggctgctgtcgtgcggatggaaatgttgtgcatctgtcgagcctcaattgtgccacgaaggacggaggaatcgatggcttcaaagctgtggacgacggtctgatgtgagttgtgttgttttgtgaaacaacaattaatcttcccaaatcccatttagcttggattcctcatctgtcaccgctgatacgtctgacctgcccctcatcggtttccagaagaacggaaaggaggacttgatcttcaaactctttgtgcgcaatggaggatgcgtctcaaaggccaatttcttcaccaacggtcaaccgtgtacactcggagagtcggaggacgtg

SEQ ID NO: 52483 - DNA, 114 bp, Heterodera glycines
atgctcactaatcccattctctccccatatttaggcaccgttgcccgtcgcgagattcgccgttaccagagcaccactgaacttctgctgcgcaagttgccgttccagcgtttg

SEQ ID NO: 52484 - DNA, 800 bp, Heterodera glycines
atgaaattatttccgctactattattaattattttatttttaattgacaaaattggatcagaaaggaaaaaattgcaacaaaagtcatttggcgaaatatttggagaaaaatggcaagaaaaagaagaagaaaaacgaaatgaactcaaaaaaagagaaataattggaaaattttataaaataaaagaaaaaataaagcaaaaaggaagaaaatactcaacaaaagaatgggataaaattaactcaaaaatagcgaagaaattggggacaaatcgccaatatattcaaaaatggattaaagaatttggtctccaaaaaaagaaatgctataaatcaaaaactgatgaagaaaaattagaaattgtgcaaaaattcattaaaatgaaaaatgaatttaaacaaaaaagaaaatattcagtcaaagaatggaacaaaaattatgtcgaaatttgtaagaaaattggagtaggctatgtaacaattaaaaaatggaagaaacaatttggaattcgctgtaaaagaataacggaggaacaaaaaatagaaaaaatgaaaatttattgggaaataaaaaaagaaaatccaaaaatgagtgacacggaaattggaaaattttgaaaattaatagaaagagaatttcagaatggaagaaacattttggggaagaaattttgaaggattgaaaaacggaaaaatttacgaaaatttggataaatttatttaaaaaattatctgcgctctaaaaaatagatttgttatataaattttcaaaaagattgtatttgtatttgataaataaa

SEQ ID NO: 52485 - DNA, 1074 bp, Heterodera glycines
atgtccacaaatgatggtgatgaattggaacaaatgtcagcaaatagtggacaaatttccgatcatttttcaagtgaaattgataaaaagaaaagagaaattgtggaaaaatttgataaaattaaagaaaaagttaagcaaattggaaagaaatattcaacaaaagaatgggagaaaattgaaagaaaaattgcaaaaaaattaggtgcaaataaaatgaaaatttacaaatggaagagcgaacttggaatgatgacgaaaaaaaattattcagttgaagaaaaaagaataatgttaaagcaatttgatcaaatatattcaaaattaaaaataaaattaaatgaaaaattggaaggaaaaagagaaaaatgcaaaaaaataatagcaaaacatttgggcacaaatatcagcagtatttatcattggaagaaacaaagtggaaaaactaagaaaaatcaacaaattgatgatgaaaaaagagaaattgttgaaaaatattttaaaacaaaaaatgaatttatgcaaattgggaaacattcacgaaaggaatggaaagaatttcatgcaaaaattaaacaaatatttggtttgagttatatgacaattgaattatgggccaagaaaattaaaaatcaatcaaatgcttcaaaaggttatggtgcatttaaaatcaaaaatctaatcttttttaattaaatttatattttttcattttaaaattatttatttattttacagagcgaaattttatacaaatgccgaaaaaatggaaattatgaaaacatattatcagatgaaagagcaaaacccaaagttcactgatcccgaaattgctgtttgaagatagccgtccccacattacgcaaatacaaatccgatttaaagaaaatggaaagaaattttaaactttgataaacatattgccaaattttcaacattttaaattcattgtttatcgagatgcttcaattatttgttttttttttttgtaaacgaattttacttttgttgatttgacaaaaaaaaaaattctctattcagatttcttagtaaatttattaattttatgtaaaa

SEQ ID NO: 52486 - DNA, 103 bp, Heterodera glycines
atgcacactgacgaggatctgtctgacgacggcactgaatcatatacatttcgctctctgatttactacgaaaagaaacaatgctccaaatgtaagaagcttc

SEQ ID NO: 52487 - DNA, 654 bp, Heterodera glycines
atggataacaaatctctcacaagtcaactacttcctacagtcaattttttggtcacaactcagggagtgactgttcacagtgaccgattggacactccgcgtgtagtgtttttcaatgatgatggtaccatttgcagacaatgccgatataatatggatttggactatctgatcagtaaggatggcgtctacattcattcgagccgactaaaaggcaccgaaaaatttgtaccattcgaccgagtgtatgacctgccgcgtttttgtgcgtttcgcgtacggtcgcgccgaatatttaaagtaccctatattttctcggattctccactagaaaaggcaatgtcgtcaactgttacatcaacgactgaaaaccctctcatcgacaatgttgagcggaaaaaagcgagatttgactcagacttgcgcgacattactacgaaaaatggcgaagatgagaaagcagaacttaccaatcggacggatgaattaaatgtgggagagaaagcaacagatgggatgatacggacagacaaaatggatctgtcacaagtacaactaatggacgaagcaaacacaatggaaaatacacctaaattcagaacaaataaatttatttctaatctagacaccatcaaggaagaaaaagatgtttaa

SEQ ID NO: 52488 - DNA, 2128 bp, Heterodera glycines
atgccgagaacggatggccgtcccaagaaattgcgatgcctgacgtcgacattgtatcgacaacaaccagcaaatcttgaatggatcaccaatttcaaagaggtgtggtgtactaattgatttggtgattttgttgtcgggaataaatccattttttgggtgttttcgggaatatctaaattctcatttcgccatttttgcgttttttagtccatctttcggcaatttttggcaaatgttcacaagaaaaatgcaaaaaacacctctaaggatcaacttttcaggaaattaaaaaatatatactgccaacagtacgaaaatgtgagttttcgtcatcattttggccattttttgctaacttttctttttaatgagggttttttttctcgcaattttgccatatttggaggcattttttatccaattcccaattgttcagaaatttgtccgtgccaccacttcagtcagctaccaaatgaatttcgcaatgaagggttcaacaccaattgtgctgtttggattggtgaacgaacggacgaatgagaagctgacgctggagaaagtgccacggcaccccggcaattgggtgatgaaacgatgcccaattggggagacggcggttcagtgggaagacggcactttggatgccaatttcaacagtgtccattttataatggatattgacaaacaatgcattgggtgagtgtaaaagaggggacgagacataatttcgccgccgaaaaaaaaaaatccatatttttcttgaaaattcgaaaaaaaaattttaaaaatatttcttccccgaaattacgtcccggcgaattttttcgaaattttttccaaaatcgctattttcccttggaattgtcatgtaaaaaaattttctaatattttttttcttgaaatttgaaatgtcgaaactctcgaaaaatcatttgtggaagttcttccacagaaattaaaaaaaaaaaaatttcttcggcgaaatttttgggtgcacccgtaaaagatacataattctcaatcacccaaattcaaagttcacttaattttaggccattgtcgccaccagcagcggaagaagcgggtcaaagcaacgaaaaagtgttctcgacggacgattctcgggccaactgattgtgcggaatgaatgagtgattatttttgaaaatgtcgtctgatgattgcgcggaattaattattacctaattgtatttgagaaatggacggatttcaccaattggaaacggatttgatgctcattttccctcatcataaatgctctcctctctcaatttcatttgttgatttttctttcgaatacataaatttatttattaatttatttttgttttttgaatttttttgctggatgttccgactaaaaaagcacttgaaatagggatggcacggaattccgacattttttgggtcggaattgttacctaggaaaattttttaatccctaccggacaacaactaacaaataagcacaatattaccgaaagttttcccttcgagactctcgaactgaacgaaccccaaaaacatattttttgcccctttttcatttttaagctttcgctttccgtaaaaaacaatatttttttatttctcaacaaaaaaagaaaaaagtaacagcagaatggtgcaaaaaatgtctccgttctgtccaatggaccatacaaaatgaatgaatttgctcaacgcttgcgatggaattcgacggtgttttggcgtttccaacactttttgcgcgagcctccaatggtcttcgtgtgcttcattctgcaaaaatggggcaaatcaaatacatttagggaaaaatggaatgccaaaaaatcaaaattatgccatgaattattgcacaatcccctattaatattataggttttaaaacctagaaatttttcaaaaattaaaaaaaatcgctgaaaattttttcaaatgtaaaaattgccccaccctttgccgaggccacggcttttgcggccggccgaggtgagtccacgctgctcgcgatgcttctgcacgggtttggtgatccattgggtgtccgggttacgacgaatggtctaaaaaaccgagacaaatgaacggaaacagcgaaacagttatttaaaataaa

SEQ ID NO: 52489 - DNA, 777 bp, Heterodera glycines
atgcacgcgttttgcgctcgagctatttatcatcgggcttgtcaatccaaagcgaaacaacaaagatgctgttttgaacgaataaagggcataggttattttgaagaagtgtcaaagaacatgcagcaataagcctgcaaaatctaataagtggaaaatacatgagtatagaatttattttcagaaagtgtccacagacttttggaaaaatatatttgcaatttatcaacaattttgagaagtgagttagaaatgataaacttcacgattcaaaccaattttcgttgctctaattaaccgcgataaaaacattcgaatcaattaaatagcttctgagataataagatttatcataaaatttcaattaaaaataaaccctcaattattggtatgaacgatactttccaaacatgcacgcgttttgcgctcgagctatttatcatcgggcttgtcaatccaaagcgaaacaacaaagatgctgttttgaacgaataaagggcataggttattttgaagaagtgtcaaagaacatgcagcaataagcctgcaaaatctaataagtggaaaatacatgagtatagaatttattttcagaaagtgtcaaaagaattttggaatatatatttggaatttattaaaaattttgagaagtgagttagaaaattaaagatttaaagaaattttccttgttctaattatccgcgaaaaaaacattcaaatcaattaaatagcttcttgaaatataaggtttatcataaaatttcattttaaaataaa

SEQ ID NO: 52490 - DNA, 374 bp, Heterodera glycines
atgcacgcgttttgcgctcgagctatttatcatcgggcttgtcaatccaaagagaaacaacaaagatgctgttttgaacgaataaagggcataggttattttgaagaagtgtcaaagaacatgcagcaataagcctgcaaaatctaataagtggaaaatacatgagtatagaatttattttcagaaagtgtccacagacttttggaaaaatatatttgcaatttatcaacaattttgagaagtgagttagaaatgataaacttcacgattcaaccaattttcgttgctctaattaaccgcgataaaaacattcaaatcaattaaatagcttctgagataataaggtttatcataaaatttcatttaaaaataaa

SEQ ID NO: 52491 - DNA, 2916 bp, Heterodera glycines
atgatccgtttgttatgtgttcagttggattcgtcatccgagcgcgaggaaagcactcacgggacagatttgatgttggaaaggaacaaagagagattaagctgggagaccgcagaagcattggatcaaccagctgcagcaggggataaacaggcgctgaaaaatcctcgcgggggtcagtggtgaaaaaaagggcgaggggaaaattgtgcaacagaaagttggacaattcatcacaatattggtggtgaaatcccaatggggctacaggaaataaaaatacacttgttgtgcaataattcagtgtgtatttctccaattttatagccaaaatataaaagaaaattttaaagttagtcactacataaaaaaaactcataatcatcctaatttattaatgaatttttagataccagaataattttgcgtttaaaatatttaataaaaaaacgcttttttttacaaagttttcattttttaattacttatggcttagtgtttggcaccaattttggagtgtttttcgaagttagcacttattttccatttttaccattatttagtaggacatctttttgtgatttaagcctattgagaaatgatcttgatggcagattaatcagatcagcatcatatggacctgataaatatgtcaacttttgagcattgcattgattggaaattcttcaataggtttaagtgtactggactatttgtaactgatcagaattattattttttgcatgtctactgcaaataactgatcaaaaacttagttgaatgatcatgaactctttcattttacagaatttctgtatactgttaccgtaattaccgggaatcggtgggcggcggacacggaagcgaatctgtacattgacatgcacggcacggattctgattcggaacgcctgtggctcaagcaagaggtgaggagggcgcaaatactgggcgccaaaaagctttgccaaaaattattggcattttgtctgtctccccaacagtttaccagctggcttcacagtggaccagcgggaccacgttttcggcaaaaccaatccgattcctttacctttcgtctcccgtcacggctgggcatcatcaacaggcttactgtaggccatgaacggcacggctacggtgggggagaggagttaatttttcaaaaaaaaccatgttcttatttttggcttagaaaaaaaatgtctataaactttaatctcgatgtaatgattaaatatctttttcctcttgacatatcaaaaattttactggcgatatgccagcccctaatccttcagaaatgttcagaatttatactaggatttaaaaaatatcacgctatcagcgaaatccggtcgtcaatatttctgaaaaatttaattccgtccaagcctaatttgtatcggcatatgacagttatatccatgggattactgagtccgggttactgtggattttagttgaattccatgaatttgattacataatccacctatgttcagttggtcacaccattttgatcaattttttcaaggtgccggtgtgtttattgaccgcattttggtgacggaagatgaggtggatgaagcggatgaggagacgggggcggaagcgccggaagggcaaatgccaccattcgtggagcattgtggtgactgtcgccaatttctgttcctctgcaaccggtggttcgactcgggccaagtggacggaaagttggagcggaacgtacgcctcagtgccttttacatgatcagctcaatcccggtggacggacgcgtgacgcgtgagttttcatctgatcagtgatcaaaaaggatgattttggttagaaattgatgtgatcaatgatgatcagcaataattttagttcaaaactgatctgatcaatgatcagtcaaaattaaaattttattattactaaatctaatgtgttttattttagcaaattggttatttgatcatgataattttttgttcaattcaacgggataatgacctgaaaatcttggcttttaagatcccgctctgtcttggaatagatttactgttttaattgaaaataataatcttaaataatatatttgaatttttcttggcaaaggaagtcctggttgcttaccgaacctggtcgaaagcaaatttccctgtttttttttctcaaactatgcaagattttatcttttcaggcggtcgttgggagttcgttttacacggtggcacaaccgatggtcggggcagcaccagttctcagttagccatcaccggttacggcaccgccggccagtccaccaccaatggcctgtacgactctcgaatggccaacgcaccgtccgatgcactgatgcaggtgagaggaaaaacacatgctaattagcttattatggctcaatcaacccaattaatacacagctggactttggcaacattggcgaattgttgaaagtacgcgttgagcttgatggtggcgatggcaccagccctgactatttcctgaactttgttgagttcaaggtaagttaacgggggatgcgctatgattatgatgattcgcattcagattaagattgagaattctgaacgtaatcctaatagggactttaccgactaattttaggcaaattttttgaaaaatcgggtgatgcttaagaaacttagagaaacgaaaaacaaaatgaggccacgtttggagtgttaagcccaattttgaaatatttgctcaatttccatttacaggacttggacacggatgagaattttgtggtcatgtgcggcaaatggctgcgttggcgaagtgccaagaaaggcgatcagcccttccgggaactgatcgcttttcacattggcgttgaaccgttgccatgtaacatgacgggatgggaatggggaatttatataatattgtcggcctaa

SEQ ID NO: 52492 - DNA, 466 bp, Heterodera glycines
atggtgatcaccgactttcggggccgttccgccccattttatgcattcaaatttgccaggtgagcttttggtcgcaatactaattatcggatgaatcattctcaccatttggtcaattaataattaattagaccaaaattaattgaaaataagcgcaaagactagttcaaattggcctaatttgccaaaatttgcttaatagtctcagtttatttatttcagtcccttctctgtccaatgccgtgcccaaattgctaacgttttaccattcactgatgcgctctaatttatttgatcggacactgatcagatcccaacagttggtaaagcaaccattgacaaaattgatcgaagcattcattcgcgcattttgtacatacatatcgtaaattatgttcataaaaaatgtccattaattatcaaattatggtcattttataaacaatccacgacaaaaaatattaca

SEQ ID NO: 52493 - DNA, 612 bp, Heterodera glycines
atgaaattgggtgcacttcatagagaattcttcgggctatcgaatgatatcaagattgttagaaattttgagtggcttaatatatatatttcaatgtgtaatttgatgacgacaactgacatctaactcatcactaacaaatatgatcagctgatttgtgagcaataatcactgaccaaaatcaatggctaataataaacggaatggaaaaacattaaaaatgttaaaataaaaatcaaaaaataaaagaaaataaaaagctaaaaacaaaataatattaatttataatttgaatttttggcacaactttatcttttatgctgaagagcttaaaaatgcattttaatggttatctaaataaaataaattaaaatgtagtttaattttacaaatccaattcaatgaagcgaattaactatatcaatgaaagtttttaaatttaattattttaaataatttttttttacagataatgaatcataacttagctcaaacttgatccaattaatcaatcttggagtttagcgacagctaaaagatctttactatcatatcaacttttaaaaatttagcaaaaatttatcaaacttgttactaaaaaatttcgaaaaa

SEQ ID NO: 52494 - DNA, 419 bp, Heterodera glycines
atgttcctttgtaagttcaaacatttatttcattgaaaagcatggtaaaaaaattgtagttttctgatcaataaaatgtcaatgccaatgaatggaatggccgaattcgcttcgttgcgtttgggggtgatccgagatagttcatttggcttttcgtaacgcgaattgaagcccgtacttcgtgttgatcgctttgattacatcgttgggcggctcccggccccagccacagaacagaatcagcccatgctcatcaatttccagccttggagctccgtccagcaccggcggcggtttgtgcgagtggagcagcacgaaataccacgcgatgccaatgcgaccatagcgcgttgtgccgtgcaacagaacgactcggtccttctcagggagctgtgacaatattcgagaacggatgttaa

SEQ ID NO: 52495 - DNA, 1268 bp, Heterodera glycines
  unsure (1)..(1268): unsure at all n locations
atncaatcggccaaatttcacattgcattggtgcaaagtgaaagcatgctttcatcattgctgaaaattgtgaaagtttgggcgaaaagtaatttttttttattgaaaattaaatttattcatttagcatgttataatttgccttaaagctcgcttaatttattcgggattatttggctttttcaatggcatcactttgtcaataatggcaactcaaatttgcgttttgttcccaaattcacccgtatcatttttactttttcaattcttcgaaatttatgccaaatggtaaaaatattattaagcataatttttttaattcgtttttttaaatcaagggattggccaaatgttccaattatgctgaagcaattaactcctaacaaattgaacaaaattgtcgggcgtttttggccccccatttttttgggacaatcacttcaaagttcgatgacaataattacgccgagttttccagaacaaaatgctgcatttaatgtcaatcctttcacaatgaggacaattatcgaagaattaaaaattggtcgaaaatttaatttaatttaattaaaattaatttataaaaaattacttttcagcaagtgaaattttggcggagaatcctcaaaattgggaaaggatttttaaagagataaattatgaagaaaaatttgagcattttgcgctgattgtttgctcacaatcggtcggcttcgacttcgattcgtactcatcaaactgtgcctatcagaaaagccgacttcggcaaaatttgttgggatgggtcaattcagtccaagcccaattggacaattatcatcagatcccaaaatttgaacaaaaaaccatttgctacatattaaagtgataaatttaattaactctcgattcttttttttaaattttcaaatttagggaaaaatcattttgcactttttggctccttggcctttcactgaaaagagaatttaccacagagaatgaaaatttgaatggattggtgccaatttatcagcagaatcattcgaattcaccgcgccctaaacattttttaatgagttccttctttacaagtgcacaaaagcttcacaaaatgtataaaaaagtgcttaaaataatttttaaattaattttttgattttttaggattgatcaattaaagcatttgttaaatgaatctgaggaatttgacgaaaatgtgcagaatgaaatgctattaaatgcgtaattttaattgatttataatgaaatatttttgcttcaataaa

SEQ ID NO: 52496 - DNA, 1363 bp, Heterodera glycines
gattgggccaacaaatgtgagggcgatgcgcccgtgttgccctgtcaggatgtgaatgcgcccgacctgtacattccgttgatggcgttcatcacctatgtgctggtgtctggttttgtcttcggagttcagaaaaggtatatatatatatatatattttttttttttgcaattcggtttcgtttaaatttgttaattttgaaaataaaaaaaaaatttctggtacaattggcgaaatcgcggggatacacccatcactttttgccacaaagatctgtacattgaacatttttaaatcaaaaggttgcgattttcattgaaatcggtgctcaagcgattgcgcaaatttttcattataaaaaattaaaagaaaattacggttttttcaaaaaaaaaaaattcggacatgaaacgataagggggggacaaacgtagtgcacccaggcgttatatcgatagacatggaaaaaaaaaatttttttaaacttaaacaaaaattgataaaatttaaaaaaacgatatattttcatctgcaaacatgtttcatttcatggcgacatatagtaaattattttagattccctaaatttataaagcatatctaaccaattaccacaaccaaaagtttttttttcaaaaaaaattttctctttttttttgcaggttcagccccgaaaagcttggcatgctgaccacaaatgcgttgttctatttgttccttgagaatggcattgtgttcgtgatgaaatacgcgttgaacatttcgcagagtttgaacatttggcacgcactgtcctacagttcctacaaattcaccgggtctgattttttggcatttttaaaataaatttatttttccccactttttaggatggttttgtgccttttgctctatttaattggcggtcgaaaagtgtattattgtgcactaatttacttcatattggcaactgtgtttttcctggtaactggatttgaacctggactcaccagaaatgcaaacccaaagaaattttttatttttatttttttgaaattggaataaaaatagagttaatgccattttgcttgctgtttttgaaaattatttttttttattcaattccgaacgaaacaattttttgatttagcaaatctcttatccagctccttataatttaaatttcaaaatttttcaatccattgatttcatcttcaaaaaaaatctaaaaatttaattttaatggtgccaaattcagttgcgcagtctgaagacgtttatcctggacatgggctggagcccgcacagcgggcgcaagcggaagctgtacctgttgttgtccatcaccgcgttccagtcgctgatcatgtggttgttgaccag

SEQ ID NO: 52497 - DNA, 1330 bp, Heterodera glycines
atggagcgtatcatgaagtcccaagcgtatgccaaagcgcgcgacccgtcccaggaattctatgccaagatgaagaagacgtttgaagtgaacccacgccatccggtggtccgggaactgctccgccgggtccaggaagatgcggaaggtgaaattttggcaaatattttttcaattttgtaacattaccacaatttttcttggtacacagatccgattgctgtctccaccgcccacttgttgttcgagaccgcaacactgcgttccggctactcgctggacgaccaagttggcttcgcggagcgcattgagggcgtaagttttttgggaactgtgcaatagcaatcaaatagacagacggacggtaccaaggggacgagggtccccacagggaggtaaatttaggagaaaaaaaacgaaaaacctataggcctatccaaattttttttctcttttgtgaacccaaaagccaaaaaaacccgtacgccgtcagggaacttgataatttgagcgaaaaatccaattttcatccattcatttattcagattttgcgcaagacaatggacctgagcgaaaccgccgaagtggaggaagaaattgagccgctggaagaggaagagcccgaaaagaaggaggaggaaggaaaggaagaagacggaggagaggaagatcaacagaaggaggaggaggatgaggaaaagaaaattgttgtggagggagaggaggaggaggaagcggcggcgcgagacgaactctgaagagagggagaggccgcaaaatgacgagcttttttttggagggggtattatgccttagggcgcgaaagaaatgatgatctgttgttgtttgtttttttctttttgactgattgttgcatttgatggatgttgtgatttatttgtggggtttagccggccgttattcgttcgttgattattatttattatttggacaaatttgacacacccaccacacactttgtttcccattttgagcaaaaaccgagaaaagagctttatcattggacaatgttcatgtttctgtattttatgcctgtgggcaatttgtgtggccagtggatttccacgaatttaaaaatttgcataattttatgaaaggtcttggcaaatacctttcccagtagagctgcaacctggacccaggcctgggtttttcccgggtccaggtccatgccatttttcgtcaacctggatttttgttctgaaaatataggctatgacacgcctgggtttttttgtccagcaggaaatccagttttttcgaaatgtcgagctcttaaaaaaatttccatcggtaggattaaagaca

SEQ ID NO: 52498 - DNA, 117 bp, Heterodera glycines
agtgcgccgtcatgttctaacttaactttgtttcgttttgttttaattttttctgctggtccatattatataatttaaatagccttaatttagtttataaactcattaaattataaa

SEQ ID NO: 52499 - DNA, 106 bp, Heterodera glycines
cgggccaggacgttttcgcgtggccgttttcgcgtgaggtacgttttcgcgtggccgttttcgcgtggttgcatataaaaaagaattcataactcacattatattt

SEQ ID NO: 52500 - DNA, 787 bp, Heterodera glycines
atgaattctcttaaacgctttcaactcccggagcaagggacacgacagcaagaggagttggattcagttgaaccgaaacacatcagcgatgtggtcaacttcaattcggccggcgttttttatgttttgggaaaagtgacaaatatgcagtaccgtgtttacaaagtccaaattaaattaattaattaaattattaatttttctgtttttaggcatgcccattccgttccaaggggctcatttgccgccgaaaattgtccgatgataacatgtgtgaggcttgcggccaaaaagcgattgcccccatccacacggtgtttgtccgtcttctgctgcaggatgttgaacaagcagacattgctcaacgtgtcaccatgttttcgagtgttgccgaagagtttttgggaatgaaagctgctgaattgctcgccaaggagaaggagccggaaagccttgcgaaacacttggacgatttgattgctgtgaagctgatcgcaaaagttaacattaaggttttttgttgatatttattatgtatttgacaaaccacgccctaggcgaacaatcagacgtacactggatttgattggattgtcaaccttttcaagaagtgcccagggaatgatgacagtgatgtgccaaaagaaaaaaatgatgttgatgagattgcaaccaagaaggccaagaaaaattgatagagagagagagagagaaaaatgattcatttgttgtgagctttaaaaaaaaagattgagcatgtcctttacttttttttaaatccattaaa

SEQ ID NO: 52501 - DNA, 120 bp, Heterodera glycines
atggccaaattaattaacggcaatgaaattgcgcaacaatttttggacgaagtggcccagggaatcagccgaattcgagaacagaacagcgacttcaacgttggcttggccattgttcag

SEQ ID NO: 52502 - DNA, 1052 bp, Heterodera glycines
atggactttgaccgcttccgacaatacctgacttccggatgtggtgtcggaagaaatgattgcaaagatgtccgaattgaatgcagaaccaattctattcaacaattagtaagtacgcaaattcaggcccttagccagggggagaggaattccccctctcgccaaatcaaaattattcaaaaaatgcattttttaatttcctccattttcttaataaatttgacccaaatttttttatgagttttcccaggaggagaattttttgatgatttggtcaaaattgtcatttttgggaaaacttactataaattccgactttttctgcccggcgttgaaaattttgaaaaacaaaacccgagagaaaacattttgtccgatgagcaaaaaggtcttcgggttccccgctccgaaatttttggctaagtgcctgtacacaattattatacagtcatggtcatatctttagactcactttaagtattggcattaagaagttaaaaataaaccaaattattttaaaataaacttggtcggattcatagtaatcggaacgcgaagaaaaaaatctttacgtgggaaatttatcgaaaattttgttattgagtttgaaaaaaacttattgggcacggaatacgtattaaggactaacaaataagagaaatttatctacaaaacctcttttgtttgtttacttactagctttctccgctgagttttggttgaaaacaattattttacatagtaattattcttactgtatgatccattattttcttcagcctatttccccatgatagtagtagagtcttgcgactttaagtttatagagaattttgtgctctttctaaagatctttttgttttctccagaaactttttccaaccctaagggatttactaaaaatgaaaatggctaggctgtcagttaaacaaagtttttagtacctttctgcgccggttgaggacgcattggaagctgctgcaacggcaataatccaaattcatgttgagaaacaatacggagacatccttgttttcgttgaaggggaggaa

SEQ ID NO: 52503 - DNA, 488 bp, Heterodera glycines
atgaagaggaagagagtgtgccgagaagggaaatgtgtgagtcgagggggggaggacagtggcggttagagccataattgaaggtcaccggaggggcagcagatggaagcaaagcgacgggaaagagaaaataagggaccatatcttttttagcccaaaaattaacacattttccgagaaaaaatttaaaaattggtatggactaaattatataataacgagggctgggaatttggctctaggaaaatcggacactggaaaatcgacaccaactttaaattttaaaaataattttttgattctttgctttaatatttaaaatacatataaatttagcataaatacacatcacaaattacctataaaaatggacaatttaaacaaatctcttgggatagggattatgctttcttaacgtaaaaatagcaattggaaaatgcgccagtaatacagtattttgtaaaaataatattctgtagcaatatgta

SEQ ID NO: 52504 - DNA, 588 bp, Heterodera glycines
atgcggaaaagaagaaaatcgcgttcaaatgagaaaagccttgaaatggtgaaatggcctcctgcaaaagccttctacaacgcttacatcaaacaaggtatatatgcaactctacaagctctaaattagtgttcttttgatatttcgcaagttttcctattctgtaaggattccttacatgtgaatttattttgccctatgtgtaacaaatagttacactacgcttgaaactaactaagttggaagaactcttacatatgagcatgcttacacacaggttaatcaataaatttcatgtaaagcctacggccgaggcaccgatcaccaattccaaaaagcagcaaccatcgctggacgcttccgcgcaaacttcttgggatcgtcgaccgctcgattggcgtcagccgcgtggtacgccacccgtggagtttactacccaatcgaggactgcccacccattcctgacgatcaggacgggtatgtgccaccagaacagcctggactcaacgcggacgaccaacctgtcactcttgcaaaggcattgcaagatgttagcaattttttacgtcttcaattttgactaataaa

SEQ ID NO: 52505 - DNA, 1903 bp, Heterodera glycines
atgtactctcgtcttatctccaattctcctcttccacctcatcctcttcctcgtcgtcacttgcgccagcagcagtcggcgtcggcgtcagcagcgcagtacagatggcttgggcaacaggaagagcgaaaggttgctgcaaatgcacggcgtcagcagcgcaaggaattggaagctgggcccatgtactgcagtttctgccacttgttcggcacccatgtcgtcagcaactgtcctggtgacaaaggtgtttttttggaaatttaattttatttatttaaaaatttgaaaaccaaattctatgttttctaattttgaaaaccaaattctatgtttttctaattataaggaaatggatttttaggaataatcgccgccgcctgcgaagatggtggacttcaggctgagaatatcattcttttttgctgctgccagtgctgcaaattgcgcgggcacaagccaaaggactgctggacattggctgcttggcgtatatttatttatttatttttttaaatataaagacgacttcaggtgaaaaccttgccgcaattgcgtcagcaggcaaggaactcacgttcaagtggggaaaacgccgtttcgatgcgcgcggctatgccgagaaaatgtgcatcccacttgcgtcagcatgggatgtgctcggtaaggacaactaccaattttttgatattttataaattttcttaattattgtagaggaactcagagcggcagcgaaaagtgccaatgaattgtttccgccgcaatcgacaaaatggatgtgttttgcgtgccaacagacaagccaccgcaccgtgaaacattgcctcaacaaggtttaaaacaaatttttttcaatttatcttatttatttctttaaacaggacattgtgcgcaagtaccaccagttccttcgcacctgtccacaggataagcagacgatgcggctggttttgtctgacaagcgcggcttggacggcaaggtgctctgcgaagttgtcgagggcttcggtttgttttgtttcgtggttattgctttttgttctgtgatttaaattttgcggtttttttagacgggaagatcgtgcgccggcgtcagcaagaagaggaagccaaagccaaattgcgtcagcaagaggccgccgccaaattgcatcagcaagaggcggaggacaaattgcgtcagcaagaggagcgggagcaccttcgttcccttggggttagttttgtctcactcagttaaaaaatgcttacagctagtacagtttattctgttagctgttggctttacttacatgtcgtgttttaaaaaattgttttacagcggatgcccgcagcgctgctgacgttggcaaccggtcatcccgtcgatcatctggacgctaagaacagcatcgtcagaatgctgatgcagctggctgaggaggaggaggcggagaagaccccccactaattcttttttttcatatatttttgttttgtcacccccaacggctgtccccattgggacgggcgggtgggtggtggccggcgggtggccgaatgttttgaaaattaaaattgcgatcaacaggcgcctcaatagcgaggcgtctctaacccaaacggccctctttagggccgtaagagtgaaggaatacagtctgcccgccgtccacaaatttataactcatatatttgttctccacttagccatagctgggggatatgctagtgtaagcataactatttcggtaaaatgtgtattttacattagtattaaacgcttacactagcccgtctcccagccagcaaagacccctgccgtttttcctcaaatctttgaggttttttacccggcgggtcttcttctcaccccccccccacttcatcatttattcttttttattgtgtcagcaataaa

SEQ ID NO: 52506 - DNA, 557 bp, Heterodera glycines
atgtcgtcagcaactgtcctggtgacaaaggtgtttttttggaaatttaattttatttgatttaaaaatttgaaaaacaaattctatgtttttctaattataaggaaatggatttttaggaataatcgccgccgcctgcgaagatggtggacttcaggctgagaatatcattcttttttgccgctgccagtgctgcaaattgcgcgggcacaagccaaaggactgctggacattggctgcttggcgtatatttagttatttattttttgaaaaataaagacgacttcaggtgagaaccttgccgcaattgcgtcagccagcaggcaaggaactcacgttcaagtggggaaaacgccgtttcgatgtacgcggctatgccgagaaaatgtgcatcccacttacgtcagcatgggatgtgctcgctaaggacaactaccaattttttgatattttataaattttcttaattattgtagaggaactcagagcggcagcgaaaagtgccacattgtttttcattttaattgtaaaattatttttaaaatttaattattaaa

SEQ ID NO: 52507 - DNA, 565 bp, Heterodera glycines
cttcaaggcagaagaggtgctgaacaactgaaaaagaggcgagaggaggaaaagcgcagacggagagggcgagacaaggccgatgggccaagaaaagtgagttttttcatcaattttatatcaaaaaaattaaaaaatcattttttttgttttccagccgctacacaaccgaatcccaatgccgaaatagcaccgcagaacgaagcagggccgtcaacatctgctgcatcaacggaagaagcggtggagcctccgccaccagctccaggaccagtgccaacgccagaatggacgaggaaattttggaatttggcttctcggcaaaattcacaatttttcaaaagtgttttgtccgattttattgagataaaatcataaattttaggcacaaattttgtccccaaatgacctggacggacttgagcgatcaactgacgatttcaaagtatttttggcagagcaggaccggatgagtgcctttctctcaaagaaaccaaggccttattctactcttccactttgtgccatttgcacgacaacatcaattcattggccttttggatga

SEQ ID NO: 52508 - DNA, 79 bp, Heterodera glycines
tagagaaaaaaagataatgtttttctctggcactctctatttattggtacacatctcgttttttgaaacggtgtgtgta

SEQ ID NO: 52509 - DNA, 548 bp, Heterodera glycines
atgcctgacgcggaacaaattttgcaacaattggagcaccatttcgtcaacaattggctgctggacaccggaaggattgacgaattgaagcgggtttgttttttcaaaaggtttcccatttctgaattctcatttttagaattatgaagaaagggagggtgaggatgacacggataaagaagcggcggaagaaattgatgacgaatgccaaattgatgtaatttaacaaatttggattaaaggatgattttcaaaaaaaaagtgaagtaacaaaatgttttatcatttttgtttattttcagaatatttatttgtcattttacaagtcttattttgcttaaaatcaccaaaaacgtccgttaacatggatcggattcgaacctggaaccccccttttggtgactagcacatataccactgagacaaaaattcaaatctttttggaactgggaggaaaaaactgaaacggtgtgttaagttaactaaatttatactatttaaagagcttatagtggacttaagtctaaaaatttataacgatattatta

SEQ ID NO: 52510 - DNA, 980 bp, Heterodera glycines
atggctcttctgaaaaaatttgaatcaaagagtgcacgagttaaaggtgtgttaatcagttaaaaacacaattcataatttttatacaaatttttgtccaggcatttccttccatcccacgcgtccgtgggtgttggcctctctgcacagcggagtcatccaactttgggactaccgactgtgtgtgctcattgacaaggtttttcaatggaaagctaacaaattctgggcatttacgacccttttataatggagggggagggtgatggaaaagccaaaagtggtgctaaatagggtaattaatttgttttgttcttttctaaaagaagcaaaacccctttgggttcttcgaaattccacgcttccccctcatttataaaagtgccatttaacttctcgtggttggagaataagtactcgcatcaataaatgtctaattcattcgcattcagtttgacgaacatgatggacctgtccggggctgtgacttccattcgcagcagcccattttcgtgtcgggtggcgacgactataaaatcaaggttaatacttttactctctgcacattaattagtcaacctcataacagttaatcctgggattttttcaattctattgaaacaatgtaattcagaggcttacaattactttattttcttgaaaatcctaaaaaaaattgacgggttcgtttcaaagcaattttggtgccaaaaagtatgggaatgaatgtaaatgcccattttaattgtaacactgactaaattatccatttcggagtttctcagtccgttccatgtccaatgttcaggtgtggaactacaggcagcgcaagtgcattttcaccctgctcggccacttggactacattcggaccaccttcttccacaagcagcacccgtggattatcagcgcatccgacgaccaaacggtgcgcatttggaattggcagtcgcgcaattccatcgccattctcacaggtt

SEQ ID NO: 52511 - DNA, 633 bp, Heterodera glycines
atgtatgtggaattgctccggtaaactagaaaagtaccaaaagattggaatggcccttttcaaatacaaaaaatgtcccctcctctcaaaaaacctgtgagaatggcgatggaattgcgcgactgccaattccaaatgcgcaccgtttggtcgtcggatgcgctgataatccacgggtgctgcttgtggaagaaggtggtccgaatgtagtccaagtggccgagcagggtgaaaatgcacttgcgctgcctgtagttccacacctgaacattggacatggaacggactgagaaactccgaaatggataatttagtcagtgttacaattaaaatgggcatttacattcattcccatactttttggcaccaaaattgctttgaaacgaacccgtcaattttttttaggattttcaagaaaataaagtaattgtaagcctctgaattacattgtttcaatagaattgaaaaaatcccaggattaactgttatgaggttgactaattaatgtgcagagagtaaaagtattaaccttgattttatagtcgtcgccacccgacacgaaaatgggctgctgcgaatggaagtcacagccccggacaggtccatcatgttcgtcaaactgaatgcgaatga

SEQ ID NO: 52512 - DNA, 867 bp, Heterodera glycines
atgtgcaattttagcaaaaaatcagctaataaacaagccaaattttacataattcccggctgtgtgttatcgctggatactaatagtcaaggttaggctttatttttttatatgctattatgtgaaaatgttttggcataataagctttttttcattcagagaatatataacgcgcaagatttagttgcacaatagtcggctaaccacaattatcattacaagcgcttggaattatatgtaataaaaattgcaaaattggatataaatatttttaaaaatgccgaaatatgctaaatatattcaaaaactcaaaaatatgtacctaatgtaaataaatgatttttgattttttagaaaaaaatatattagaaaagcatgaaatagggcaagcgcaaaatgccacgaagttaccgaagatcttcgaataacattttgtgtgttttaaaaaatttgtttttatacgactttttgaaaatgccattttatgggtacattttccaattttttgtattttttcttaaggaatttctaaaaattcataaaacttcaaaatataaaaaataaaaatatttaataaaaattgcaaaattggggtattgttttgatcatttaagaaaaatttccataaataatcttcaaaaatagccatattatttgaaataaatttggttttaattgaaataattataattatcttaatttattatatattaaattaaatttttactttaacatttgcctatataaatgaaaaacaaaagaaaagtattatttataatattttcagttgaaaaaatacccttactaatcaaaaaagcattcaactaaatgaattgaaaatgggacatcaattataaaagctttaa

SEQ ID NO: 52513 - DNA, 855 bp, Heterodera glycines
atggacaagtgggctgcacttgtgtaagttaattgggtgggggaggggttaattgcccctagaatgaggcaatcaaagcaaaacccgaaaaatactgatcaccaaaacggtttaaatgcgtttaattgatctaaattaaaacaaaaaaaaacacgaaaatgagggtttttaatcggtgttaaatgggaaaccgaactagtcctaaacgaatcgagaaacacaggccaaatatagactatctgtccactttcagtctgttgatcgccctgatcaacgcgctggacagcgctgttgttcgacaacagcgcgccgccaacgcggacgcatcgaaaccggaaccgaacaacgaaaagccaggtaaattaaaatgaatttaataaaaaaaatttaatttattaatttgatttaggaaatgtggactgggacaaaggaaattcggacaaaagccagggagcgggtacggaaggaaagaacccggatgagccaacggaaagccagaaagtggaagaggatggaccaaatccgaagaatccaaaggaaagccaggaagtggaagaggatgaaccaaatccgaagaagccaaaggaaagccaggaagtggaagaggatggaccaaatccggaggagccaaagaagccgggaacgcgggaagcggaaggaacctggaggaaaaaaggccaaggcggaggcggaaagaaaacgggtggaaagggagggaagaacgcgaaaaaaaggggaaagagagcgcccgatgagccggcaccaaagtcgccgaaaatgccggataaatttgacctaaaactgccaagtatgcataaaacactgatcgtcctggggtcagatccaatcttctga

SEQ ID NO: 52514 - DNA, 508 bp, Heterodera glycines
atgttttaaatgccgatcaatcgggcttcgagctcgagctgcatcaaaaaaggtcgttggctccaattggaaccaagcttgtggaatgtgttgtgcagtcggtttcaagcacaacacatagctatacgatcatgccaatcattacagctgatggcatgcttttgtcaccactatatattgttattgctgaaagacaaggaaaatttcctcaaaaaggaatttttcaggtttaaattattttattaatttttaatttgctaaaaattaaggccaaaaatgtttttgctgttccaaatacaagccatattatgaccaaaaatttaatgatcgattgggttcacaatgttttggtcccagttttacgccctggagaacaatcattattgttggtggatagttggaatggttggaatgattttcgactcccggataatgttaaattaaaagtgaagcaaatcccaaaacatgcaactggaatatgccaaccattagatgtttacattttccg

SEQ ID NO: 52515 - DNA, 173 bp, Heterodera glycines
gcaaatatttatttaatttattgcgataaaaaaagtttggcacgtcataactcggcactcagactcatttcgcagaaaataaaaacacttttcttaagaacccatgggtgctctatccacccaccaaatttcatttggaaatcccacggacacctggggaccttcctttgtca

SEQ ID NO: 52516 - DNA, 569 bp, Heterodera glycines
atgaacacattcagcgcatttttgcggccatgtgggacaaggataagttccaggcccattacaacaactgccgacattggagtgacggattttggtggaaagtgtaagaaaattaattgtaaaaaataataataaattttattgatacggaaaataatttaaaaagacgttttctctaaaactaattaattctcagttttttgtgaaaattaattaaataacattttcagtggttttttaaaaagcaaaaaaattcactgatttttaaattgatatatgctaattttctaaaaatttaactgagtttgggttggaaaatctaagttttaatatgaatttttaatgtcttaattaaccttaattgcttaaagacaccctgatgagtaccaaaagaaaaaggcagccgaagaaaaaatgggcgcgagaccgttggatgtgaagagttaaatggcaaaattaatcatgtgttttgagagaataatgaaatctttcgattttattcaaaatttattttggtatttgtcacaaataatcatatttacacagaaaaaatattgaaagatatcaaa

SEQ ID NO: 52517 - DNA, 438 bp, Heterodera glycines
atgggaaaatgctcttcaaaattagtcaaatttttattttgctttttacgattaatactaattgggtcattggagcattacctgattcaactcaatgtgtagcaagcacaacaatcagcaaacaatttacgaacatttagacatttttcatttgaaattattttaatggagaattggtgtcggacatagacaccattgatggtttatatccgggtgtcaatttactcgcataacttgtatcaagaacgccaaaacaggtaacataattaaattaaatgaataaaaacataaattttgatttttcaatgtttgcaggtggtatcattcaacttcatgatgcgtatcatattccgcaattcacaactgctagacagtttgattaccctttggtctatcgacaccgacaaacatctatgcccaagtatggcaattcattaa

SEQ ID NO: 52518 - DNA, 948 bp, Heterodera glycines
atgtctctttttcttcttcgtgctttgcctcttttcttccttttctctctgtgcttcgctgcctctcccttcaattttcgcgcaaatcattcgcttggtgccgaaaccactcaacagattgtgcccaccgtggcgactgaaacgaccgacggaccgaagcctacggaaaatgttccccttatgttggagaatgacaatgtcaccgaagttgccaaagttgaaggacggaatgccagtgacagcgaaattgaaatgagggaggaccaaggtttgcaaaaggaatgtaaaaaatgggttttcattttcaacggattcggaatggatttccttaggtttttaatttgggatggatttaatcgattatttcaaagtgtgattcgctttaaatatgtgtcatttgtttagcctttgccaacatcactgctcattcctccgacaatgcttcgcttactgagagttgtggcttcttttgccgaaacggtactgccaacaaagcccgaaaaacccaattattttctgcgtttagctaaatattccatacaaaaccatttttggcctaaaaaataatgcattccggacagtgtcctctaaaattctgtcagatttgctccggttctgccaccaaaaattccttcgtttttcagtgcctttattcgtcggcttcatcttgaccctcgtctgcgtttctctgctcctcattctttccattgttttgtaccgttattttacgcggcgcacttacgccgacgagtgaaaagacagcgaatggacgcaaagaaacgatgattcttcttaaaatgtcatttcattttgttgagccatcaatcaatttgttgcttttcccttttgttggcctcctttttgaggcctttggatttattttttgatcattttttgctgaattacaatacaacactatgatttgaataacgtttctccttttgatga

SEQ ID NO: 52519 - DNA, 116 bp, Heterodera glycines
agtagggatgcgatttttggattttaactgcgcgcctaaagtgtatataaaagcaacctgcttcattcacattcacttttgccaacaccaccaactgttcactcgtaatttctgag

SEQ ID NO: 52520 - DNA, 818 bp, Heterodera glycines
atgaatttaaataaaattgaatttaaaagaatgaaagatagtttttataatgagaaaaagaaagaattctttgaaagatttgatgactttaaaaggttatgtaaaggcaaacaaaaagaatttacgaaggaattgggaatttcagaaaaagcatttcgaagatggaaaaaagaattggtgccaaaatattataaaagtaagggaaataattagatttttattaattattatttttaagcatgcaaaagacattctgatgaggagaaattaaaaaagttgaagcaatattttaatcaaagaaagaaatccaaagtcagcgatggaataattgcaaagcaattgaaaattggctatgaaacgctaagaaagtggaaaaagaaatttgcttcagtttcgtagatgtaattttggaggatgttattgtttgttatatttgattattttcccattataattttcgttatttgcattatcttttcttagttctgttattaatttccttttcatatattaattttattgaaatataaaattatattaagcttaaatatttattttcattttatgaattacatttaaataacattataaaataatatttttttaaattagtacccaaaatcaaataattcacaattccattagcaaaatcaaaaaattgaaaaaacagcaaaaagcaattaaaacaccagcagaacagacgaacataattaactaatctctattaaaaaataactggaagggaaattaacggggacaattaacaaaaatgagagcacagaaaaatgtaattagataacaaaactaatgccaataaa

SEQ ID NO: 52521 - DNA, 188 bp, Heterodera glycines
aaaatttaaataagttttggcaaaatgtcccccttttcctctttctcctttccatcgtcgctttggtgcttctccttgccgcttctcccgccgcttccttcgctttctatcccgtaccttggcctttgacgacgacgccgtcggcagaagatgacgaagcgttttacgataattatgacgacgaatga

SEQ ID NO: 52522 - DNA, 739 bp, Heterodera glycines
atggaagaaaaaacttttgtcgcagttgaaagacaaaaaccggtgccaaagccacggcgacaccacacaattggcattttagcatcagcagaaggccaactgaaaaacgaacacccggacaaagaggaagcggaaaaagcggacaaatcaaagggaaaaaatggggcggaacggagaaaaagtgtggaagaaaagcacgaaacgcaacagaaatatgggacggacgaacagcagcgtaacggggtcagttggtcattcgattgaccattaggccaattgtccattcttttgacccaatcgatcactctttggccaattgtccattgttttgaccaatcatttaattttttgacccaatcgatcactttttgaccaattgtccactcttttggccactgtgaccaatcacttactcttttgtccccaaatcgatcattttctgaaaaatatccttgacccattttacgctttctttttgaccaaccaatcattttttggcctttcatttttattctttggcctcttttaaattgtcaaaattcagacaattcgctcatcgcagcagccaacaaaaggccctttcaaacaacaaaagtgggaaataaagacaaaaaattaacattttatcacaccaaaacaaaaagaaatgcccaacggaacatcggaagaccaaaggtcgagggaaagcgattgccaatggtcggcaaatggcaagacaaagcgaatgaggacaaagagg

SEQ ID NO: 52523 - DNA, 610 bp, Heterodera glycines
atggcggctttttgcgcggattattttctccgtcgccgcagcgaaaacactcgtcgacgaacagaacgacgacaagcggcagaagaaggacaatggcaaggaatgaagtgtacggaacgctgtgggaagagccggaattgaacaacggcaacaatagcagcaggtcgagcagaacggcacaaatgatcaaaaatcaaggggggatgtctgatcagccaaatttgaggaatgacactgatcagccaaattggggggactggcaccgatcggtcaaattaaaaggaatggtactgattagccaatttcgagagtatgacaattaattaatcatgggtattaaatttcgtttatttttcagcgattggcttgcccatcaacaacgcatactttttgcgcgcgaagctgaagaacaacagaaaagcggcaaatcctttttcgcccgacttaagggattcaagcggacaaattccactttttctttgggctcaaaacgcgacgacaccaatggcttatgcttcgatgacagcagcggcactttaacacaaagtgacgcccggggaaggggtggggtttgaccatcatttttaaaaatcttgccaaaaatactaaa

SEQ ID NO: 52524 - DNA, 2571 bp, Heterodera glycines
atggcggaaaggcaacgaggggatgagaaagagtgcaaaacgccagcggaagagacagcgcaacagaagcaaaagtgagaacgcacttggaaccccgttgatcattaattagtgcaaccacaatgatcaacaaatcacttaattaactgtttttgattttagcaacagcacaactccgtccgagcccccgattcttttcaaaattttaaaagattgatttacgcgtattatttataatgccaaaattaaggttctgaaaaaaaattaagtttccaattagaagtttatgttgtttttttcattttttttcatcgtttagctaatttatttgttattcttaactttttgattttgcatttttataattttagttttgccattccttcggcggaagaaatttgttcgacttcatcacttcaccgtcgagccgacaacagtttttccatgaatagaaataagagcgaccttccccatatttcgctgcccatcaaccgtttgttgcaacagaaagggacaacgatggacgcctttcctatttcgggccagcatttgtcgaccacttccaaccgtttacgacaaagcaacgccatggaaggctttgagcgtcgcttgggtgatgagaatttgggttggaagaaggcgaacgacgaacaccgaaacagtacgagcacaacgaattcaagcagacgaacttcaaaaacagcgatagccgcggtgagagagaaacagcagaagccatgggaaggacaacgcattcgcaaacattaaaaggatcatttacctaaaaccaaatgaaaagcaacttaaaaaataacaaaaattgaattacggggagaaatgtgagaaatattgtgtggtttttttttgaaaaaatttaattgatccattagatgggttcgtatttatagcaattgctttcatttctcatgtcatcattctcccaaaaagaacacatgcgcgccacttgagtgagacggggtaattagagcacttctctttcagcgtcgtctttatccctttttatattttatatgggtaaagaggcgctcatttgctaacccatttccattattaactgctaacaccttttcgttttgtgtttagtgagtccattttcaggtgcgtcctcagctcaaacaaatgcaactcaatggcatttcgacaaaactccgaaaggcgcccgatgtgccgacaaaggcacacagttccgactactcattgctgggcgaaatgtttccgcaccggaaaagcagcgaccagcggaacagcggggaaattgcaaactcacaattagccacggatggcaatgtggacgaaactgcgagacacggcttaataatgggtgagtgaaagggggggggggaaactgattgattgggggcactcatcgtcaaatattgtggcaacagatgaggatgaccagcacagtttggctggcactgatttcaatgagccgtgggattccaatgcgtgggagaatctgatggatttggcacgttttggcgatggtcaggtggaggaaagtccacgcgcgtcgcaaatcggtctcttttggagtgtttaacaaaaagacaatttaattttcagaaaacgacagcttggcagtgatggagaaagcggcaaaaatggtcaattgtttgcgcactcaaatccctcattttacgaccggagaacaccggcggagtttgatgagagtgcacgggaccaactcgatgatggacatttctgggatcggctccaacaaattgagttatccgatatcaacggaagccgctaacgaacccatgagagctaacggactcaattttggccaaaatagcatcggaaaacaacaacaacaaatacgccatcatcggcccgtccctgcctgctcgtcgtctgtcgatgaactcaacgcttacaatcagccgaacaaagtcacgtccatttgtccttctctcgtccccgtctttttgtcctctcgacttcgcaatttggcacacgaacatcccggagaagaggacccagcaaaagtcatccagcgatatgttgaagagtgagtggacacggaatttacagcccaattttgggtctgatgctttttgttttaagcctttccaaggatgaccaaactcttttcgaggccgctttgcatcagttcatcgaatgcactttgctttccaaggagaaggatccgtacgtggtcattcggcgagtgcgacagttcatcaccgggtcaataaatcaccagtgttttggcgtgacgctgcgctcccattttcaggatgaagaattatttgatgaaaatcggtgaggccgatttgcatccgatcattaagcgggagagaagtcgactgaacatcgacgaattcctcaacatcgatgcgatcctcgaagaagttctggtcaagattctgttgtgtgagttttctggagccaatggggtttaaaaattagtttctaccatttatttaattatattttcgtttaccggtcggtcacattttaattttcagccaaattgaaggcccatttgtaccgtctgatgattttggagagcaccagcaacggcgagctgagaaggctgtctga

SEQ ID NO: 52525 - DNA, 476 bp, Heterodera glycines
atgccttattatgtgttaatgttgtgcctaatgtttcacaccgtatttatggaattcattttaccaaaattttccattttctacaaaacagaaatgaatcaaattgtgcccattttaaaaaatgaaatcaaaaaaatgttccgaaacaaggattgggattatgcgacttttgactgtatgcacacaatcgaatggaatctgctcagaattgaccttgccaagatggggcaaacccaaaaatggaaacaaatggaaaaattgctgaaggaatggcgaattttgtacaacaattgggtgctgaacaaaagtgagatgaatcggccgaatttcgcaaaaataatgcaaaaaattgtgcaaaatttggaaatgatgagcataaaataaaagccaaaaaattgtttgcgaaattttttttttgttatcaaagtttgttttattttctttctgttactctttcagcagcgcgcgaaaataaa

SEQ ID NO: 52526 - DNA, 286 bp, Heterodera glycines
atgcctggacagagtaggagggttcattcctctaaatatgacctaaaaacctcgaatttattggcataaataggtcagaacattttttttatcgtatatataatattggttattcggattttatcgaaaaaggaaaattctcttaaatatttctaaaaattttctttggtttagttgaagaattggcctccaaaagtgttgaaacatccaattgatgtcaccgatacatgcaaatttataccaaaatgtttttatggagttgaaccgaacgaataaaagaaataaa

SEQ ID NO: 52527 - DNA, 381 bp, Heterodera glycines
atggaaaacggagattatacggaagccaaattcggcatgttcaaatatgatgtgatcaaaaacaattgcattcattttgtgagaactttcgccgcaaaacttataggagaagagcggctggctaaggcaagtgatggatttataagtgacataaaatctggcaaaatacgtaggtttggttaccccacaaatgcgacacggacatttgctgtccagaaattagctccatgtccaaaatcgggttcaaattttaagttttttcagtccctgatagcctaacatcattatataagtgatagaaaatgattgtttatgataatttgattgttagtaaatttttgaaaaagcattatttaatagagaattaattctcctaataaa

SEQ ID NO: 52528 - DNA, 1742 bp, Heterodera glycines
  unsure (1)..(1742): unsure at all n locations
tttttgaatttagtttatgggcagaactgatgagcaaggaaatttggtatacggcgactttgctaattggcgaacaattgaagtaattaaaataatttgtatttttaattgggtaattaactaattggttgtttattaggggaacccaaacattcgccgaggggtcggaagagatggaaaaggattcaccgaagacgagtcggaaaaagcctaaaaattaacaataataaaaatttaaaaatttaattttagaattaattggttccttagccaacagcaaattgatcaaattttggccttctctgctccgcaacctggcgtaattacttgattactttaattgaaattttgaaatggatttgaatgtaaaacgcataaattggcgttagcgaataaaattacattctttggctactttttaaaacaataaaagaaaattttttttatgaaaacaaatagaatttttccagttttataaatttttatttccggttaaaatttaattttatttttatgggcaaaagttaaattgatatattttgctcataaaccaaacgattttaacttttaaaattacccaaatcaaaatctcagttgacacatttcgtttcggcacatattagtgccagaatttattataaaccggattttaaaaagaacgacgtttaaaagaggatgtcattttcccaatcggtacagaatttcttcatagactctttcgggttggcgcctcgtttttttaacctcaaatttttcaggtttgcccaatcagaatcgaattccgctggatggaggtgtacaaattggcattttttacataaaaattttcatatttatttaaaatatttattttttaaatcaattttttccatttttaggtcacccatggcaacgtgcatctgtttgtcggcggcgccacgcagttgccgaacggcaccgatgaagcggacggggacatgtcggagcagacacgggccgcaaatgacccaatatttttcaatctccattcattcgttgattatgtaaaaaaatgggaaaaatttatttaataaattttttaaattttgaaggaattaagttttctaaaatttttggtccattaaaattggaggcactctctttttttcagatctgggagatgtggcgtcaatccagacaaacgcgcgaaagtcgagaaagggactacccaatggacaattcggtaaattatttatttattaaaaataatttaaatttaatatcatttaattaaatgaaaaaaaaaatttaaatttttttattaatattattccatttaaccctatcataattttttttctttttgtattgttattaatatttttatattaaaatagaatttttaaaataaatttggataattatttattatagattttaaaatattactttgttaaaaatttttctaattttaattatttctcatcattggtttttccatttaaaaagaaattaataaacagtttgatctttttcacatttttctttgcctttaagcaatgctcgagccctcaacattttggctcagcaccgatgcgaccatttcaggtaattaggcccaaatgtacaaaaaattacccaaatttacctaaatatttttaaaatttgaaaatttcttaagccgtggcaaaaccgtgacggcctgaacaacaaatacacggacaacatgtatgaatatgcgccacggccgagctgtcagatgngccctaattgtggatccaagt

SEQ ID NO: 52529 - DNA, 998 bp, Heterodera glycines
atggcatctgccaaaataaccgatgtgttcagacgactgacactgtaaaatatttcattaaatatttattcatttcagtttttattattatttatttcagtcaagcacgccatggccaatgccaccgacggatgtgacaacaccaaatccaattcggccagtacaagtgggtcattttactattttttaataattagtatttaaaaatattaaattttataaaatttagtcctgttacaatgagcacgaatgctgttctgtatggtcacaaaagggtgaatgtcaacgcaatccgggcttcatgaattcctggtgtaaggccagctgtcagcaagtaaaaatcgaaattcaaatatttaatttaaaaaattaattataaaaattagaattgcaaaatataattttataaaattaaataatatttaaatttccttacgcttttatttcaaatacttaagttgcttaattcagtgtcaacctgactatgatctttaccaaggtaattttttactgtttaatttatgtatgataattaagggtttggttttttcttaatactctacccattaaatcgctaattattgtgctgctgctgctgctgcttaattaattaatatctttcatttttgtaagaatgtgatgatcgtcatccgaattgccaaagttggaccagccaagggcaatgccaacagaacaaattttggatggtaaatatttaagcaaataattataattgtttattaaatttacaaaaaattttaattgtcagtttaaattttaaaggcagaaaattgtcgtcaatcatgtggaaaatgccgcgtttcacgtcaacaggtgtgcagcggagggcacgacagtcagcaaaatcagggtaaattcaaaatctcaaaaaagaaacataatgccaaaaaaattaatatacttaaatataatcatagaattaaaaatatttttttaaatatttcaattccgtaaaatagaaaagcataaaaaatata

SEQ ID NO: 52530 - DNA, 1091 bp, Heterodera glycines
atgatttttgaccaatttggaagtgagtttgctaagaaaaaatgtttattttggcatggtgttaaggtaaaatttaaatatttggttgaaataacttttaaattttacaacgcccggtatccccgattcgaatggtattacaaaagccctacatcgcattttcggagaccattgtagaaggttcattccgattttgaacgacttcttgctttttaaaatgaaccgtttattttttcttgaatattttaaataaaaatttatttcaataatttttttctatttcatacatgtttattgaattttttggattttaatattcttaatttgttcgaattctgggttctttgtgcccctattttaagcctcggagccaaaattttgtaatttcgatatcacatcccttgtcagctgtataaacacataaaaccagtggataaattaaatttctattttcattataaaatctgctaaaatttctaaatgattagattcaaatgagtaagttaattgtgggatcatcagattggcttttcttccatctttcattcatcagatcaaagcagacattctgttcaaaaaaatttttttttttcattttatttgttatttgagcgaaaaaacatttttcgacaaattcaatttattatagtccgctgattaccgctaataaagcaattaaattaattttcaaatgaactgtaattattttagccattgtgaaatgcctagagacattggcataactgataattgacactttcaaactgaattttattaggctttaaaatgattccctatggcaacaccatctaaaacatctgtccgctgattatactcattaaatgtactgaaaattaatgtttagtaatttctgaatttcaattttgaactgtaattattttagccattgtcaaagcctagaaacattggcctgacttgatgaaatttcattaaatgcattttccgaagtcaaatggataagaaatcatttagagttagtagatagaaaattttagtctttaggaaccttttttctgtgcctataattttaaaaggttataaatttctttttgattttcgcattgaataaa

SEQ ID NO: 52531 - DNA, 565 bp, Heterodera glycines
atgcgcaatgagctgggcgcaaaccgagtcatcacaaaaccacaagaattctacaagcttgtccttgaccataaagtggtaaatgtctaagctgcttttttgttattaatggccaacaaaatgatggatgcatttaaggaaatttatgcaattattcctttgtctgatgatgtcatcagggtctcgtacaggacgaaaaaaaattttgtggacgagcattcgtcaagcaatattatgctcagcttgtggacaacgagtatgtgtgccttcgttcccagacaaacattccatcatcacatctctcattttataggtcgcgctaggcttaaactccttgactctatgcaacaagttcacgagacggaaggggcagaattgctttatacggtaatttgtagagataaatcatcatcacatcacgatagtgtttctttaggacacagacagcgtgattgtgaagcatcggcgcgatgtttctccacttcagactggcgaattccttggacaaatgtcggaggaatatgccggctatgccatccaatgttttgtttgcggaggtaaatag

SEQ ID NO: 52532 - DNA, 2222 bp, Heterodera glycines
acattgtttctttcattgagagaacagaaggatgtcgtcattcttttatttcttgctgatcgccttcatttttttcaatgttctccatctatcttccggcgaatggattaatgtagagctgagtgtggacccaccaaacttttttgaccgttcattccgcaccatttccaagacttcacctgcgcaacattggttcggctataaccgggacaccgcatgtcatgttgaactggagaggaatatcaatcggctgtacaccaacccggatacatggaacattgccctgacagatgtggataatttaatgagcttaggacggacaacaattgagataccgtcaaccgcattaccatgggcatgttttgggcatggcggccatagttttgtaattttcaatcttcaaaatgacgcgggtgaggtgaccgtgctgcgtggacaccagcaaaagatagcacggcaattgagcgcttatggccgcattttgtttgatcatattgccgcccgattgtacattgtggacaagagtgaacgccgaatcaatgagttgctcattgccgatttggagcggtggtggacactgaataacacggacgatgcgttgaacacaacatcggcacatgttctgagaagcaattttgttggctttttgccggaacaaaaaacggattatttcattgcagctgaccatgtgtacatgatttggcgaaggcgagtgtacaagttccgcattggacactatttcaacgatccttcgtcacagctccagtttctgaccaactcaagcgacattcgcttcaacttcctcttatttgaagcaggtgccgaaaagttgggtgaagacggcgaccgtagaaacagcagatcagctattgttgtaccagcggtgtcgtccaatggaattgaacgtctcttgctcgctttgacttacctattcgatcttgtcgtcatattgcttgccatttgtgcattccgccatttccgccgattgggaactgatggcggatccgcacgaaatgggcatcacgctatggaactgaatgaatatgaccttttccactcgctatcatttcaaaacaacaacaatgggggcggagcctatggtgttcctgctgcttacaatcctacaaataccacgctatcccaccagttgaggtcttgtgccactatttaagcggctcacatttttgaatttgcccatacacatgtacctgcacaaaagttacaagcgctttttatgatcgacaaatataattatattgtcctggccgttgtttcatgcaaaaagcgataaagcattttcaacaagagcttgcacttgacagcgttgaagcgctgtacgcctattttaaagaggagattttgagtgcccctggtgaatattacccgaatcctctttgcgtgtataattgtgtgcacatttccaacgacgatcatcccgatttgccggtgctcgttgagggaacgcttgatctgattgccggactggaactcttctcaacatgctacccgaagacggaaaccgggagtatcgaatggtaaacgagttagagcaataactgtatttaatttttttcttaaatttaggagcgaacccctatatgtggagctaaaggacatgaagatttgcccgggcgagtcgcctcgttgtcgcttcgcacaaaccaacaacagcaacaacctgttacccaatcgactgctgatcgtggacgagctggacctgtggctgatggacaaccaatacaacccggggggcgtcgtcgaagaagaagaagacgagggaagcgccgaccgcttaacctagtgaaggcactgtgtcgcttcaacgctgggtgcatgccatcgcttttgccgcaaatgctccagaagagacggatggaaaacttacgctttcttggtgatcttcggctaaagactgttcatctgaagaataacattgaaatttcggccaattcattgtcatttcatggtgcggatcgtctttgtgcctaccgtggctatttgtcaataacggtagagcagcacttgtacgctcgccatcgcgttcgtctcagattccccttccttccatgtgttgtccaacatgggggcaatcaccattgttattattatccaattgaactgcttgaaatatgtttaccgcaactgagccctgattctaccaattaacatgtgtttttttcaatatgatattttttcgctaccgttattttcgagaaaataaa

SEQ ID NO: 52533 - DNA, 638 bp, Heterodera glycines
atgtcatctgagactggtgctgaggatcctaccgaacaaaatgcatttgatgaaatgacacaagatcgtgctatagaattagacatatctataaagggtaataaaattgcttaaataacaatattaaaaaatacgtaaatttataataaagtgaaaatcgaagcaataattaattcataaatttcttactgtatttaaggcctttcaaaacaaaagcgcaagaaagggcaatttgaaacgaatgatttatgtttctttgcgccaaaatgcaaaaacaatgtgctcgaagaaatgggatacgccatcattgattgtggtcacaagtgtcattgggaaggagaatatgcaaaatggtaaattaatttaaatattcaaaattaaaacaaatcgattaattcggaaaattgggcaacaaataaatttttaaaaaagcaataaaatttaccatacgttttaattaatttcagggcttctgatggacattacaagcgatgtcacaaccaaagatgtaaaaaaaatgcatttataaaatgtaaaagctgtaaaaagaagattggttatggactatatgaatgtggctgttattgcacaaagaatgcccatgacatggacatccatgcagatactcttgaaaaaat

SEQ ID NO: 52534 - DNA, 229 bp, Heterodera glycines
atgtctaattctatagcacgatcttgtgtcatttcatcaaatgcattttgttcggtaggatcctcagcaccagtctcagatgacatttcatcataaattgttgagatagcatcacttataaatataggttcaatataaaaatattgtcaacaaattacagtataaatcttctgaagcaatggagcatcggttcgcaatgatccgtcctattgaagatcttgggttttag

SEQ ID NO: 52535 - DNA, 259 bp, Heterodera glycines
caaccaaccgaggggagaggtggtagaattacaatcaattgccaataattcaaagttgataataaatgatgaatctctatatctgtattttttgcacaaatacgaagctaacccaaatgacaaggcatctgctatgattgctactaaaaaacaatatggtattactgtcgcggaccgattcaaattgaatatatggtggttaaatttagttagaggatcatccatgatgcaatgctgcaggaagtgttggaacaattaa

SEQ ID NO: 52536 - DNA, 449 bp, Heterodera glycines
atggcgaccacccatcagcataatcccacgcccgaggtgtccatttttgtccatgtttttttcaacacagtcaattttttttaaccaggtgaaggagctgtgcaagtgcctggcgctggacgacaatcagctgcgcgacattatggcaaagatcgagatggactaccaaaaaggccttgatccagtgaccggtggagaattttgaccatttttaccccttccttcccctccctctcccattttcagctccgacagcttgcgtcaaaatgcttccgacgtacatccgcgcgattgctgttggcgaagaaaagggcgaattcctggcactggacctcggcggaaccaattttcgtgtcctgcgcatcactttggagggcggctgccgttctacgatgcacaacaaaatctacagcatgcccgacagtgttcagcaaggcaccggcacggag

SEQ ID NO: 52537 - DNA, 931 bp, Heterodera glycines
gcattaaatgccaaagtttactccctccacccaccacccaaccccattcaatgtctttctttcttttttaggatgcttgcggtcgtcccggccttttctcctctatcattaagggttctcagccgagcagtagcggcggactgagcggtgctccgtccgtctcgacaatgtctttcggcggaacggcgcctccgcgcaaatcggtcgggcaaagcgccggcggagatcaacaacagccgaacaaatcgcagtcgagcagccaactgcacggaagatccatcgacgtggtcgaaccgtcggggacgagcacgggcggcggaggagaacgtttggagccaggcgagtgaataattcaaacaaaagcagcagagggtttaaccgcttggccatgcgtctttctttccccaaggaatgcatccgcgcgccaaatcgatgggcgaaacctttttggtgtgtgtccacaacatttccgacaaccacccgtacgccattttgaggacaagcatcaacaacaccgcgcgggatatcatcaaacaggtggccaagcgaaggaaaagcgaccgtcgaagccaaaatctcaccctaccccccccccgctcctaatgaacagatatttgcaaaaactcaatgttacgaagtggacttggacgaatacgcgctggtggaagaaatcgttgtggggcagcaaaggacggagccaaaccgaacggagaaaggcaccggcggagcgatgaaaccacagcagcaggccaacttccgagtgttggagccggaggaaaacatttggaaagtgcaaagtcggtggagcggtgcctcgggacgctttctgctggagcggcgggaccaacaggtgacaatgaacgaatgaatgaccaatgattggacgggagagagaccatcgcccttcagaagccaagcaaacgggcgaaga

SEQ ID NO: 52538 - DNA, 557 bp, Heterodera glycines
atgaattttctcaaaaatatttttttgtttcttctgtttctgctaatttgcgtgatcagtgtcgagaattcgtgctttaattttctgtgtccaccgaaagaacaacgtccgaaatccaaggagagcccgaaggaacgaaaaaatctttcaggttgggctaaaaaatggatttgtccttgaaaagggaagtccttgaaaaatgcatttttttataaatgggatgcgatttatagaaacaaaaatagctcaaaataagaatttcattcaaaaatccacggatatgtaaaaatgaaacggaaaaaaccataaaaatttatttggtccttcatgtaataattttttttagcctaagttatgtgtaaaaccttggagaaatttgttattaacttaggtaaatttatatttttctaaattaatttttaatatttaaatacataattttatacccaattaattaaggagcagccttaattggaagcaaatttaaaaaaattggtcgacacgtcaaagatctaaaccaattgccatataacaaaaattaggaagatttaattaaa

SEQ ID NO: 52539 - DNA, 1372 bp, Heterodera glycines
atgaatgtgtacatggcgaaccccgccaacaacaacacaatgaacaacaacaccggcacgttctatgcacagcagcagctgcacaacagcagcaactcatggaacagtcaaacaccacaatattacattgaaccgttgcattcgtatttttctgagtaaaaatcatttatttatttatttatttttttgcaaattttaattttttacaaagtttgaaatatgttttaaattcatgttattttcatttttttatattttaatgcacttttaaataatctaagaaattaaaatatttttttgaaattattaaaaaaatttaagaaatagaaaatatgtttttgaaattcgtatttatttatttatctatgttttgtatattatatttttaaaaaattattaatttttacgtccttttttaattttcaatataaataaaaaaattttctttatattaaatcatattttttgcagttcatcctattttggtcagccttcgtcaatgcttgggggctcagcttcgctcgattcgctcaatgcctatggccattttggcccactttttgctggacaacagggtgaattaattattataattatccatttttaaatcatttaaatcaattcatttatataatttaagaaattgagtattctgctaatttttcaacagcattttcagcgtttatcactggcggcattgaagcagcagcaccgatgcaataccatcagcaacatcatcatcacatggttggccaccatcatcagtccgcagcacttggcggtaaaattcaaaaaaaaattttatgattaaattcggggtgggcccccgcccgaactttcgggggtaaaaaaaagtcgggggagtcagggtttgtccagatgcggagcgcccgggtcggggtataccctgaaaaatggctacatttttgagtgtaggggtcggataataagttttcgaggataggggccacggtatatttcaaaaaatagcctaaattttcggggtaggcgtctgggtcctccctctaccctaattaattaattcaatttaataagttttattccacaattttttttattgttttggcttttttaaaaagttttttaagattttttaaaaattatttttcaaaatatcttttttataaacatgtaaaaagttgtctgaattgaaggtggcggcgattttctgatgggttcgctggttgttcatccgcttccatcgcaacagctggccgcagcagcaaccgctgctgaccgcgagtgcatttcatgtggtggccgtttatatgaggctgaatcggtccgcgttgatgcgcgcgggtattccaatcaatcaatcaatcaataaaacaatcatttaatcaataaa

SEQ ID NO: 52540 - DNA, 992 bp, Heterodera glycines
ggccacgactccttccgtgccttccgctccgcttacgtcaattcggaggtgcgctttgagaccaactcgtgggaacagctgaaccggcagtgtccacaaattttgctgtacgccaacacgttcaaatgcctggactttctgatgcgcactctgatgacggtcaatcggccggtgaagcggggcccactgttcaaaagtacacaggccaaacgctatcagctgagcagacacttcaggttgggagcagttcttttctagcaattttttcaaatttgatgggaaaatccaagggtgggatttaagcaaaaatttaaatttccgaaactccgagtaaataagcggacgagccgactttaaacttatttattttatctcaattacaaccaaacatttaattttgacaccaaaatggcaaaaaacaatgatgttttttgggctaaaaacggctataaatttttactttttttagacgaaaattttaaggcgccccaacttcggatttcccctccgattttttttttttgcgggcctggatgcaataatctgcaattgttctgcttcgttctcgctgtcactacaatttaagaaaacttgagaattttttgtttaagaattctcaaattgaaattttttttttccattaattttttttgttagaattagcaacttttattttcagacgttaattaataatccatacttttgtttttcaggaatgtccaattgatggcgtcgatgccccgctttctgatctcttattggatgtcattttcctcctcccatggctttcgtgtgatcagtgactcgttgcaattcgcttgcgactttttgctacaaatccatcccgatcagtcaaatgttagacgagggttgggaaaaacctaaattttaaataaattttttaaattttaggacggcctcatccgcagggtcaggacagcgtggaaaattctgcacacgtcggccgagttggacaatgcccaaattcacct

SEQ ID NO: 52541 - DNA, 393 bp, Heterodera glycines
atgttgttgctgctcagtctgtccgtgttccttcttgcctctccgtccgtctgttccgcctccgcccaatttccaatgtccgcgggcatcggcgactctccgccatcgcttcagtacgtcgcttcttcttcttctttttccgcttcatcatcgtcgtcggaagagtttgcccgaaaaaatcagatgggcgaagaaaaagcggacgattgggaggaggaggaagacacgaagttgaagcaggaccagaaccaattgaagaagaacccccaccgaatggttgtgaagagacaaatgaaaagagcggcagaagcgatggaagtggcggaggacgaaaagctggtggaagaggagcaggaggagcagcaacagagctgcacagtgcgcgtccaagtg

SEQ ID NO: 52542 - DNA, 288 bp, Heterodera glycines
attttctaagaaaaaataggagtttggggggcgcggcggtgccgataggcgccgccggggaaaaaaattggaaattttgatcatttataaacaggttttcactgaaaattagccaatttataggtaaaattttgaaaaattttatgggaatttaatccaattcttaggggtgtaaaagtcgcttttcgcgccaaaaagcgaaatgcgaaaagcgaaatgcgaaacgccaaaaaatgcgaataatgcgaaaggcgaaatgcgaaaagcgaaacctcggcccatccctgc

SEQ ID NO: 52543 - DNA, 1882 bp, Heterodera glycines
atgaggaagaaggaaatgaaggcgatggtttttcgaccgagaaagtgggacaaaaatacaattggcacagaaatcgaaattggcacgattacacaatgcatagtgatttggagagaaacgatggacgctgaactgttggcagttctaacaaaagttgaagaaatatgttatgaactgctttgtatttgggttgtccccaaaggagtgccaattcacgttatgaagaaaaggtttccggccattgttcgagtgccagaagaagaaaatattgacaatttattgacaaaattggaacaaattggaatgccaattgagaaaaagggcgaacaaagatggcacgagacagcttcaacaaacgcacctagagtgaattggaaccaattgggagacggtcacagagtgcaggccgcgggaagccattcatacaattcgtttgtggcgccacatttttcatcatatttgccaacaacaacaactaaaatgttcttcccaactccggaaatgccaaaaaaaggtgaaaattttggaaaaatccaatcagaaaaatttgatccctttgtggtattgggagtaaaacgaaagtctcaatctccagaatcaaattatgaagaagaagacatttttgaaggccctttgtgcacaaaacgaaccaaattttgggtaaattcgaaatgtgaaactacaaacacggagccgttgggggtcaaaacatttttcaaaaatgaaaataaggaaatttatcagccacattggaaaccaattgttttaagttcaccttcaggcaaaaaaggagctttctttttcgggaaaaattttgttttttccaattttcatccgtcttcttttatgatggatggctttaaatgggataatgtggaacaaaaatattgctttgaaaaggcctcgtattttggttattttaatttggcaaaaatgatcaaattcaaaaatgggatcacagaacccagtgaattcaaaaaatttacagacaaagacatggaccaatataagtcgcttgaagaaaatcccaaatcttttgatcagtatgaatggaatagagttcgagaaggtgtcattcgccctattttatgggcaaaattcacacaaaacgaaaaatttggtcaaatgttgtgggaaactggaaagtttccattatatgaagcctcagtcaatcttagctggggcatcggaattgacattagagaaagacagctaattttttcaaacatggaccaaggatttaaaggcaaaaatatgtgcggtcgtctgttagaagacattcgccaaaaacttaacccaatgggtacggtaaaccaaaaaaggcccacaaatcaaataaatgaaaaagatttagaccaaattttgaaaaagattgaaaacgacaggaaaatctctgttttcaaaactgaaaatattttgagacaatgtactcggattaaagaagttgtcaaagaaaattgggacatgaatgtatttatccaagggagcatatacaatggccttggaagaaaagaaagtgatttggatttagttatgataaactcaaaaggaataccgaatgattggacaaaaaacgacagttgccaattttttgacaaattgcggaaaaagttaagagaatcgggaatggcattaacccggactctgataatcccttcccgaaatgtctccattttggaaatcacaattaattctgatgaccaagaaataaatgctcaaattagttgcaataatttgattggattgattaattcgaaatggttggcatgttgtgtgcagttggatgtacgatttaaaactttatattttgccattttggaatgggctgacttttttgaaattcaccaaagtgctaatggaggcggcactttaaattcttatg

SEQ ID NO: 52544 - DNA, 714 bp, Heterodera glycines
atggttatacaaatcagaaattcaatgaaacgatgggttagaaaagcttttggcatacaaaaaatatggtacaccccgaaatttggccgtcgaaacgtcgccggggcataatgccgcagcaaaaaatttttttttttttaaattcagagaaacaaaaaaatttcaagtttttttgttttgtttttgaaaatttttgtttttagtaatacttagtttttcaaaaaaaaaatttcttaaatctttaaaatttttattttattattttttgcggcgactgcaataaaataattttacatttttctctcttccggtgggatggataccgaacgactgtattcatttttttcgtgtttattattgctaatccataacctttgccaggtgctgctgttcttcaaacgcacactgtccaatgcgttgttccgccagtgcctaatggagcatccgaaagcggcacgccattacgtcacttatctgcgcgagtgcggtgacagtgccgaattggcggacaccctttttggtagcgtatcgcaatttttggggcacttctcccttttcctccacttttattagaattcccaaaaaatattgaaaaaattttcagcgatttcaactaggatgatttactaaaaaaaatttcaacaaaaatttccagaaaatagctgaaaaattttccaattttttttccttgaaactaaaaatttctgtttgaaa

SEQ ID NO: 52545 - DNA, 872 bp, Heterodera glycines
atggatgatcctaaaacctataatttttcttttcctgaacttgcggccaaaaatgcacttcatttcgcatttcgaaagcacaccaaaattgagaggattctcaaaaggattgatgtcgagcttcaagtaggagcatttactgtgaaaatctaccaaaatatacaaatattaaatacggtttactagtcaatgagtccgttccaatgtgcccaacccattactttatccgtccactcgaaaaattttgatttctaattaaaaatcaaaaaaaaaaaatttttttttaaacagaaagatggcacagagagcggagttcggcaattgctctttcacggcattggcgatggttgcgagcgatgcgtttcgtgtgttgaagtgctcaaaagtcgtttggccagtcagggaaaaaatgttttccaatggaatgcattgagcaacaagaaaacatcatcaacaacaacagaaaacagttcaaaatgtgatgaaatggaggccttgaaaatttcggaaaactcgccaaagttgtaaaatgtcaaccaaacttttgtctaaatgtttttttcccagtaatggtggtacaacaaaaccatcgaagaaagacgaaaatcgtcctcaacctgttttggccattcttatctcattggaccctttctcaacgacggacggcgacgattcacagcactcgctgaggtgcggaggccatcgaattcaaatcgaaattcgagtctttaaaatgtttcagaaattgggagattttgaccaagcaaaaatgacgaaatttggtattccaaggcccaaaagtaggaaatcggtcttagagtggtactaatttggtttgtatcctatattttggtcaaaattatattaataaa

SEQ ID NO: 52546 - DNA, 255 bp, Heterodera glycines
tttggttgacattttacaactttggcgagttttccgaaattttcaaggcctccatttcatcacattttgaactgttttctgttgttgttgatgatgttttcttgttgctcaatgcattccattggaaaacattttttccctgactggccaaacgacttttgagcacttcaacacacgaaacgcatcgctcgcaaccatcgccaatgccgtgaaagagcaattgccgaactccgctctctgtgccatctttctgtt

SEQ ID NO: 52547 - DNA, 1009 bp, Heterodera glycines
atgaagaagtacatcatattatcttttaaaaaataatcaatcataaatttcactcattttttgtgtaatggcgggttttattttttcagaaaatttggactgattaatggtgccattggcgcgctgctcaaccgatcggtcagcgaatcgaaggcccttaaccaacagcatcaaaatgggggcggacactacggaaagctgaaggcccaccaacaatttcctttttcccaatcatttcccgtgaaagaaaactcgaaaaagcaacagcaagcaccaattgctcagtcggagccatcggacacggactttgacgattcactatcagccacatcagcagtggagacgggatcaacaccaatgggaagtggcgcgacgaggacaccgatcggacaaggctcggcggagggcgacacttcgcaacacgaaaaacgaccatttgttgcaatgtataaccaaacacaaaaacaccaaacaaattacgaagcgacaacaatggcaaacagttcaattagaggttcagtgtttgcagttaaaaccaaagctgtccagaatttcgagttaaaaacgccgaaagtgctaatagtcactttagtctttaatttaatgtgatcaattaagatcgtgcacagagctttgggtcgaccactccaaacgcaatgacaaaaagaccaaattcacgtgggaaaagtcattcgaagggaccgacctcacgagaaaacggcgaactgcctacggatgagaagcaaagaacgaatccaaaacccagcgaccgccttcgcattttctctacactcagaccatcaaagcctagtgtaaatatggacaattaggaagacttttaattagcaaatacaaattgcacatattagaacaattaatcattaaaaattgaaaggatacaaaaattataaatgtcgttgagcacattacatgccgacaatgactagctaacaaagtttggacagcccggtttcagaactgacttacgatgatgcacaaacaaaaatga

SEQ ID NO: 52548 - DNA, 686 bp, Heterodera glycines
atgaaggcattctttgccaagaacatcaaattgacaaggaaggcgcaccaagacgaggccggccatttgacgttgccgccgttggagaaacaatttctcatctcaccgcccagctcaccgcccgtcggatgggtaagaaaaattgctatttccaaaatgttagggtcaaatgcgttttctcaaccagaatttagtatcatgacgcctgatgtaaaagaacccagaattattctgttatgtggtgaaatgtttgcttttgcgtttttttgggtcgtccaatttgatgagaacccattaattcaaaagctgcctaataattttcacaattttttctgggaaaatggtacacaaaagcaagagcatttccaatgccttttctgttgtttcagattcaacacgctgaaatggcacccgtcgtttgcgatttcgatttaatggcgcgcctcgcgtcgctaactgtggacgaaaaattcgaattgttcgaaggcgacgaacaccaacgacgcccgtccattgttatcactccgtgtgaaaaggggggaggcggaggactgctcgcaaaggacggaggccaaatggcaaactcagcggacgaatcggaagcagaaaaacagcgacaggccgaattaaggtcgaaagtgccccttccgcacacgccaagaccaccgactttgaaggaagagtga

SEQ ID NO: 52549 - DNA, 1324 bp, Heterodera glycines
atgacattccaatctctgggactcaatccaccagcatttcaatctctgagactcaattctcaggctttccaatcactgggactcaacccaccagcatttcaatctgtgggactcaaatctccggcattccaaacacggggactcaacccaccagcatttcaatctgtgggactcaaatctccggcattccaatctctgggactcaacccaccagcatttcaatctctgagactcaattctcaggctttcaaatcatctgttctaagcgtagctgtcgctctaacacactttcttcagatctttgactattatttctatttctcatctgttctaagcgcataattctttggtcttgtgactcgtttgcttgacaggctactttaataatttaattttgtttttttggttttatattattctaatttttctaaactatttttttatatgaaagaaaccaaggatactttaataatttaattatttcttaatagttgacaggctactttaataatttaattatttcttaatagttgacaggctactttaataatttaattatttcttaatagttgacaggatactttaataatttaattatttcttctttttgccacatttgatcaatcatcgtgcctatttaatgtttgatcgactctaaataccttaatccatttatccacaccaattatttttcaagctaattcctgtgtttattttttaaaagaggaatttggtgtccagttttccagtgtccaattttctggtgtccaatttaccggtcccccctcttggttgggactttttttgaaggtcttaactttttcgatcaaaagatacacattgcgtgtattggttctattataaggttcaaaattgtcgactaagcaagtttttgaactatcatgtttcgcaattttatccatgccaataagcatgtttttttatttatttcgtgcatttgaaatttggttgcataaatgtgaatttttaaaatttaaatttttgttcgaattcgggtctggggttcggatttggacgaaatggatgccgcggattcgtgatcagcgtacccgaaaacctttggaaatgtattttcatgacttataaaaaattttaattttgaactttttgttcgaattcgggttcgggattcgaaataggctgaaatagatgtcggattcggtttccccgaccctggcaacccctagaatggtgttatctcgaaaataattttgaaatttttttttcaaaaaattttcgtattcactaaaaattaattaaagcctttctataatttaaaaaatttatacttttccctaataaa

SEQ ID NO: 52550 - DNA, 978 bp, Heterodera glycines
atccagtctccggattcttaaattggatcgtgaattttttttcgaatttacaattgatttcaaatcgctttgtaggacttccaggggcccgaaaattaggaggtaaggccggggtttaattattcaaatttcatacaagcaggtactttacgaatctgaagtccctaaagctccgggattttgagcccggtttcgggttccccgggagttgcggaaatgggtttagaacctatttttaggagggttcaaaactcgaaaaattgagagatttgacacttctaacttttttaaaacgatcgaatcttgataaatttggtatcatccgaaagctcttgacgagctgtctaaaaagcagtgaataaattttcttgtgtgttttaatctcaatgtttatcaatattcaacacttttggtatggaaatggcccaaatgccttagtagggaattggcggtagggaatcggccggtagggaattggccggtagggaattggcggtaggaattggctggaacacttgaattaagtttaatattatctgttttacaaatctttttctgaatctcttttcctagatgagttttccagtgccttctgacgatgatttttatgatgaaacaacagactatttatatttgaccaatgacaatgcaaatccgactaactgtgaacaggcgagtgccatttattttgaccctttcctttattacattgaaaatgtccatcaaaatagtgatttccttcaaaattaagactttggcgaatgaacacagtgccgtggcactttcgtcggcaatccccggcaatgatgaaaattcctcgtcgcccgccgttccctctgaacgaagtttagaattgctgaagaaatatttcggttattcgcgctttcgccctttgcaatacgaagtgatcgaagcggctctaagcaaacgcgaccaattgggtcgttatgtccaccggtcatttcatcggtcattttt

SEQ ID NO: 52551 - DNA, 959 bp, Heterodera glycines
atgtccgaggaagttgacagacacatcgtggagcgttacaaaattcaaaagagactcgggaaggatgaggagtaatggacgttttttgtgggtggtgaattggtccctttcaggagcgtatggcattgtttggaaggcgattgaccgaaaaacgaacgatacaattgctctgaagaaaatcttcgacgctttccgaaatgctacggacgcacaacatacatttaggtgaacagaaggcgcggaaggacagccattaaataaataaatggaacatgaaaatggaattaactaactacggttttcagagaaataatgtttctgcaggagttcggacggcacccaaacatcatcaaactgttcaacattctcagagcggacaatgacaagtgagtgtttacaataagtgcaccttttgctgattcacccacatttaaaactcaaattgtttttcttttttagggacatttatttggtcttcgagtatatgcaggctgatcttcacaatgtcattaaaaaagttgttccattattagaattgtcatttctttcaatcttttctttgttttattcagatgaccattttgaaagacatacacaaacaatgtttgtccttttgttttgtttttttttctgcatttaatgatctgatcctacaacagatattatgtgccaacttttccgtgccgtcaaatttctgcacagtgggaatgtgttgcatcgagacttgaagccttcaaatgtgcttttggatgccgattgccgagtcaaggtaaagctgtgtccgtttctttcccaccttttgttttagctaacaaattcaattgtcatttagttggccgattttggactcgcgcgttcattcagccaggtcaaattgcaaaatgcgtttctttcgtttgtttgacattttttttcagatggatgattatttggatggcacaaatgtgccggaactgaca

SEQ ID NO: 52552 - DNA, 1485 bp, Heterodera glycines
atgcgatcaccgccgatgtcagtgtcgcggaaactgctcgtgcggctgaacttttcctcgccgacggtgtgatcttaagcggtgccgccacgggtgaagcggcgtgtcccgacgaattggacggtgtgttagaaattgaaaattctcggcaatttaacaaatcatttttatggacagaagtgcgctccaaatgcacacttcccgttctgattggatcgggcatcgaagtgaacaatgtgaatttgttcaaaggggcggatgcgtttattgtcggctcaaatttcaaaaaagacggaaattggcgaaatgaaattgagagaaagcgcgtggaaaatttggtggaaaaagtgcggaggatggaaagaaaaagtgaatgaggtcttctttttgagtttttgtatgaattttccgtgtccacaagaatatcacctcagaaaacattgaaatgtatttgatttgttatttttgataataaatatttcttttttattattttgatagaatttttttcgtaaagcgtcaatttttgccattttttttttaaatttttctgtgcttttttcgactttttcattactattttaggtgcctttaaaaaaaattgaagtccccgtccccataattatctttttcaaatttttgcctttttaaaacatttcgccaaaaataatgaaactaaaaaatgttaggtttgtttttaggcctgcaaggatttcaatttaacttgtgttttattctgtgcaaaaatttccggaaaactcaaacccaggtgtatctggatcaagaaaaagctaagatctatatccagatcaaaatcgaactctgatttcctattgtaaaatgttaaaagcatcatttaaaaattttaagctaaaaatgctctttaacaatttgtcgtcaaaatttttgaaaaacggaccgttcacaaaagtcgcacttccattttttaggcgagtaaatacgattctattaatttatttttgtctattttatttttagtcgcttttgtttttcaaccgaagcatttgagaaggcgcaaaaggacatgaaacagctgaaggacgagccggacaacgacaccaaattggagctgtacgctttgttcaaacaggttgaattgtatagtcaaattttcctgcttttaagagggcaaaaaatttcgtttaaaaacgataattttcaattttccaggcaaatgaaggcgacgttcggggcgatcgtccaaaaatgctcgaatttgtggcgcgtgccaaattcgacgcctgggaaaaagtcaaagggatgccgaaggtgaactgtttgtttgctttaccaattgaaaatgcctgaattgccaaattattaaactttggccaacaaaaaactcaaaaatcattatttattttatattatcatttccaggcagatgctcagcacaaatatgcggagattgtcaattcgttgttgaaaaatgcggggattaacaacgcgaacacttcggaaaca

SEQ ID NO: 52553 - DNA, 98 bp, Heterodera glycines
atgtcctccattccaatactctcctccttttcacgtgctcttcaaatgcgccaacatccgttgctcttcggcatgattcatgtacccgcattgcccgg

SEQ ID NO: 52554 - DNA, 927 bp, Heterodera glycines
atgagtgcaccgccgcagtacaaaatgggcgaaaaggtggccactcgacaggcgtacggaaacgccttgctgaagctggcggaggccaacaaacgcgtcattgccttagacgggtgggacagataataggcacctaccgaatttaaatggatttaaataaaaaaaaatcctttttgatgtgtcaattcaatttttaattgttttttccgtttagtgacatctccaactccaccttctccaacctggtgcaaaagaagctacccgagcagtttgtccagtgttacattgctgagcagaacatggtcggtgttggagttggcatggcgtgccgtgggcgtgtgcttccgcatgtcaggtgggcagaaagaagccttttggattgccaaatggccaagaagacaaactgctgttatattaaggggattttaaaaacaattaaaaatttttttgttacactgaatttacaacagaaaaaaaaccaccgggtttttgccaaaatttttattaaatttgccccctattttatgcattttacttttttagcacttttgccgccttcttcacccgtgccggtgaccaaattcgcatgggcgccgtgtccttcacaaatgtcaaattcaccggctctcactgcggcgtttccatcggcgaggacgggtaaactgctgctggcagagcacttggaaaaaaagggaattgcttcaatttctgttttgtttcagtcccagtcaaatggccctcgaggacttggcgctgttcagcgctttgcccgccagtgtcgtcctctacccatccgacgcggtgtcggccgaacgtgcgactgagttggccgccaattacacgggcatcacttacacgcgcgtctctcgacccgccaccccagtgctctacacaagtgacgagaagttcgagctgggcaagtgcaag

SEQ ID NO: 52555 - DNA, 1006 bp, Heterodera glycines
atgattgatattttttacaattttactataggaaagtgcacgacgtcaaggccacttatgttggtgagaaaagtgcaattacctaatgctattttaatgattcattttcaactatttatcaccgatttcaattatttttgttgaccatttctcaggtgtctccgactcggtgttcaaagccgaaattgaatacgacgggcgggaaataaccaaggcgtatttgcaggagaaatgcaatttgacacaaatgctaaaagtgatcataaaagggtgtgattaaaagtcaaattgcatctttaaggaggtcaatgccttcaaaactgagaaagaattggcagagttcatgatgaaccatggcgaaaaactcgtcgatagagtacgccttttgagcaaaattccgacaatatttgtgtaatttttctttacttcttgccacagatgggcgacgatgttgacctgcttgaggaacgggtacaggaaaagcatccatcggttcggcatttggacttggagcccatgtgattgatcggctaatggccaggcgatggaccatttgcagacgaacctttcgcaaataacggacaaatgtcaaaaaattgcatcaaaattttaattaattaaatatttattttttaaaattctttttggccaatgttcttttcatttgaaggttgtgttggatattcgcataaatttttgagggaaaatgccaaaaatgcctttgctgatgcgtttaactcattgaatcatcggttgtaattcatattatgcttaaaattgtgctgctctaaacgaaaattccacaagaaaatgtcatttttaatttatttttttttaaaaacgtcaaaattcctttttaaatttccaaatcccattcctcaaagaatgtgttgtaaaaagttctcgagaacccgagactgttttatccggcccaagctctcgagcagcacaaatgaaaaagcatttttcgtctgttactatgatttctctgtataaaaatattcga

SEQ ID NO: 52556 - DNA, 472 bp, Heterodera glycines
acggctgtcaacaaaattttggaggcaaaagcgaaaaacgacgcggaattggaaagcgaagtgaaaacgaaaacggcaacactttctgaggacagcaaaaaggccagcgcagaggtgaaaaagcaatgaaattatttattggaaaaagcaattgtcagtaatttgattttaaatgtaaatttattttatttttttgcccttttcagttgactttgataattgaagacaaaaagacgactttggacgagaaggtgaagcggacggaggagctgacagccaaaatgtcggacaacacgaagaaggagctgaatctgaacaacagtgccgacgtcgtcgccttcgtcaagtcgtactccgccgtcgccgtgccggcggtggccacggagggcaaagcatgatcaatcagtctgatcggaggattcggcattgttgtgtgatgaaatgtagccaataatgaaattcattgattaaa

SEQ ID NO: 52557 - DNA, 477 bp, Heterodera glycines
atgaatgagggaagtaagcactttaaaaagactttgatcagtcgcggtcgcaccgctgggcatcgccattctccacaaaacgacgatggggacgatgaccaacaacaacggcaacaacagaaccaatttgatgcttatctgaatccacaacaaatggacaattttgaaatgggggcagaaaaagaagaggaagaagaaggggaggaagaggaggaggaagaggacttttacgcacttttgcaacggtttgggggccacggaagagagggcggcaaaacggcggaggagtgcggttgtggaaggcggcgcaacggcattggcactgccggaaagagtgccgccgatggtccgggaagggagtacgacgcgccacggcactctctggggcaatttttcaacagcgaacaaagactccgagacagaggtccctctcggcttttacttttgattggaaatgccgagcggcataacaattaa

SEQ ID NO: 52558 - DNA, 582 bp, Heterodera glycines
atgacaaattttgattcaaaaaacaacaaaattaaacaaaaccagtaattagacacctaatttttaaaatcaaaaattttcgtctaaaaaaaataaatattttggagatgaatttttgaggacatttttatttaacaggggtatgtattcttaaaaaaaggaagtaaaacaatataaaaaaggataattgatgaaagaaaaaatgaacattttggttttgtaaaataatataaatttttacgtattcgaaaaaaatgttttaataattcaataattaaggacattttcagtttttatttataatcctattcgattttttcaaattgatggcttttaatatttattgtatttttcttattttacgaaattaaatccggcaaaatccgacaaaattttgacgaaatatttggcgacggatgggacaaaaatgaaagtgaagaaaatgtgataaaaattgaacaaaaagaactaaatgaaaactgggaatttactcattcttctgtccgtcaaaatagtgatgaaaatattgcaacagacccaaatgatcaacaaaaaaaagaaatgattcagaaatttgaagca

SEQ ID NO: 52559 - DNA, 725 bp, Heterodera glycines
atgccatcgaagagagtgagtgagcattgcttccctttttacaaattcttccgcttttttggtgaaaaatcggtcgatttcggccgattggatgttcgtgtcggtcgcgtggttgcggttcggaagcacccgaacgcggactcactgtatgtggcccacgtggagctgggcgagttgcagccgcgcacagtcattgccggactcgtcaaattcgtcggattggaagaggtgccaaacattgggcaatcccaagatattgaaatggtccataacatttgttttataaatggatgtacagcttcaaaaccggctcgtcgtttgcctttgcaatttgagaccgtcgaaaaaacgtggcatcgattcgcatgcgatgattttgtgcgcatcgaccgaacaaaaagtgaaaaaaagacagccattttttgtgtgatatttggtctaatcaggttgaaccgttggaattgtctgatcagtcgtcccctcccggctctttgatcatttgtcccaattttgctcgtcagccggacaaagtgttgaaaaagagtgtgtgggaagaaattgctttggtaaaaattctaacccaaagcatttcattttaaaattttttgtaggatatgcttgtttctggcactggcgagtgcgttttcaagggcactccgctgcgagtggacgccgaagacggcgcttcttcgctggtgaccgcgccgacactgcgcaatgttccg

SEQ ID NO: 52560 - DNA, 1110 bp, Heterodera glycines
atgaaaagtaaagtaaaacagttaatttaaacattgtgggaagcattgctgaaaataataaatcaaataaaaaagtgaattattgaccgatagattttgtatatgttaaagatgcgaattaaaagaaaagcgaaatattgaaggaaagatgattagttggacttaaatgagtagaataaatacttatttaattgaatcaaattctccaattgaaataattcccaaacatattaattcatttgttcagattcccttgcttatttatcctctaattttccctctgagaatggccaacccttcggctgccattatatttgccctgttctcggctttttggtcaattatttttgaagcaacggtaatttattttttaataaaaaaattaatttttttttgccatgactttttctttaataaaaataaaaaataaaatttgctttaggctaggcctaggcttaggctttcttgggcttaggcgtaaacttaagcttaggctatgttttttaaatatgaattgctttgaacaagttgcctttgtataacattgtacgagttgccattaatccgaaaatataatccaatccaaattcgatacctaataaattctccctgattatttaaattttcagtgcaatgattccttttctgacacattcgcaacattcatcatttctcgtacggaagctgttgatgataatgccgctccaatggaaaatccttcctttgaacagcagcaaaatttggtggcattggacttgggaagagtgcgcgagttgcagcaaatgatcggacaaaatgccatcgatcacattgttgttgaggatggcattttctcaggcgtttactcatgccaatccaacattgagtttcaatttgatggactcagtctgggagatggcaaaatgcatcggatgctgttctcattcggagcaatattaagtgccgaaattgacggaccaaaacaaacggccagtgaaaatagcaactatttgcgttcacttttgaaggcttacgaatgcgtgggagggtcattaaaacaagacgaaggaaggtagtattgaaaaatttgcttagggttaattgttaggtcataaaagggcgtgttattta

SEQ ID NO: 52561 - DNA, 986 bp, Heterodera glycines
atggcccagccagactcgacgcggtgtggacgacccgcaaccgcagcagaacgaggaacagtctcggcgagctcagcggcaacaattagcgggggattattcgattggattggaggtgcgccaaacaatggaaaatcgtcggcttttgacggcggagtacgacgaaacgggggacaatagcagcggaggaagaggcgattttgttggtgattatggcagcagaaagaacggaaaaaggacggcggagggcgcggaaaaacggcagcggaacaaaggctgagacggtggcggaggaagcggcaaaacggcgacgacgacggtggcggcgaaaacggcactctccgacagtcaattgggggtgacatccacctaaacatggggagggcataaatctgataagggaaagtaagccaaaggatgacgactaattagttggggtaataagcaaaaggatgacgactaattagttggggtttgtccgggtatcgaaaagcgtgccttgaaagtaaagcagcatttgtggattggattttcaaaggatatttagaatgcccgagagtattggcctcaaatctcagcgtttaagatattcacttttgattatcggatttaaatcgattttcaagaaccaaatcggagaatggacggacaatcaattggaaaatcaaacgaaaatggcttcatattcagttttaatttaatttttattaccataaatggccaaaattgttggaggtgccaaaaggaatggccagcaaaaagtgtgatgaaaaataatggaggacaaaatgaagaacggagcaacggacgaaagaaagacggaacggtgaaaaagaaacgaacgaacgcccaaaggaaaggacgccgaggaaaagggaaactgaaataaagagggggaaattaatgagtgaattaattaattaggtaattaaaaattataaatatgtaaaatgaaaattaaagtaaaaaataataataagaataaa

SEQ ID NO: 52562 - DNA, 422 bp, Heterodera glycines
atggcaccacgtgatgactccagtaacaataccaatggtcagccagtcattcaatttgatcaacaaattcgccaggaccctggactaaatgccgtttttgactttgttcgggaacagggcgcgcgggtaatttgtcacaacaaattaattttttcattttttgattaattttgtttagcatggcattttcaacacacccgccgaaatcgtcaatgttcttcagcaaatggcacagcatcgactgaatgagcgcagagcggggaataattgagagaatgaagttgagagaaaatgaagagcgaaagttgagaacaaattgatgaaacaatacaaagatgatgggaaattctgaattattatttttttttcttacatgattttcttcgcatgatttaatttgttaacgatgctaaaacaataaa

SEQ ID NO: 52563 - DNA, 425 bp, Heterodera glycines
atggcatttcccgagccggagaagccaaaggaaccgacgccaccgccggcggagcccgagaaaccgaaaagggcgagtgactttgttgttgcgtttattcccctctccgatcacttttaaacgtcaaaacgctttcaggtgattttggcggacgacgacgacggcggaggcggaggcggcggattcgcggcgatgttacagcgaagggcgaagaaaatggagagcgggtcgacgctgcgcaaagggctaacggaacagagggggtccgagtcggaggccaaatggaaagaggcggcggaacggctcaaagacaaaccggtgagaggaaaagaagcggagaaaaagccaagggaaggaaaagccatgagaagggaaaatggggaggaaaagccatgagaggaaaagataaaaccatcactaattga

SEQ ID NO: 52564 - DNA, 583 bp, Heterodera glycines
  unsure (1)..(583): unsure at all n locations
ggtgtgtatgatccgatcgcaattcgttcaaaagctgtcgagaatctcgtgtttgctgtctcacaaatgagtgaatacgaacagagtcagatgggctacagtaagcgcgagttcatcaccaagtaaacaatgcacgaacaatcaaatgattatttgtgattatatgacggaaatttaacactaataataatcactgaccctttatgtacttttgatagttaattttcattaaatataattaaaatatttttatttaatatttatttttaagatgcagtttcaatgggagggaatgttcggtggaggaggacttctcattgtatgtggacccgacttatggcaactgtttcacattcaatgcccacccggacaaaaatgtgttgagtgaacgagccgggccaaattatggtaaaaatgcgtttcaattaaaaaacaaaatnaaaaatnccatttaanaaatttnaaatctttncaaatatttanccctccntttccaantttttntcaatntcancnactatttncccacnacanaanctnccnctnttaacattnctntncatnaatcaatncntcccntnct

SEQ ID NO: 52565 - DNA, 1765 bp, Heterodera glycines
atggctgcaaatttagtaccgtacccgcacatccatgcctggggaaagccgatacatacaattgaaatggtattcaaccggcgaattgcactcccggcacaccgtgccattggcttctgtaaacagctgagtaagggcaccgatcagtttggacttaaaggcaacagcgaaaaacagctggacgaaatgcccaaaattcgaggaataattttgggacttcgtgaagagttcaacacttttgtcatcgaaattatgttgacaagaattgaaaatgaaaagggtgccaatgaaaatggggcgaataaatcgttggaaaaaatgaacgaaattctgaaatttttgaaagagaaaaatggcagcgcattttgtgatcagtcaatcatcgaaagtgcgcaaggaaaagccgaggcacagatgaaaaagatgggggagaagaaggaaaagcaacaaatgatggaaaacattgcgaaggcattcgttgtgaaagcaaaactaagcattttaacggaagaaatgcgcaacaaaaaagatgccttaagcgattggaaggaattggatgcgctcattccaatcgcatttttttgccaatttggcacagcgttggagaacatcagacagtactgcaaaataacagacgaagcggggatggaggtgagtgagagaattcattagggctgctcgagattctcggctctcactcgagtcgaagaatttctcggttttttaggctctctgtctcaactttcggggatattttcggtctcgatcttttttggcggtttttagtcaatattttgaatttttttagtccatacatatagatctaataaattaaggaaaaactgaataatttggctgagatggcacggccattgactgatcaggtgaaatggctcgtcagccatcatctgtcggagcttatcactgatgttagtcatgtgcttgttctgctatattttaatgagtcaaagatcaacaaatttgtccattctatcgacgcaatttgtcacaccgttttaattgctgtgcaaacaattggcatcgaatatttggacattgtgtcaaaaataacggacattaaggctttgatcaaagagatggaaaatgtgcacaaagacaaagtgaccaaaacgattgaccaaacagacaaagacaaagtgaccaaaacgactaacgaacttttgcaactgctggagacgaaacaagacgcatttttggaaaacttccaactgctagtaatttgaataattattagatgcaaacaatcatttttcagtactttgcttagttgtgattgtttccatagcatccgatcactttcattggatttgatgatttgtgacggacgatcagacgaccataaccaaatatcatcatttatttaaaaattacaccttcgatatttagtcagtcatgtacatttattcttcttttttctactatcatttcttctttacatttaagttttgacaaaaccaaggatgggaattgtgcagcatcagaaaagccgagatcgggcttaattactgccatgtctttttggggtttcacttttgtccatttgtccgtttgacgattattattattacttaatttgtccagaggaaaattgcttgacaaacaaagaaaggaaaaagcactttaatttatgtcttgctgaaaatgcaggaagttatccatctgttttagtttgaatgagtgcacaaaattactactctcaaaagggagtaattttatcaaataaccatttaaacattaaaataaa

SEQ ID NO: 52566 - DNA, 1100 bp, Heterodera glycines
atgaaaaaatttattccatcatttttatttgtttttatccaattttttatttgttttgatttgtccgtttcggtcgaattccatcgatgggttaaaaactgcgaagaagtgatttccaacatcgaaactaagccaattgtaactcgtgagtttgtttgtgtttataagaatgaaatcagcagatttttgcgtacaaaaaatgaaatttattttatacataggaaaagaggcgacattaagttagggcagcagaaatcgggcactacgacattaatttaaaattgaaaattttgctgtgttttcattactatatgacccaaactggctttttaaatatggaacctgtaaatcttgttatttagtcaattcttcaactgtttaacgtagggttagacttgcattagtttccgcttggattgagactcgaatacccggcttatatggaaccgaaatatcgagaaagtccaattttatttaagggcataaaaatgatataaaataatatattttgacattgatccataaagaattgtaatgagtccaggaaaattaaccttttaattgagtgtataattcgcttaaaattttaaatctaatttgattaaaatttttgctttgagattagaggtattttttatatatttaaatttttttaaatgctaaatattgtgccgaatctttccggtgtccaaatttctgttgcccctcgaacaccaagaaatttgacatttattcttggaaatgagctgttttttcttgaaaaacaaaacgcatataaactattttaactattaaaattctttctctatttattaattctcagaaaactcatcaacagttgacgtcggcgaactaattaatttggaaaaagaattggcaaattttgagcaaaatattctccaattttataaattgggtaattacataaattgaccatttatcccaattttgagaaggatttttccataattatgccaaaaaaaaattagccttaatctggggaacaatttaatgcgagcaaattaaatatttgattaaaagggattgattgattggttatacggttttgtctaaaaaaaatccttcgaaaaatgaataaa

SEQ ID NO: 52567 - DNA, 258 bp, Heterodera glycines
atgaaagccaaactttctcaagatggacttcgagcaagaacattctaccaacacccgcatctttctccttttttgcatgggcttattcgtgatggaaaagttgtcaaaaaaaaattaattaataaaaaaaaatcaatttttgaggctgcctggggcaatttggaaagtcatgtgccaactgagtccaggccgggccatgtggcgatgatggctgggttttatgaggacgttagcgcagtcacacgaggatggaagtag

SEQ ID NO: 52568 - DNA, 645 bp, Heterodera glycines
agctgaagattcgattgatttctccgacaatgccactcatccgatcactttgtcccggaggtccaattttacaaagactgacctggcattcattgccggatggggacgtatcaccggtaaatcaaaacaaaagcaggatttatttaaatttctgcttagactggagttctccggtcactctgcaaggtgccaatgtgctgatttggccaaaggatgaggcgcgttgcgacggcattatggagtcggaagtttgcgcatttggcgaagacggagctaatgtttgctttgtaagaatacatttaacagtgaaaagctgcttaactgttattacccttctgaatcacagggcgacagtggtggtccgttgttggtcaaaagttacgacggtcagcgctgggaacagatcggagtgaccagccgaggcaatttcgtatgcgaatcgaacggtgagggcagccaattaacaatcaattaactgatttaatcaatttttaattacccattagcattcattaattactcactgtgtttatttttattttcgaattgccttttcctattttaggcttcttctcctgcgtttatatctactgcgaatggttggcaaaaataacggagggcgaagttcagtgtctaaataatgag

SEQ ID NO: 52569 - DNA, 315 bp, Heterodera glycines
atgcattcctttcttgtactgaccattctttttgccaatttggcaacaaatgcttttgggcaacaatggccaaaagcgactagtgaagaaactgttaaggcaacaattaaagtgtcaggaggcgtcaaagattttggcttcaaacggttgaccgcctcttcggcattgggcaccggtgatcagtcggagggccaaaaagcactgatccgtgccgaaaagaatgcagtgatcaaaaatttgatcattggccaaaacggggcggacggcattcattgctatgacgggtgcaccctgcataatgtgtggtgggaacag

SEQ ID NO: 52570 - DNA, 79 bp, Heterodera glycines
cgtgctgacaaaggaaggtccccaggtgtccgtgggatttccaaatgaaatttggtgggtggatagagcacccatgggt

SEQ ID NO: 52571 - DNA, 1246 bp, Heterodera glycines
gaggattttgacagttgttttgaaggtgatcgatggtcttgcgtttcgttttggcttccttttgtttaaccgttcttttttccccaaggctcaaaagttatcctgctcattcggtgtgcttgtgaaactcttttacgagaaatttccccatccgatgttggtggattattcaaatagaaatattttcgtgagcaggtgaggagtaaaattcacgcacattcgcgtaaagaaaatctgtttcatcagtggagcgaatactagggatcacaaactgttcagcaaggaggattcacgatcattcaccgccatcttagagttccacgagaaaaccttaaaacagggcattgagttgcccaagatgtgagagtttgtttactaattccaactttagtgattcaaaacatcttcagattcaaagacagagtcagtggtccttctgaagccccaaaagtgctcgttgagttggctaaaaagtataatgtgaagggtgggcattggattatgttcttcaacaaattggccacccacaaatgggaaaaagtcttcgacgaattgctctccggtcagtgatttctttaaatgcacagattagtttttaattttcagaagcattgaaacactgggggattctgaacagattcaacgcaaggatttcgtcggataatttaatcatttgttttgtcagttttccgattactgtacgatgcctcgtgattcatttccattttagggcaatgaaaaaacactggccgcgtcggatcccacgattttggactcatcggaccaactccaacggaacaatgtgaagaatgacccgggaccatacactgttctgcgaatcattgacgaaatttataaaccaaacagtaatttttcactttattcgtccattattctaaattattaagcatttggcaacatgggcgtcaaatgtattgtttgattttttttcctttatttctttttcattttagacaaattggacattgtcaggttaattttctcaaattttatactgatttattttttttctcagcgcctgttgcatccaacgggacaatttcattcggccaacaggtcaaatttgggagaattcctcaaattaatagttggtcgaaccctcgaataagatcgccattttcagtttaccaggctaactacggcgaatactctcaacgctttgtcccgtcgaatttgcctttgtcacgcggcggcgcattggagggaatgccaatgccaacggggc

SEQ ID NO: 52572 - DNA, 2021 bp, Heterodera glycines
atgattaaaattctaaagaacgcccatcatgaaatgcagcaacaagaggaaccggatttggaccaaatttccgacgacgaattgggcgacgaagttccaatcgatgacattgtgggtacacagcagaatgatgaggaaattgacgaaatgccggagctcgaactggcattggacaacgatgttgtcgaggaacaggaggaccctgaaatggatgcggtgggtacgtctactgcacagccaaatcccggacgcaatgaaaatgaggacgtcatctttgaccatgaagtggagactcgtggaggccggaccaacatctctgagcgacagttctaccgctaccgcatggcacttcgggggtccggcaagaacaccttccattggttgtggttcgctcgacgacttgccgagtacttcaccatctctgtgctcaaccggatcgagcggaacgagctcaaccacttgaaagccattcaagtgaagaagaactaccggcagcttctagcccgtgaatatatcgccgccatggagaagggggtccgacagcaaggaccaaatgccaagctcggccgtgttttcctcatgccacagaccttcgccgggtcgcggcagtattaccaagggaagtacgccgacttgatgacgatggttcgacacctgggggctccgacttggtaaaagagtcacaaattaattgtaatgatttatgagtattataataaatgttaaggtttgtgacatttactggaaacccgaaatggccagagatcgacgaagcattgcgggtgcgtcaaaactatgctcaccggcccgacattgtgtgccgaatcttcatggataaggcggcagaattcatcagggatgtgacggagcgtggtgtgctcggcaaagttgccggttggtgctacagtgtggaacatcaaaagcgcggtaattcattaaaattaatagcataattaaattataaaattgttaaggcatgccacacatccacatgcttctgatccttgaacggggggtccgcatcgaaactgcacagcaggtggacgaatatgtttccgcgcgcatcccgacgcttccaccgtcatcggatcaatcgcccgaaggacatcagcagcgtcgcctctggcactacgtcacttcaatgatgttgcacgactgcaacgcggcatgtctggaaggctcgcgatgccgcaagcattttcccaagccgtactctgaccggactgaactatcgggtaaatcatgttgtcatatatatctgataaatattttgtaaaaatttaaagaggtccgttacacgaattatgtgcgcataccccccgacgaaagtgacacgttttttggaagagccggtggccaggacaaccaacatgacgacgaccatcacgacccagctgctgacccggaacgagactgggccgaagtgcggtaccagcgctttcctcaccaaggaagagttccggcgaggcagcatgtactaatttttcttatattgtcaattcaaaatataattattaagggcgaacaaggccagacgcattacaagaagaaaaggggggtccggagcgcaattctgatggacgacagccgagtcattccatacaacccgtttcttctgctcaaatacggatgccacatcaatgtggagtacgtgttcggacagaaggcctgcaagtatatcttcaaatacctgttaaaaggttgttattttattaattttgggtttttcaataattccagaacattcagggtttgaaaaggcctatgtccgtgtcgcacagccacgaagatcggcgcaacagggcagaagcaacgaaactgcgggtgcggacgaagtgtacgactacgacgagattgcagccaccttcaaagtgcgctacatgacggccatggaagcatacctgcgcctgaactcgtacaaaatcgtgggtatgtcgcaccaaatctacacactcagcgtgcacgacgaacttggccaaacgattgtcgtggaagaagggcatgaagaggaaggacggtga

SEQ ID NO: 52573 - DNA, 1262 bp, Heterodera glycines
gcggggtaagcagtgctggttcgtttcatcacggcaccgaaccttttggctagtcagcaatcgttgcttaacttgccagatcggacgggtgcgcatgattccactgttccaagcaccccaccaaaagcaaaacgatataaccaaaatataaggaaaaattttttaaaaaattttttctccatcttcctttttgatactaaagcatcagagtgctaaaattaagttgtaaataaaatttggtgcgctttagagcactttctgaaaaaaatatttatgaaacaaaaaaatcgattttttcaagtgtccgtttggggtactcaaacatttatggggagcaaaaatccaacgcagaattaaagtacaggctatagggaagctattcccgaaggattcggtctccccataaatctgggcgcatcggttcggggggactgccccgaaaacaaaaaaatcgattttttcaagtgtccgtttggggtactcaaacaattatggggagcaaaaatccaacgcagaattaaagtacaggctatagggaagctattcccgaaggattcggtctccccataaatctgggcgcatcggttcggggggactgccccgaaaacaaaaaaatcgattttttcaagtgtccgtttggggtactcaaacaattatggggagcaaaaatccaacgcagaattaaagtacaggctatagggaagctattcccgaaggattcggtctccccataaatctgggcgcatcggttcggggggactgccccgaaaacaaaaataaatcgattttttcaagtgtccgtttggggtactcaaacaattatggggagcaaaaatccaacgcagaattaaagtacaggctatagtgaagctattccggaaggattcggtctccccataaatctgggcgcatcggttcagggggactgccccgaaaacccaaaaaaaaattttttggataaaaattatttaaatgaactgactagataatatttaaaataggttatttctcttcctttcagtatccctgcaaagtttggtgcgcttctgatcagtttctgaaaaaaaagttaagcctaaactttttggcctgtttaaaaaggaattaaaaatttttaaaaattttattcatctccctttttgatagaaaaagcatcagagtgcctaaactaacatgtaaataaaatttggtgcgtttcagaaccctttctgaaaaaatatttaagaattaattttgcaaaaaataaataaaaacgaaagact
